United States Patent Application Publication US 2009/0018031 A1 - sequence listing, part 19

SEQ ID NO: 9910 - DNA, 6000 bp, Homo sapiens
ggtagctgctaagcacataccctaatctagtgcagattgcattgtactctgtggcttaattgttgtgggttttttgttgttttgttttgtttttgtttttgttttgagacagggtttcgctcttgttgcccaggctggagtgcaatggtgcaatctcagctcaccgcaacctccacctccagggttcaagcgattcttctgcctcagcctcccaagtagctgggattacagtcatgcaccaccatgtctggctaattttgtatttttagtagagacggggtttctccatgttggtcaggctagtctcctgacctcaggtgatcctcctaccttggcctcccaaagttctgggattataggcgtgagccactgcgcccagctggcttaatgtttttaaaagtgttcctagagcttttagcttcaagggatttatttttatttgaattctgtgtctgtaatattgtgcagttagagttgatcagaaattgttgtctggagacctgttttttaaaagcttcattttagttttatgttttttttgtgtgtgttctgtaggtaggctgatatttgtttgtatgcctttcttagttttaattgggaaaagtaaattatatagtggtaaggtcctggattcatttttttttccccattgtaccagcagtctttggttattccacgtatggttgtggcatgtgtgttttagtgtatttcttatttcttttctcttagggcctcatgcatctgcaggggaagccagtttgttcttttgatccagaagggttaattttcgctgcaggtgtcaactctgaaatggtcaagctttatgaccttcgttcttttgataaggtaaatctttgaatctttgagatctttgagctgttttttgttttgttttgtttttgagacagagttttgctcttattgcccaggctggagtgcagtggtgtaatctcagctcactgcaacctctgcctcccaggttcaagtgattctcctgcctcagcctcccaagtagctgggattacacgtgtccgccaccacgcctggctaattttttgtatttagtagagatgggtttcaccatgttggtcaggctggtctcaaactcctcacctctggtgatccacccacctcggcctcccaaagtgctgggattacaggcgtgagccaccgcgcccggccctgtaagagccttttctacaaaaggaaaaatgtggtagatattagagagtggcagagaagtagctcattctctgctttccttagtcaaaaagtaatctaaaggaataggatgggaattggctctagcagaagaaattattaatatgcctggggctactgttttttatcttttgcaggggccatttgctacctttaagatgcagtatgatcgaacttgtgagtggacaggacttaaattcagcaatgatggcaagctcatcctcatttccaccaacggcagcttcattcgtctgattgatgcattcaaaggagtggtgatgcacacatttggggtgagctgacagccttcaagcatggctgtttccatgctcatacttcctatgctaagaattatgttagctggttggtggagaccaacagttactcttgacttactcatgaaggcatgcacttgtattttcttcctgctcatgaacttacctctcttggatttcgtagatgttcatttctcaccaagtgacccaagtttggtatttagatataaaataatttcctaacaataaagttttcttgcccccttgagtatgccttgaatacagagttgagggtgggagtggattgtcaacgatggcaaccacatttggaagcttggtggtgtagtacatgacaaggaaagggtttcatggaaaggaaggtgatgcatgtgctgagtcagtgtttgtaggcagctgtttttattaatggctctgtaagaacaaaagaactgctctgttttgttttagggttatgccaacagcaaagctgtcacactggaggcttcatttactccagactctcagtttattatgattggtgagtttccttttatcccctgtgggggttatttctctggtactatgcatttctttgtttaaattattaactgagacattattatctatttgatagatgttcttagatttctgtatagcacattatgccaaggacatagtgtcttttaactgccctgactggaccaaaatttgagttaaactccacaagcactaccttattagtaatgctaatgtcctggtgtaaccctacattcagtcatcttagtggctgcctgttggtagggtaatggtattcggccccttttttagatgagaaaactgaagttagaacggaagtgacatgcctgtgaacaaatagctagggtcaagataaatttccaaagtgtccttccttcactgcctctcctccctctcaattttgcctgagggatgggtcctaaagcttggcgtatcctcagatctcaatccatgtctcatttccagttgtctttgtattgcgccttgagctgttacattttccgtgaatatcctctttaggttcagaggatggcaagatccatgtctggaatggagagagcggtataaaagtagctgtgttggatggtaaacacacaggcccgattacctgtttgcaattcaaccccaagttcatgacttttgccagtgcgtgttccaacatggtatgtgaacagtaagaggtatctgctactcagggacccttcccagttggggtggtgggtgcctcaacaagcacagcaagctgtgttctacataggtacattacaagcatccaagtacatgtttctcaactggtggtttccctatttcatctcctattatttgatctctggctgggctggtcttgcctttcatttttattcttcctagaggtgatcaggaatcatctttgagttccaaggagatcataggccagtttttgctctggaccctaattttaggtccaaactacctgggctatgcttggcaatttttttgctccttaaaatactctgaaccggccttttgtggtttcagttttccattcctgttggtttacgccaaattcccagaaatttctacagttggtcataactcaccacttagaattaactccaggcccttatctcttcctagataatactaacagaacaaaggatcagtgagtctcagctccagttttcccttgtgatctcctaaacctgcctgggtattcggggatgagacatttcattactagcctacccggagcacattgccaccttgctttttttttttaaccaagaaaaaaatgttagaaaaaatacagcaaaaccatccagttccttactttttacagcccaggaaggtgggggcctgttggaggtaacctggtggattagcaatgaggacaggttacttattcacccacctcccaggcagcactcctttttttcccttcctttaaaaaaaagggggcggggggtctgctttggtggaaggtggacagtgattattggagaaaaacagaaccattttactttcacatagaggaaagagtgtttctgtctccttagagcatcggggttggttggttaggagagagggctaccagagccactggggttgggcacatttttgctgtggggtgggatgtgaagaaccgttggcagtgaggagatgcttggctttttaaagttgatttatgttctccttctaggccttttggttgcccaccattgatgactgaccctgttgctgcttggctatttctgtatagtgagggcggccagcaggaagaaactcagagggaactgagataatagtgggattggatcatttgactgggctggagaacatccttttacatggccttcccatggatgtgctgtacatctgctcaaaagaaaataattactttgatgagcgtcttcaaaaggactcttggtgcaacagactcaattggaactcagcttttctaactgtcactgcaccaagctctgctggaggagtgaccagactcacgatttggtatagtggggctctcaagcatcttcaatttgaatgtacatgctgctgaggagccggtgaagtcatcagttccgcacatcccttctaccctccaactgcatgggaagccaaagtcctggttttgaaatgcttgggcagctcagccgcttgccctcaccctgcatgtcttgttactgggtctccctgtgtacttgtggcattatccacaaccatcatgtttcttaggtgccaaacatttacagaaacattttcatatatcttggggtcagagaaagggacagatacagaaggaccttgcttgcaggaagccatgcagttagtttctgcagttagtcgtgtgaggctaggtggttgggcaggcctcgggctgtaggtgttgggtgggaaaaagacccaagggcctgaaagggagggaaaggggagggtagcgggagggtagcaggtgagttcctagggctggaaggtttagcagcagcctggtgcagtgccctgtcatcaagacaaacccacggtcctcctgggtgcctaccaagcttggtttgtacaaaagcaaggtgggagtctatttttgtacatgagatacatcacacttacctgtgggccagtattgtgaagtgagtctgagttgtttacactgatgccttccctgcccaccacaaattgtgtacatagtcttcagatgataccacccctttccccagctcccaaccaagagctggttctaggcctgtgttatatgtcatatttagcgtttttatatatgacctttgatttctgttgtttgtattttagcacagtgtatgcaccttcatttaaatacatctgtgtgcatacagatacgcatatatgtgtgtgcgtatgcatatatctctcatctgtagtttccaagagttcagctgaagcagatggagtcctgcagcccaggagacaccctgcatccctgctaatagtgtttgccacaagtattagtgagtcttccttattaatattttcatttcagaagactgaagcaaagctgatagtgtttgctgtttctttggcagctaagtgagggtcttgggatgacttgctgtgttcctcaagctgcactttggggccatctctgcagtattagccccctttttgcttggtggtactctgtctgtgcctgtgtgtgtgtgtgatagtcactcttgcatggcttccatgtctggtttgtggcatttggggataaggtgctgaagccagagcatttgcagtttgtttgaggcctcgttgccaatgatagatcactcctgttgacctggtatgtctgcttgcttgctgcttttccttgctttctcttggaagaggaaaggactctggtcaggcccaggctgagtgagatgagctgcagctggctcatggccttcttagagcagagagaggagtatgtcattttactaagttcctaaacaaacatttatgcaggcaacactccttgcagatccagaaactgaggcacaatagggttatgacttgctcaagaatatgtagctgctagggggtaaatcaaggcatcacaatttctgttcagcgggcaggaataggctgtgaattgctagcactttttttttttaagcaattactttttgacttgttcctctgaaagtgcaagaggcgtacacctttcccaaatgtagactagaatctgcaggatgccacccactgtatagttctgctttcccagagaggaagaacttttagaaaccaaatgatcttaattgttattgcccacccctggcttttccgggtagaaaattcacagtaggaatgattgttaagagagagtgcttggaaccatgggttaacaggaaaggctacctaacttcacatatctgcaaccagagcagccaccaagcattacttagcagcaggaaaatgattgtatttgagttcctgtgtgtccaaaactgagcaccatgttctttgaaaacatgccacctcaaggctgggcgcg

SEQ ID NO: 9911 - DNA, 6000 bp, Homo sapiens
tataccattgctgtctgaggtttcaaatccagcaacctgaaaccacagcatggaagaaaacatcttcagagtttgtttttttttaaatttataaacaacatttattgaatgcttatcatttccaggagccataccatgcattgttcatgtcttatctattcattcttcaccattactctgtgaggtggatatttctatccccattgtatagttgagaaaactgaggcatggaaagatttggaaacttgcccaaggtcacacattttattactgtcagagtcacgacttgaagctagtcagtgtaaatagttttgcctttaaccaccatgttagactgcctgtgaaagcagtcattgaagaatgaacatgtattggatgtttccaactctaagtggaaatccatttccacttgtttttatataaggatgcactgaggcagtgtgggttctgggaagattactgtctctggctttagttataaaattgtttaaccaactatccaaccatctatccaatcaatcgaccaactacgtaaccaaccaaccaatgagccaaccaactattcaagctactgccctagctgtgagccacccgtccaaccatctgtacaatcagccaactaaccaactaaccatcctcactcctcttactgtaaaactgggattcataattatacccactgtgcaagtgaagagcttaacacagggcctcgagacactgattaatcactactactattgagttgtgttgttcttgagctgagcactccaataagacaataaatgtctcaaagacatgggagaggcttgaggcccacttgactatcctacaaaaattatccctgaacttgctgaaaagggtgtggaccatacaacttcacagggtattctttcctaaggggaaattagttttgatctgatgatcacagaaacttgggcttctgcagaaaactttgctgactggcttttttttttttgatactgtgactcatacaatgattatgattttctaaccagcagccagatcctctgggaccgagcattttgttttaacttcatcctggacttccttttatatttccttacttgtttttcctttgtccacctttttgaaatctacttcctaatctatgttttctgggttgaaattgtttggttaggatttcttaagtcctcatgataagcagaaggaatataaatatgtgactatttataaggtctagtttacatattgactgctgtttcactgatgcagagagagaaaggctacctcaggagaagtgaaaaggccaccatgcttctgcctgctccaaaacgtggggcagagggtatgggatggcaaggtataaaaacataaggcagatggaaacactttgggtagtggcatagtttcttcttccattgcgcatgtgtaggattaaaatccctcctcccaaaaggcagagagagagaaaaagaggagaggagaggagagcagaggagaggggaggggagaggagaggaggggaggggaagggaggagaggggtgaggaacggaggggaggagaggagaagaaaggataggagaggaggggaggggagaggaggggaggggaggggaagggaggagaggggtgaggaacggaggggaggagaggaggggaggggaggggaggagaggagggagacggagagagagagagagaacagaagaggagaaagaaaagaaaaaagaaaagatttgtaggagagaagcagtatgctacaaagaaacattttgagtttcaaagtttttaactcctaggttttttgtttgcttattacatgaaattagctgaatcacttaatttctctgatgctcagtttttcttatctgcaagatgggtcaacaagtcctacctatttcaccggttgttgcaaggatggaaagagattaaggcatgtagaaaaaggtttgagaattgtaatgtgagcttcaaacagtaggagttaggagtttgtattatttcctacaaaatgtcaaaattccaatagtgctatccatgagacatttaaagcacatttccagctgtcataaactgatgggaggtggggaacaaaaaaaaagaaacaaagcaaataaagcaaatgatttttttttttttagattggcccagtacaatgcgtcaacctggccttgtttataagggcattccctcggtcataaagcaccatctgtcaccttctatccacaggggtagaaacaggaccaggaggccgtcttacctcatcatcacagctgatggagcatttgccatccagggaagcacactgtgaaggcaaaaagtggagggaaatgtgttactatgttacttgggcatcccagtgcctgctgtggctgccactgagctacttaaggacaagctatccaagtcatgggctagaattcaaatacccaatttcattgaaaaggaatgctccatgatgtgtcttgtctactatctctggaatcagtatcaattccaagtagtaatgtaaaataaaagatctatgaaacaactgagcggggtggggcaggcacagtggctcacacctgtaatccctgcactttgggaggccaaggagggcagatcacttgaggtcaggagttcgagaccagcctggccacatggcgaaatcccatctctactaaaacatacaaaaattaccctagtgtggtggcaggcacctgtaatcccagctactcaggaggctgaggcaggagaatcacttgaaccagggaggtggagggtgcagtgagtcgagatcgcaccactgcactccagcctgggagacagagcaagactatctcaaaaaaaaaaaaaaaaagtctactttatgttgtcattaaacagtaatgatatctttttaagatctcaaatcttttggtaactaaaaatacaattatgtaattaatttaaaattcattaattctcagtgactttaaaaaacccctgtccatctccttagtttatagcttcctaaagtatcttaatttaaaggatgataagccattctaacatttattcttggtcagatggaagcaacttatcagtggccctttctaccaaattactcaacaaataccactgagatgacttagtacagagagcatagcgaaaagaaaacaatgttcccagattctccaaggtagaccctgtgaacaaagaagtcagatacatgttttggagaaactagttacgtaaagggtttctagattttgataatgagattcacaagtaagtaaccaggcacgaccacaggattaggagaaagtcagaatgaaaatctcacaaaaggccccaatacttaaaagaaaaactcctttggaaggtcactatcttgatcccacaattaaaactgttcctaggagcaaattccctgctttgctcagcatgtggtgtctaacatgctgacagccctttattttgcagtgaaatgaaaggtaatctgagcagccggcagttgattttacaaacattcatcggaaatctggcactttcaggctccaggtacccaaatgggaacacctgtataataacagtgtcgctaatgcttcaagatgctgattataacttacctgtctgctggcagtccagaacttcctttggaaaaattcaagtttcatctgaatgcctacagctgggacaaattataaataaaacaaggcattagtgatccctttacacaattatttaagattatcgttgaaaattatccgtcatggcaagaagctgatataagcatataaaataaaatgtacagtgaagcatacaactaaaacattttatctttcaggtaaagaattctcaagtttacctgcactcacagaactctcgatacaaaacaaacagcacagtgcagatcgctctttggagacatgttacttcggcatttctaaaattcatatgcttgcaccactgcccctacccccaccccaacacaagctgagaagaggaaagaaaaaaaaaaattcaaaagatcactattgcttcagttcctgtcagctattactgtttgaacttgcatgtctaaaatgtgtactctgcatgtgtttttgagacgtaacatttgaaaagcacttgtcatgaggctagaattcagaagtgagtcactttactataatgtgtcttagtttaactggcctcctagagtccacatctcaaggttcttctctcccatggaactctggtaaaattatgtaattttttctttgtctgtgaaaagcttcctaaagcaactgtgaatgctagttctagtgacagaaacagccaaaaagagaagaggttaagaatgtgacttgaaactttgggaagtgaaatttagtggaacctcaaaactataacatgaggaagttcaccttatttttctccatgaagcccaaaccacttgaaagacctgaaaccatctcaggaagtaaaatggtaagggcaaaatgctcctcagatggtgggaaaacttgagaggcgttcagaagaatgagactacagggaatactgaattccctggagcacgtcatttaccccagtgcagttttgcaaactgtagtctgttgcacacaacctccccatttttaccatatttgcataccaccaatactcttattgtccttccacatttctttcttttgcttaaagacctacagtaattcaacctaaataaaactggaacacccatcaaaagaaatacacaattgtaagaaaaaaaatcacttaaatactctaaaaattttgcgtgccactatactggacctcccatttgggtaatcattgttgtgctggcttcaggaacttggagattcataaaggtcttgggctgttgttaccctgataactatcaagggcatttctacttcctaaagaaattgttgaagccagccctgagagtaaaggttaactgggtgtgtacattgggagagatttgccatctgtgtttgcacttagaatttccgactctaggataaagactagagcagtgcacggctgcaacatgcagaacgtgaaaagcctctgaaatgcaccatgtcggtgcccaggctcattctgctctgccttaagtgtccttcgttctctggaccacagccttcccaagaatgaggacctgttcttgctccctgctggacccctgcctccagcaagatgctgagtacacagacgacccataggtaaatgcttgctttttaaaaaaaactttcaagtgatattatagtcagcagttagagagaaatatagaagagtaacacctatgcgaatcgtttgtttgtttgtttgtttgagacagaatctcactctgctgtccaggctggagtgcagtggtgtgatctcagctcactgcaacctctgcttcccgggttcaagtgattctcatgcctcagcctcccgagtagctgggattacaggtgtgcaccaccacacctggctaatttttgtattttctgtagaggtgaagtttcaccatgttagccaggctgatctctaactcgtgggctcaagtgacctgcctgcctcaacctcccaaagtgctgggattacagatgtgagccatgtggctggcttgggtatgttttaaaagtgtcccagatgattctcacgcacagccaaggtgggggatggctttagtaaatcagctgttggggacctactgtgatgtgggccacgtggccagactacacaacacaaaagctgttcttcccagcattggagaacatttcagagaatgcctgaaagaagctgattttgagtctgatggtagttgactgcatttcaaataaatctcatcttccaaatgcctgacaggccagggtgcagggtgcaaaacagggtctgactccctgaaagagtcactccagggtagcctttccatggtgcttctccctccaacagcccagagctgtcctgggcccacctgtcatctcttgagcttccatgagtctcctgatgccctttctgagacccccacccccgttctctgatggagccctcatcttcacctccctgatgaagc

SEQ ID NO: 9912 - DNA, 6000 bp, Homo sapiens
ctgccttccaggttcaagcgattctcgtgcctcagcctcccgagtagctgggattacaggcacatgccatcatgctcggctaattattgtatttttagtacagacggggtttcaccatgttggacaggctggtctcgaactcctgacatcaagtgatccgcccgcctgggcctcccaaaatcctcggattacaggcgtgagccaccatgcccagccaggccggcgtactttcttatcaggacagttgtggctatcaagtcagcacgtattctaatcatctgccaaagcgaacatcctaaaacaggaacgaaatcattctcttacttaaacacctctgttggtgtctcatctacattattaaaaatctaactccttagcctgccttcagtgcactcttgtttgtccccagattctcacttatttctcatataccttaggcttcactgaaactggattctggtgccttacctgggaccgtgttcacccattcccttctttttctgcttgaagaaaagtgttgctcatccttgaaggtaaacttaaactccatgtcctccataaagccacacagtgttaagggccactggttttggactcaggttgacttggattcttatactgtctctcttttggggggatgtcatttaattcttctgaaactcagagttttcatctgttagagaaagacaaaaatacctaccttggaggatgattgtgaggctcagggatgcgggaatatagtaggagctgaattaaaagcaattctgattatttccgtggtcactattgccgccccaccgcacttgattgcagcccctggtgctacaccagctacatttgctttatgtgacagcaggttgtggacaagactgccttgatctctagactgcaagctcgctgtgggccgggctcacgattcacccccggatctcccagccctggcaccaagccggcactgggggcgcgccatgcctgcagaataagtggggaaagcgacagggataaacgtagaaaaacaagcacagacagacggagagagggcagactgggaggcaggtttttcccggagtctccaccgaaggacagagagggcggagtcagaatcgggggcgggggcctggctcaggaggtggggcctggttcggaggcgggtctcggcgcggacccctccctggtccgtcagtgaacgtgctccgcgggctcagtccgcccgccgctgcgtcccggagtgcaagtgagcttctcggctgccccgcgggccggggtgcggagccgacatgcgcccgcttctcggcctccttctggtcttcgccggctgcaccttcgccttgtacttgctgtcgacgcgactgccccgcgggcggagactgggctccaccgaggaggctggaggcaggtgcgtggcgggaatccgggttcgggtcagaggaagggagccgggtccgaggaccggggctgggaatcggagattcggagattcgggttccggtatcggaggcgttgggaattgaggttcacttatcggactggaatccgggtctggtatccgggcccgcgtccgcacggtctcggacagaagggtggatgggagcccggctccgggcctgactgggacctgtgtggtgctggctgcagggtgtgcagggcgtcacgccgcggtgcctttggttgggtggatttgccgagggagacgcggcgctgagcctgcccgcgccgttgctttcccagtcccagccctgggccccatttccagcccaccttcgcccccgtgcgggcccccagcctcttcaagtccactttcaactgtctctcctcctccccaccccacttacgtcaggtctgcccttgagactttagacattagatcttcaggagaaatattgcatagacaactttaaattattcacgaattaattatcgactctgcccgtcttcctggttgtctctacttttaccttttttttttttttttctgagacggagtcttgctctgtcacccaggctggagtgcagtggcgcgatctcggctcactttaacctcctcctcccgggttcaagcgattcacctgcctcagtttcccaagtaattgggactacaggcgcgcgccaccacggccggctaatttttgtatttttagtagggacgcggggggggggtctcattatgttggccaggctggtctcgaactcctgacctcaggtaatccgcctgcctcagcctcccaaagtgttgggattacaggcgtgagccatcgcgcctggcctccttttccccttctaatgaacgactggtcgaggcaggaggcagagcaatacttacctggccggtttttgtgagtgctgcatactctttataaagtgcatggaagtgtgcctagtacagcattgcgtggttaagggaattactgatatttgactattaaggcagctgttttcagttactgtattcttttgctgtagctaagaaggctctgctgtgggtgtcggacataccgagagaaactctcgtgagaagtaggagggtttgctcatgattaatcagtgatggattcaaggactgttcagatggcagaggcaagatagccttgctactataacccttgggcaggattcaaagtgcattgaggaccagattaagagcagagttaaatagtaggctctttgaaagggttcgattcaagcctgacatattatcaaaaaagttacatttatcctatgggatagatatactttcctgaagaatctctaattggctttatagtgaatgctaaaaagtcgttttacttggcacctcaggaacagtttgaagtctgaattgttcttggtttgtgggggaggcagtgtccttgaaaggaaggcaatttgagacatttagaacttgcctggaaatgaatccatttgcctcttaagaacagattctaaaatcccagagctaaaggggaacttaatgactgtttagcaccaacctctcactttttagataaggaaagagactcagggactagtccaaggacgtaaaacagaaagtagcagggttgggatgctaacccaggtctcttgcttccaaactagggctctcctgtctgtctccgcaacgtcgtatcaggtcatctgtcattgggagtgtatgtgttcccagcagatcagatgatgggcatatttataaacctactctgaaaagaagacacagcgagtgactttcatgggcactggactgatctgaactcatgtttccatctgcttttccaaatccccaggtcgctgtggttcccctccgacctggcagagctgcgggagctctctgaggtccttcgagagtaccggaaggagcaccaggcctacgtgttcctgctcttctgcggcgcctacctctacaaacagggctttgccatccccggctccagcttcctggtcagtgtcctgccctccctccaaccctgtttccttatctgtaaaatttggatactcccctgtaacctcatgggattgttgtgtggggatgattaaaagtgacagtgggtgtatcggggctggcacacagtggccctcagcacttacggagggattgagcaccgaagtgggagacactgacagcttccttttgtactgcttccctctcccaccccagcctgtttctctcctctaggctgaggctggacctgctcaaacagtttccttgtcggaaactagaagaaaagcaaacatgtccaagagaggcaggggaggtgtgtggggctcggggtcaggggctgactccttgaggctgccctgtgtctgtcttctgtcttgaactgatccctcttcagggcagagagccagctgctgcttggtgggggctccacatccagacctgagggtgaaccctgactctgcctgctgtgctcttggggaggatacttaatctctcacctgtagaatggggcaaggatggcatgactcagggatgtagtgaggattacacaggacatgtagtcaagcacttaacacagtgcttagcggctccccagcttcccacttccaaggcttccttttactttctctcttggatcccatgttttgtcaggatgatgtctaccaaccaaaatgcatttaggaagtattggttcacttttccctttttcttaaaccaagacatcttcaaatgtctgctagagctctggtcaacatggaaccccggtattaacatactgcatagatgtaattccagcaaaaagcaaagaaacaagacatcttacatagcttgtgtggtcttaccaagggaaaattcatggtttgtgttcatcttttgaaatagtaaaaataactcgtgagtttcatttctactttcttggagccccagtcattgcagaatctaccacagccacagatcccatttcattctctcctgccccctgaggcttttatccttatcctcattttcaaggtgaagagactgacggcaggtgtagttcccagccttttcataatttttcattcacctctttaaatggcaattgggacctggggcagtggctcacgcctgtaatcctagcactttgggaggctgaggtgggaggatcacttgagtccgggagtttgaaaccagcctgggcaacacagtgagaccccatctccacaaaaaattttaaaaagtgggtgaatgtggtggtgtgtgcctacagtcctagctgcttgggaggctgaggcaggaggatcgcttgagtccaggagttcgaggatgcagtgagctatgatcatgtcactgtactccagcctgggtgacagagcgagatcctgtttcttaaaaataaataaataacgcaattgggttttagctggaaaaaagcagtgaaggaggagggaacctatgactctcaggctccaagatgacgtgcctggtagctgccagatgttcacatgcctgagggtttgttttatttgcagaatgttttagctggtgccttgtttgggccatggctggggcttctgctgtgctgtgtgttgacctcggtgggtgccacatgctgctacctgctctccagtatttttggcaaacagttggtggtgtcctactttcctgataaagtggccctgctgcagagaaaggtaaggggaggggtcacatctgagagctgggaccccagacagtcgctacgtgcatggccttgagagaagcgagtggcagggatttcccacagtactcttccacgctgtttcaggaggtcctaggggttcttttgatgtcttcaggagacatagacctgggatcaaatcccagctccatcattaccagctctgtgactttgggcaagttcttgacttctctgatcctcagcatgtctattttaaaatgaggaaaacagtctttccctggagggttgttggaagaattgggaacagattatgtaaagtgtctagaacagtgcctggcaccagcaggttttcaacacctggagaccctttctgcttcttaacagctttcttctctttggctacaggtggaggagaacagaaacagcttgttttttttcttattgtttttgagacttttccccatgacaccaaactggttcttgaacctctcggccccaattctgaacattcccatcgtgcagttcttcttctcagttcttatcggtaagatgctagtggggtaggtttgagtcttcagagctgtcacgctgggggtctgccctgggttattggccacgtgagcatgtgcctgcttctgagaacacaggctcacaaagtgtgacttcaagccttatgatctaaagaaatgattcctgatttcagatctgctcaggcttcaacatgaaaacccataaaaatacttttggactaaataaagattgtccattgcatggctgtatgcactaggcactgggattagaagagatggtctgtgtaaagtatacaaattggcccatagtaagtactcagtaaatgctagcaggaagagcagggttggaatgagggtgtgtgtccatgagttttgagtggggacagaagaaaggagca

SEQ ID NO: 9913 - DNA, 6000 bp, Homo sapiens
caagacactgtggacgtgtgaccgctgctctgccaagtttcctctgcagacgactctgagacaactgttcctgtctcactgacagaacagtgggcaaacccaactccatggcaagtcataggcccatttagtctgaaaagaatcagctgggtgcggtggctcatgcctgtaatgccagcactttgggaggccgaggcaggtggatcacctgaggtcaggagttcaaggccatcctggccaacatgctgaaaccccgtctctactaaaaatacaaaaactagccaggcgtggtggcgggtgcctgtaatcccagctactgtggaggcaggatggatcacttgaatccaggaggtgggggttgcagtgagccgagatcgtgctgctgcactccatcctaggtgactgagcactactccatctaaaaaaaaaaaaaaaaattacttgcccaggagcatcttggttgaatagcagctccaggggaacaggattcagggctggagggttgttcgcggttgttggtgaagtcagtgaagctgcattctgtgctgtgactgccagaagcctcgcagggcctgggcctcatcagcaggtgtcctgtctttagattaatggaggggagagtggtgagcactgggctcagctcagcagcccaccggggtggctctccagggtggtgtcagagctgggagaccacattgcatgaaggcctttgaagaagctggcaccgtgccctgaccgccggtagtagctccctagggctgtcgtaacaaagtgccactaactttcaacaacagaagtttattgtctcggtgccagaggtcagaagtctgagagcaaggtgccggcagggccatgctccctctgcaggcgccagggaaggatctgttccaggcctcgctcctctcccaggttcgggtagccccttggcttgtggtaaccctgggtttctcgtggccttccctccgtacctttctgtgtccgacttgctcctttttataaggacattggaatgggactcatcctaatgacctcatcttgacgtgatcatccacaaagaccctatttccaaataaggccgcattcacagacactgggggttgggacttcaacatcttttttttttttttttttgagacagagtctcgctctgttgcccagactggagtgcatgatgcaatctcggctgactgcaacctctgcctcccgggttccagtgattctgtgcctcagcctcccaagtagctgggattacaggcacacgccaccacgcccggctaatttttgtatttttagtagagacgagagtgcaccatgttggccaggctggtctcgaactactgacctcaagtgatctgcccgccttggcctcccagagtgtttggcctcacaggtttgagccaccacgcccggcctagggacttcaacatcttttgggggcacacattgcaactcataacaccaccccacctaaaacagcccccaggccagccccaccactgtgtcccctcactctgctttattttcttcagatcatttgtaacaacctgaaatgtgcccctttattttcccggttgctgcccggtcctgaggtggaatgttaacaccttgtgggcagtggccttgtctgtgtcatttcccactgcattgcaggcacctgggacctgatcatggtaggagtcagcaaacacttagagagcaatctaatctggcctggaaaaaaggaagctgatgagtgcaggaatcagaagggctgtgtgggggcagaaagagcagccttgttctcttaagtctcagagaacagaaccaagacagggaagaggttgggggtgggcccttcctggtatttttttttttttttttttttttgagtcggagtttcacttgtcagccaggctggagtgcaatggcacgatctcggctcactgcaaactccgcctcctgggttcaagcgattcttctgcctcagcctcccgagtagctgggactacaggcatgcaccaccacgcccagctaatttttgtatttttagtagagacagggtttctccatgttggccaggctggtctcgaactcctgacattcggtgatccacccgcctcggccttccaaagtgctgggattacaggtgtgagccactgtgcccagccccttcctgttgagtaaaaggaagaacttcagggtaagacactgtacagtgcccagcatctggagagccgccagcattacccctgccttaggaggtagtcgtctcctcatcactacaaggtattgaagcctgagggcccctgggcaggacgatagagtgagattgccctggggactcaggaaaggaaacatgccgtatttctagggaaggagctgctgctgcctctcagtgactctggttccaggaggaagagccgagagctagggttcccttcatagggagaaacccagcagggtttggggtgttctgggaagccaggccagcatggcttcagaccctggctctcccagaagctgctcctaatttggccatggtgaggttgctgaggagaagatggctgggtggctttggtgggaaagttcccattgctccaggagtgagtcctcgaatgggacaggggtacgaaacacccactgatgagtgaagcgttgtgctgacaccaggagtcctggcagctgcagagaccatccgaggcctgtcctgcctccagccccttacatggatgtgccaggcagcccaggctggggcgtgctgccgacctccatcctgtctgtaggcaaggcctgcctaggttggagagggactgccatgtctcatccagtcacaatccagttccgttcttcaagccgtgattaagcatctactgtttgtctggcactgcagataaatagagctctctatttttttcagggtcggccccaggactgaccctgagaagggactgatttggaggacagtgggcgctgtcactgggttagcatgtgagcgaggacagagggcttccccgtgcagttcatcctgagcagcagcaagagcaaggccaagaggcaggaggcccaggcccagccccactctggccgtcagtgtcctctgtaacatggtggtgggtggttaggtcggggggccccaagcacctctagccatagcagtgctgcttcctgtgtgagataggaagggccgatgggaaagggcgtcgtctccaccctcagcctctgggcccagcgggccagggctcaccctcccagccggctgctccacggagaagcgtgggactgtgctgtctctcggttaagcagtcttcagggcgcaggccagacacagggaggcctggagacaaaactggaggggacgcagagggaaatgtgacactcttaaggattctttttgagaattaaacttaaaatggggcaaaattggccaaaacatgctttttctcctgaatttttcccattccctagccaaggcctatatatctgtaaatatggtcatgaaatgaacatatttaatgagtcatctaatgagtttatatgtgtattatgtatataaactaaattttatatgtattatatataaactgaattatatatataaactaaattatatataaacttaactatatataatttaatttatataaaactaaattatataaatataatttgtatatatatgaactcatctaatgaattataatttagtttatatataactcatctaatgagtttaatataaactatttacaatttttattcatatatatttaaatatataagtatgtaatcagaaatatatggtgtttgtgtatatacatattcatatatatagtgactttctgtatataaaggctgcttacatagaaatataaatagtgcatatttccttttattgaaccaatagttttattacatattctccagaaatgtcctcttggctttaaaatttccagaatatcatctctcatttttcggatcttccccatgtgacctgggtcagaatcggggtcccagggagagaagggccgggcctcagctcttctgatccggtctctgtgttaggctgttcttgcattgctctaaaggaatgcctcaggccgggtcactcataaggaaaccaggtgtaattggctcacggtttggcaggctcccaagcatgacgccagcatctgctgggcttctggggaggcctcagggaccttttactcatggcggaaggcaaagtgtgagcaggcagagagagagagagtgcaagagggtggaagggaaggtgccacacacacatttttgaacagccagatctcaggagaactcactcactgtcgtgaggacagcacccagggtatggtgccagaccattcatgagatatccaccccatgacccaaccacctcccaccaggccccacctccgacactggggattacgactcaacatgagatctggcggggacaaatgtccaaaccatcccagtctccctcacgttctcccagcggacattggcgagccgctgcccagcgtcaggtgctgggcactgagatggtgaggacccctgcccagccctcaggagctctctgactgtgtaaagagctgagtcatgatcaatcaaaggtactccgctggagggatgcgttagggcccagaaaagggagttgcttgctcgccttagggtggagttggtaaggggaggtttcccagagttaagttgaagccaggttctgagggatgagtaggagtttgacaggcagaagaagcaactcgagcaaaagctgtaagtctaacagaagcattgccctggaggactggctgcaggcagagggcttgccccgcaacctgctgtgccactgagggccctgggtcttgtgatctgctgcttctcccgcccagcccctccctctctctgcccagtgccgggggaagacatttccctccatccacctgtggacccggctcctgtcggccctggctggcctcctctatgcctcggccattgtggcccacgaccagcaccctgagtacctgctgcgggccacaccctggttcctgacctccctcggccgtgcggcactggacctcgctgtatccaccccaggcctggggagctccctgcttgcagccagaggaggcctgtgtctcgtcctctcactgcccctgccccacccttcttttctcttgctagatggaactctcccagcagtaagggagtggtttgaagcttggggcaggcaaacacaaatgcaattatttgtagttttatgtttcctttttttgtttgtttgttttgagatggagtctcgctgtgttgcccaggctggagtgcagtggcgtgatcttggctcactgcaaccttcacctcccaatttcaagcaattctcctgcctcagcctcccgagtagctgggactacaggtgcatgccaacacgtctggctaatttttgttatttttagtggagactaaaaatgtttgtatttttagatgctgactgtggttaatggctgtggcgtgttggtggtggggtgtgtgtgaaggcaaggcagggccacgccgtctgcaggcgctaagaggggaatcttcgcttgcctcttccagctgccagtggagctgcaggagctgctagtggctcctggtgtcccttgatgcatggcagtgtcgtttacatttctgccttgcccttcatgtggccttcttccctttgtgtatcttcgtgtgtctccttttcttatagggaccccagctgttggagttagggcccagtccaatccactatgacttcattgtctaattgtatcagcaaggaccctacttccgaataaggtcacagtctgggccgggcacggtggctcacgactgtaatcccagcactttgggaggccaagatgggaggatcatctgagatcaggagtttgagaccagcctggccaacatggtgaaacccggtctctactaaaaatacgaaaattacccgagcatgatggcaggtgcccgtaatcccagctacttgggaggctgaggcgagagaat

SEQ ID NO: 9914 - DNA, 6000 bp, Homo sapiens
cgcctcctaccagggcgctgggtgtgggagaagctggtgactcacctctcccctcctctgtgaaagtgcttctagggcccgcttaggagcccagccagccccagacacaccctccctcctgctttggtagagtgtcctagcagctctccccttgcctgtcacaccctatttccagacaccgcctctgtccccaagcgtcctctctgcctcccacaccccttgagaggccagggtgtgcatcacccacagccctagtacactttgtctcgggttagtatcatccacactcccaggacatttcgggcccacaggagggttagaagccttgaatgttgtacctagaaaagcctcagaggtattcggagagactcaggctcggccaggcgagagggcagtcaggagaccagcctgtctgtagtatgtggactctttgtctgctcccatcactaccaccaccatattttacagatggggaacttccctagcaggggaaggcacttgcccaagctctcgtggccggcttggcatgctgtgacacggaaatatgctgaaaagggcaggctttggagttagggagacctgggggcaatccagattcttccacccagtagctgtgtggctttcatctctccaggtttatgtagcctcatggatcagttactgtgatatttaagggagactgcttagcacagtgcctgatgtgtggtaggtacttaatacttgaaaacaagcctgtccttgcagggtagcacaaatggtcccagtggatagagatcatcttgggtacattgagacctgacccctcaccaaggaatatacatgcatttgagtattctctgctgccaagcattttttgattcatccagtagctgagtacacatttacagcagccactaggctgggtgaggaagaagatagcgggatggagcagggaggcaacaaaattctcaatcagtacagcagcagcagtacctgtggtgaaggtactattcccctctccactttataagtgagtaaacagaatcagagaggtagagcaatttacccaggcttacacagcaagcgattggtgaacctaggcatcaaatccagttctgtccatttccagggcctatgtgtcagcctctgttcccaccactcattgctcatttcttctaagtcctgagtgctaggactgggaggggatgtgtcactggggatgtccgtctgtgtgtgcgtgtgtgtgtgtgtttatataatgtgtgtatacatgtaatacatactatatgtatatataaatatgtgtggatatatagatcctttatgatcctccatgtttactgggaattttggttcagaatgtgggctgggtttgtcatgtcactgcccacctcacccctcccctagcctgaggggcaccctcctgtacctctcttccttccctccaaggccgtctttgagccccttatcttgatgctggctgaggggaggcccaagaggaagacacgccttattttcctattgctgcctgcagctggctcccaacattcagctcacattgtagcccaagagatggggagcacagactggaatgagtaatgggagagtagcctccagtctgcccggatttgaatcctaactcttcctcttagaagctgtgtgatctgggaagatgacgtaaccctgagcccgattttcttatcggtgaaatggggtcgttatgacatcccgctctttgggcttgcctgtgggctggcctgtgatagacccggtgtgtttgccattgtcatcattgtgatggtcacctgcccctatgtggtgattcactcacctaatgtttccaaatggcatggaaagtcaagacgacttctggattcatggacatctggtcactggaggccttggctggtggtactcaaagacaatcagaatgcgacatcagctttgttcaagcagagattctgagtcaaatcactcctctggcccccaataccaggatggggcctgtcttagctgggccccactttacatctttgtgacttttgtcagctcacccccagcctggtgccagcccagtatcagttgtagggaaatctggtaacatttctactagctaacacgtgtccagtgcttaccacgccctaggccctgagctacccaataactgtgttctttggttctcaccacaaccctatgcacagaggaaatggaaggcacaaagtggtgaagttgcttgcccaagaccccgtagctggtatgtggcagagcataaatgcaaacccagttcttctggctccagaatcctgccctagacgatgacacttttgatcagcagtggatgcaccccaaatcatgcctctgttattgaccaaagcctgatccactcacccttgagtttgaggcccactgtgaacctgcccagaaatgcctacctccaagccctttcttcctccactgctcccacccagccaaagcagacaggcagctgctcccccagaaccacttcctacttcctcatcactgctgatacggttctccctttagggatgctcttcccctaagatctgcctctaagattccactcaagggagcctccttgataccccaggtggaaggggtcactccttgagcaccaagtccacccccatcacaggaccctctgtgtgaccttctagtattgtttatggttgtgacctcactgccctaagactgtctacttctgaccccacaagggctagcactgccctcagaaagctcagccactgtttgctgaatttaattaaaaatacatctctaataacctctttgtaaaatagcttggcagtttcataaaaagttaaacgtacatcttcttcacgagccagcagttgtactcctaggtatattcctacgggaaatgaaagcacatgtctgcataaaggttcatgtatgaatattcacagcagcattattcataacagccaaaacctggaagctgtcaagatacccatccactgacgaatgattcagcacactgtggtatagtcataaatggaatactactcagccatgaaaaggaacaaattcctgataaacaccacaacatgaatgaattgcaaaagcagtgctctgagtccaagaagctgggcagaaaggagttggtgccctgattccatttttctcaagttgtagaagaaacaaactaatctacggtaggagaaattcaaattcagattctccccatccccaccagttacctctggttggtggagagggggagaattggcaggaaaggggcacaaagaaactttttggggtgatggaaatattttgtaccttgctttagatgttggtcagatggaatatacgtttgtggaaacctgccaaactgtacattgaatatctgtgtgtttttaccacatacagttaaaactaaaaaaaaaaaaaaaaaaaaaaaaaaattgagtataaataaatagcaaatttaatttatttttaaaaactagttttcattctgttactgtttctttttcttcagtattccagtaccagtacccggagagaacatgtcaaagttaaaaccagctcccagccaggcttcctggaacggctgagcgagacctcgggtgggatgtttgtggggctcatggccttcctgctctccttctacctaattttcaccaatgaggtaaaatgtctggggtcttcctgtgcagagtgagagtccccaccatgtcagagagcaaaggcgatgaacccggaggctggatttggtaatcaagggcctagattttaaaaagagaaaggaggatactgagttaatcacagttctttccattgtgatccatcccacagctgatgtgagcaggaaggggagtagatcagttcacacacctgaatatccaggggttagcacctgcctcaggcgtagttggatccaggtgttcatgctgggtcaccaggaatctccatttcttcatcttttgcctgtttttctctattatggtgtttttcttgggcaggcacttcatctgtgatggcaaatgtggccccagcaactggcctacatccaaccacttagcccagggaagagaaaaaccatctgtttctcttcctttctttcttttcctttctttcccctccctccctccctcccttcctttgttcctttcttccttccttcctttgtctctctctttctctctttcttgtttgtttgtttctttctttctctccctctctctttctttttctccttttttttaatagggcctcatgatgcaacagtatatttctaaatcaatttagcagcagttacagggccatctctcagtgtcctggcttggctctccgtcctctgaatcagtctccgtgtccagggcgcactcacatgttctgactggcaaggtctgggtcccataatctgaccagggttcagatagactcaggtaaaccacatgggctgagtaggagagaggagagccaggcatggaggctcaagcctgtaaccccagcactttgggaggccaaggaggcaggatcgcttgaggtcagaagttcgaaagcagcctgggcaacatagcaagaccccatttctacaaaaaacttaaacataaaaataaaattaaaaaaaagaaggcagagaaaaatggggagaaagggacaggcaggcagaaacatcagctgttcccaccactggggcagtgctaagattggtgggggctagtgggaaccaatggggcagtaggaagaagtctccctgggaaagcaggaatctgggttccagtccttactctccacttgctagacctcagttttccaactgtacggtggggagatgggtctcagcgctcccggaggccccatcctaccctaatactttgcaacaagcacagtcatgctgagccacccctgagctgttgaaatccccactcccctttgctcccagggccgcgcattgaagacggcaacctcattggctgaggggctctcgcttgtggtgtctcccgacagcatccacagtgtggctccggagaatgaaggaaggctggtgcacatcattggcgccttacggacatccaaggtaggtttggcaggggatgctgacctgccagtggctcggggctcatcctggatgttgtctggctgaggatttgaaagcatgggccttggagatggtcacacatgggagtgattcccgactttaccactcagcagctgtgtggacttgtctatcctgagtctcagtgtcttcgtgtataaaatggggacggtaatggttacaagcttgtggccagccttgaggatttggtgagattaggtaactaacgccttggtacagtggctggcactcagggaggtgctctcatgactctgatgaccatgtgtgtccagtgcaaggccacaaaactaccctgggcaccagagctttcctgttatttgaacaccctgtacgctgttggcaccatgccattgggccatgcagcccaggcctgtactgtgagggtcacagtcacaggcactgtgtgtaaagaacctgggacagggagtgtcctcgattctcccctgcaaagcagtgtagggctctccacccttgtccccttctctatttcttcctcttccagtccagcttcccctgagccaggctttctgggctgacgtgaatgttatcctttatttttttggtttctttgattctgtttgaagcttttgtctgatccaaactatggggtccatcttccggctgtgaaactgcggaggcacgtggagatgtaccaatgggtagaaactgaggagtccaggtgagctgttggggtgaaaactctgttggggtaaaggaggagtgaagtgtaggtgtcaggataacatgcagatgtctttcattttgatacctttgaaactcaagtataacatcttcctatcagaaaagtgtgaaatgatccccaaattaatagccagtgatttggaagtggcaaaaatccagtgaagagtggctccaggaggaaagggggattgagttgctcccacatctgggaagttcca

SEQ ID NO: 9915 - DNA, 6000 bp, Homo sapiens
gtaattagttatttccactatgactagattccagcccaagatagagaccaacttcttcttctaaaaactttagatttctgtaattgcataaactagactttattcataaaacaacttctgtaccatgcttgagatacagtgaatactaagtatttaatgaattaaggcatgagtgcacatcttttgggttttcgtttgtcttttgtgtagacaccttttaatatcaagcagtctgtattataataggaactctgcaagaagattgtattgaaagcagtgtgttcaacccatctattcactcatttttcaaatattttgagggacaactactatggatcagccagacctagaggtcagaggaagtgtgtgtgcctctgtacatttcacatttagcgttcaagccccttaacctttaaaagtgagattgatacactctacagtctttgcctcttactgtactttgagttgctgtgtgcctggttcaaatcctttcccagccatcctcctatggttattgctttatgcctaactagaccactattacaacaaagcagatgctctgggcatagctcatctctctttatgtttgtgtctaatttttcactttgttatacttctgtcacattttgaatatctgcggtactatggatctacacttctaagtaaataaagtacctttgtaccaaaggtaacagctaatatttttgttatttatctatgctaggcactcttagaagagctaacatatgctcttagaagagtgcctagcatagatagcacagatagagcaaatgataaaaagcatggatgcatgcatctaagagcatctgtgaaatgagtgtttttattattcccattttacaggtaagaaaactgagtcacacaaggatatatttgtgtaacacaatttcaaaaaggcaaactcttgctcttgttaacggtaaggcctttttggcatcccatatttgtgaactgtatcgatatgttatctcatttgatctgatacatcccttcccatttgctcacatagaagaagtgaaacagatgaaggtgagtctctgctttcagcagctctgcaggttaaggactgtacagcacttgaacccaggacttctgaatcctgatcttggactcttccctcagaaacaagctgcctttcttttgctggtctggccagtagatctgtactaaagatgggggcctctcaatctgaatgggagatttggaatcatggggacctgaagcagttaatggaggagtgttataatagaacatgtttcatagccagtccatttagtctaggatctagagtattccaaataaacaccaactcctaatttgttttttgctcctgtgttgaatcaatatctagaatatgctcttgacagctctggagcaaaaagccaagtctctgacaaaagaatcagtactaattgggaaataaatcagagtttgctatagctaaaagggaaaaactcccacacatttatctgtcattttgattcgttctttcatcctatgtagtacattttcagggtctcaaagaagctcatctgtctatgaaggtgctcatggaagcatcttgttttacatatgatgaaaatggagagagcacttcttttgacaggaaacttcacttcttgttactgaaaaccgtcacaacagtcattatgtctggctttcagagatttcctggagttaggagaacaatagacagttaaaatggcaatgtcaagagcattctggggttttataatgagtaccaagggaaattttttctctcgagtttgtaagaaaaaagtaggaggactatttgggaagctggggatatgtggaaatgaaaggcaatgctctatttttttaacggagtgttccttctaacctttgtaagctgaaaaaaatattataccatggtttccatgttcttgttattgagttgccagtgaagaagagaagtttctcttcagttgtccctctctgtaggttaaatcagcccctgaaaagacacatttgcagctttctgtatttttctttgattaaacatcagttagaattcttggatccagttttttaattcttgttgtatatgtacggtgcttctggggcttatgatttctaatttagcagcaggagttacttctcttttccctctacctccaaaaaaaaaagatgactcaagcattaggaatatgtttttgggcttattgtataattcaatgtgtatttggatttgcacaatttttaatcttgatttatgtagccctaatgtgatttctaatttttaataaagtttttgaggtactaatgtctaacacatttaaagtataaacttcataaacaatttatgtgacctgctgttttcatttctgtagtttcttgcttgctgctagagctgtggatggttttaaagacccctgtgttagttacgcagggatacctgaatggtaaaaataacctgctatctttatatttttttgaaaatctaacaatacaaaggcaattatgaattattaacatgtttttaaaatatgagtagaatattccttgttttaaaaattggtcaacattggccaggcacggtggctcacgcctgtaatcccagcactttgggaggctgaggtggacggatcgaggtcaggagatcaagaccgtcctggctaacacagtgaaaccccgtctctactaaaaatacaaaaaattagctcggtgtggttgcaggtgcctgtagtcccagctactcgggaggctgaggcaggagaatggcctgaacctgggaggcagagcttgcggtgagctgagatcacgccactgtactccagcctgggcaacagagcgagactccatctcaaaaaaaaaaaaaaaaaaattggtcaacattttaagatgctataaggtggaaataaaagttttccttcctattgtctcaatcctaaatatcattccttaaaggtaaccactgttaagtctctgcaaattctaccagaaatgacctaatgttctatttgtatacaagcacacatacacgtatacataaatacctatatacatgtaacacacatctatgcttacatgtgtatgtacggatacatatatggattccattgtggatatgttagcatataccttagacatctgttcacatcagtatgtataaatccatttcatttttaatggctatattgtattccattgcattggtttgccataatttagcttaccttctgtttatcaacatttacgtttttccagttttatcttgttgcaaacaatactgcaataaatatttttgtatatatctttttgcatttttgtaagtatatttgtaggatacattcaaggcaagggaattactggtaaaagagggtgtccgtttttagcatcactaaatattggcaaattgtcctccaaaatggctgccctaatttatacttccatcaacagtgtagaagaatgtcgtgtttctccacacccttgtcaacactaaatatgacaaaaatttcagtttgtaaatacaataagtgaaaatagtatcttattttgacattctgttgctgctgtatttgaggttcatttaagcaaatgcttactgagcactcactgtgtgtcatcactgaaataggaaatggcaataaaaaaatgtccttgttcttgaggagccatggaagtgaataagaagcctctttttagaagaaattcaaaggttgcaaaactagaaaagtgggtcttttgcaccctaccagcaggaaatgttgtctataaaagatagtgtccacccatgtcaactttcagttctgttgtcggcctaaattggcaactctctgcttctgcaatagtggccttgctttcattttggaagaaagttggctgcaggtaggagtagaaatgcctatctagtagctttggtttttctccaggacctgacttgattatctcactggttgcttttaggagaaagcacccactgttggcttctgttctgaaagggcaccaggcaagcatggaatcctatcagcagagcaagccaagagctcaataaactgtttattcattgttcaagcttctccacctatatggattattagaagaagtatttcatcttagggtacccagattagattatagatacttcaagtattctttagaattcactgaggggaaaaaaatatggaaagcagcatcagtcatttgggaccgtgttgtttcctgataccaaaataaccgaaatgaagaaactacaatctgtaagttaaaacagctggtttccagcctgttaaataaaaaccaaaaggtgtgacgtacatggcaaaatgggataaacctggttttctgagtggaggcagctattgataattttacttttcttatagctgaagatgaaggagatttgaggttctctgagaattaaaattcggctggagttagcctagggtgagaccctcagagctgtctgttcatgccattgcctcaagcctgtggacgttttttcaccctggggcaagaagaggctccagtttgcccaactgctgtgtgtgttccaggccagtgtccagtgaggctgacttggcagctgccctttccacagccagccagccagcccctgagtgtgttttaaaagataagcgacaaaaagccaaccccttttagaggggctggaacaggctagtagttgctaggcaagttaaagtaattcagcgtccttgccaaacgtctgccaggcaaatagggaactttcagagaaggggagtgagatggtggtgtgtgttggttgccataggaatgtttccctgattggaacaagaccacagagtggggagagcaagacggcagcatctacggttctttctgctcaggaatgggaacccagagtgggcagtagagcggaggcaagccatgcagaggcaggagcagatgagaccctagatgccacgagaagctaaacatgtggggaaaataaagagcagattaactcaggaaaattatatggggagctcttatgctactctgaagatctgagactcgttggagaatttacaatcccaaattaactcagggagaattccaactagactctgaaatgaattagatggagatttaaaatagggcaatttagtgggaagagatacttaatttgaaggtaggtattttgtatttatgtaaatattatgtcagattatgtctttattttagctcttaaggtagtaattaaatatctgttcatgaattatagtttttatcgagttctgatttatagggggaaaaggcacagttgaccaaattgtatgaaaccttggaccttgaagagaccctctgatgtgggctttactgccgcattaacaagcaccctgtgcatctggtggcagcttccagaatgacagctgagggtctgagtggaaataagtggcttttagcaaatgttgaacctcgaatgtgctatttaacctccctgattaattgattatccagctccgaaaataagaggtgatatagctatccccttatctcagcatggatgctgttctcatttgaatacaatttggggggtaggtgggggtagtatcagatcctagggtacatgctatgataatgacaggcttaattatcagtcagtcaatattgtttagaacaaatgttttcttttagatcacaatcttaaggaaacctttctttaacggataaagttttacttgtgcatatgaagtgtatatataaatttatcatttgccatatatttgattcatgttcagagggtatttaaaatagtatcttcttcagaatgtatatgttgggattatatattgctgtttccttcttatgtggtttctttttgtggtcatgtaaaagaagactaaagggatgtgatatttagtctcaaatatttgaattatagtcactgttttatttcagggctgtttccttctatcagttcctttgatctggaacaccaatgtcatttttactttacagttgaccgtatgctggctgactgacatcaattaacta

SEQ ID NO: 9916 - DNA, 6000 bp, Homo sapiens
gctgggattacaggcatgtgccaccatgcccagctaattttatatttttagtagagatggggtttcaccatgttggtcaggctggtctagaactcctgacctcaggtgatccgcctgcttaggcctcccaaagtgctgggattataggtgtgagccactgcgcccagcctatcctatgttttcttctgagagttttatagtttatactcttatattcaggtctttgatccactttgaaactccacacagtcaataatccacatacaacttttgactccccccaaacttcactattaatagcctactgttgactcaaagtcttactgataacagaaagagttgattatcacacattttgtatgttatatgtatttggtatgtattcttacaatagagtcagctagagaaaagaaaatgttagtaagaaaggtccacctgcctcggcctccccaagtactgggattacaggcgtgaaccaccgcacctgaccgcagttatgatttaatactgcatcttcgtgtttgtttacatttctcttgactgcaaatggtgccatatacagtctgtgtttgtgtaagttttgataagttttttttttttttttttgagatggagttttgttgtttcacccaggctgcagtgcagtggtgcaatctcggcttactgcaacctccgcctttcagtttcaagagattctcctgccacagcctcccaagtagctgggattacagccaccatgcctggctaatttttatatttttagtagagacggagtttcaccatgttggccaggctggtctcgaattcctgaccttgtgatctgcccaccttggtctcccaaagtgctggattacaggtgtgagccactgcgcccggcccagttttgataaattttaacttttttttttttgagacagagtctcactctgtcacacaggctggagtgcagtggcgcaatctgggctcactgcaccctccacctcctgggttcaagtgattctcctgcctcagcctcctgagtagctgggattacagatgtgcaccatcaagcccggctaatttttgtatttttagtagagatagggtttcaccatgttggccaagctggtctcgagtgatccacccgcctcagcctcccaaagtgctgggattacaggtgtgagccactgcacctggcctgataaattttaatgttttataatagatttgtgtatattttacgacagtaaatgatagaatggacaagtatctacatatattttatgcattcatgatgtacctaactttttcttaattttttttctatatttctaggctatatggtttgtaaattttttcaaatggtcacaaatctccaaaaacttttctaatatatttactgaaaaaaaaagggccacatataagtggatctgtctacttcaaactgatgttgttcaagagtcaactgtactgagctttgtatctgattgtgagagtgaagtcgatgatgttgataagaggaaataagtatctccagaatggtaatgaggaactctggtaacttattcagggctttgaggattctagttctttgctgggatcagaaaaggggccacttaaataaaaattatgagtatatgaaaactcagactaaaatacattctaagaatattttctggtatctctttgtataggaacagcaagacatttcactttattttttgttttgttttttatttatttgatttttttttttgagacagagacttgctgcaatgcccaggttggaatgcaatggtgtgatctcagctcactgcaacctctgcttcctgggttcaagtgactctcctgcctcagcctcccgaatagctgggattacaggcatgcaccaccatgcccggctaatttttgtatttttactacagacgtggtttcaccatattggctaggctggtctcgaactcctgacctcaagtgatctgcccaccttggtctcccaaagtgctgggattacagacgtgaaccactgtgccggctgacatttcaccttattttttaagttaaagaaacagttcagctgcctcgctgtcattttcaaaagaaacactagtttggtatccacaaaaaatactggaaagcaatatacatcttaaccaaagttgttttgagatgtacctgtagtggatattttcttttttcacctgcccatcactatatggtttgttctggtaaaaagaatcttgattttcttttggaggatgaactctcccctattctctgtctctagattttttttttttttttttagatggagttttgcttttgttgcccaggctggagtgcaatggcatgatctgggctcactgcaacctccgcctcctgggttcaagcgattctcatgcctctgcctcctgagtagctgggattacaggtatgtggcaccacatctggctaaattttttttttttttgagacggagtctcgctctgtcatccaggctggagtgcagtggtgtgatctcggctcactgcaagctccaccttctgggttcacgccggtctcctgcctcagcctcctgagtagctgggactacaggcgcccgccaccatgcctggctaatttttttggattttttagtagagatggggtttcaccatgttagccaggatggtctcgatctcttgacctcatgatccgcccgccttggcctcccaaagtgctaggattacaggcgtgaggcactgcacccagccataattttgtatttttaatagagacgggtttctccatgttggtcaggctggtctcgaactcctgacctcaggtgatccgcctgccttggcctcccaaagtgctaggattacaggcatgagctactgcgcctggccctgtctctagattaaggtatatgagtttgctaatgaaacataagctcaatattttattggaactactgggaaataagtgctctgcttcttttggaatggttagctataaagatgatataagttgaacactggggaaaggtggggaggtggcaagaaatcactatgtgaaaacaaactctttgatgtcaacaaagaggaaaggagagatcatgtcctgatgtcaatgtttgcattcgtgaatctagtcatatctgaagttacctatctatggatttttcagttattaagccaaatatactccttttcttaaatcagtctgagtttaagtttttgacacttgtaaggaaaagccctatgtatcatagcacaaaataattccatttattaaacatcacaaaatgtctaaaaatcctctttcatatctttctataccttggtgtcactcagaatgtcagctgtgctaaatccctagtctcactctctcaaaactcccagaaaccatctctcctagtcagctcattccaggtctttttttcttactcccttactcaaactttgctggtcgccttccttatccccaccccatcccaccttctccaaaacaaaaaatctgagccttgcagatcagccgagccttctgaggctccttttgcttctttacctctattccttattgagatcagcacaattaatgcatgtctgaacaacaaatgatcctttctctttggaagggtgaaagtttggaaatatttacatgttaaatgttctgttctggtctcatttgtattcagtacaaatagtgtgtttgcttggacattaattttatttgcaaatagctacagctgggggtccctttgggtaagtcttgctaagatactgcattggtgggttttttgtttattttgtttttgttttgtttttcaaggggatggggaaggaatcaaagtagtcaaatcagtttggttgtttttacaagcccgagaaatggtcaaattttggattcagaccaagcacaccatagtgtgctagaggcaatttaatgacttcctaccctcttgcctttttccccctctttgggaacattcttggattttctacagaaacagccagaggctctcaattgacaattgcctcactcagcagtttcttgttaagcacacttgtcagacactgtttccaggactctcttaagtgtcctaagaatattgactcattcaaaagcagcccagctgtagttgggagagcaccagcacttgctctataaagatctagattgtctctctacctcaagaggaatccaaaatcctgttatgctggactctgaaatgatccccagccctttggtgatcacactgtttatgagcagtctgaattccattcttgggtctacctaaactagcaccctcgggctatggggcccagtggggagaccacctagcatgctggctgcctggagcccagggaactgtcaagatggctctggaagacttctcgccttttaaaagccccgtatttcttttacatatatttttgtcctcatgaattttgccaaccgcaatggactaaaatctattatagcgtcctggaaaggtggggaaaagatgggatagttgaggagagtttaatgaagggactatttaaaaaggtgtggatggggttaaaggaaacctctgggcgtcattacccactccaggcctgaaggggcaagggtagttagtggtaaccagaacctggagaaaactgcaggagagggccacaggatgggagtaatggctttcagatgaagaacatagccactgctaacagggtggcccgctggggatgcaggggaggtcctgaatcacatcctgccttctgatctgcaggtgcctcccacttgccaaaaccaattgaaagccagattatagttgacgtagcccataaaggtcagtcctgagtcacagagcagagtggagagtgggtctgaagggacagaggaaaaaccagcaagcacctcctgttttttcccacagccagcaccttggttcagcccttaccctttcttgcctgtcccctggacccatcaaatccactgcttttaatgaccagtctgtttccaagaggctatattcattccacttgggactggggcatatgcacttgggtagaagaaccagctgtgcagtgtcaagacccttccctcagagaccttatcagtaaaatggcgggtggactcggggatgcccgaagacttttccggaccacgattttccgatgctggacacatatttaaacatgaaggaatagacttgcgacttttaagcgcaaacaatgggtggaaatggacagaaactgcctccgtgcccacttgcagcggactacgtagccctggcagacaggcaattgcttcaaacaagcgccctccaagggcgtaagctagaggggcccgggcgggcgctttcccgtggaccctcccacctcgcgggtagaggaagtccttcagttcaggcacaaccctgagcgtcccccgcagtctccaactccggcgccagtcaggttgtggggtgggggcggcggagggcggagagcgcaggcgcagagtccgcgcggcggcgcccctctccctccgcagtactccgggcagcgcccgcctcgattttcccaggcgagggcacgcccgcgtcagtcgcctccggggcaccttcctcgccacgacacgcaggtaaccgggccccgggagccggtcggcggcggcggactgggaccttgatcctgcctgcccggccgcccgacaagggaatgagagcggaccccgaactccacacacccgcgtttagccgccacacctaaggggcacaacagtctttttgggtaagggccgggctgggggcgacgcgccccgcccgctttgcagacttcggggtgctctgcacgacgcctgaaaggccgcggggcccgcatttctctgtgctgccctcctggagaaccgggacacggggacgggagggccagcatcggctacggcccggtttcccgtttctttccgctgtcgcgtgtctgggccctcctgcagcgtccatgatgaaggccaggggctgttgctttcctctcgcccagtagccaacccaagcaaggggtgagtcactgtggcgtc

SEQ ID NO: 9917 - DNA, 6000 bp, Homo sapiens
tgtaattaagagttgatgcagttgtttgacgtgctttccagtcttcccaattattcaacctcttgacctcctgattcttttttttttttttttttttttttttttttttttttgagacagagtctcgctctgtcgcccaggctggagtgcagtggtgcaatgttggctcactgcaggctccgcctcttgggttcacgccattctcctgcctcagcctcctgagtagctgggaccacaggcacccgccaccaagccccgctagttttttgtatttttagtagagatggggttttaccgtgttacccaggatggtccctgatccgcccgcctcagcctcccaaagtgctgggattacagacgtgagccaccgcacccggctggccgacctcctgattcttgatagatgactttgtccctccttttatgagaaaatcaaggctatacaaaatgagttatttcagctgggtgtggtggttaaggcctgttatcagcactttgggaggctgaggtgagaggatcgcttgagtctgggaggttgaggctgcagtgagccatgattgtgccactgtactccagcctgggtgacaaagcaagaccgtgtctccaaaaaaaagagttcttttaaacatctatcccttccacctaaattctgtcttccttggaatcctttccttgagaaagctgttgtctttctttcacaaaacagaccttcctctttctgcttgcttccatctccttaattggcctttcctttgttgcctacaaatttacttggtctttcttatcttaaatctacttattgaccctatcacccactccttttcactatcaaacttgaaagaagaatctgtacattcccatctccacctcctcacacatgttcactgttgaaatcatttttgcactagtcccagaatcgtctatggggctttatccaaacctttatccttcattccctgctgcctctagttaaaaagccactggtttgggcttttcttggtgcttaacctctcagtaaaacttactttcccgtggcaggtgacttttcccatgtcggttctgttcttgtagttttcagcctctgttttgactctaaaataaacaaatattttatccgctttcttatctccatcgctgatttcatttacctccattcaggtggcttcccaaatcagtatttttagctcatgtctattatcagtttcagacccgccttccacctacaggttttgtttgtttttttgttttttgagatggaggctcaccgggtcacccaggctggagtgcaatggcatgatcttggctcactgcaacctccacctcctgagttcaaacgattctcctgcctcagcctcccgaatagctgggattacaggcacgcaccatcatgcccggctaatttttgtgtttttatagagacagggtttcaccatgttggccaggccgctgtcaaactcctgacctcaggtgatccatccgcctcagcctcccaaagtgctgggattacaggcatgagccactgcacccagcaccacctacatgttttatacacatctttgtagctgtctcttctgtccaatactctttctaatactcaggtccagtactctgtccatcattgttaccttttttgggccagcttctctctgtcttcctcatatttattcatctctgtctcttccaattctggctcaaagcatctgttgttagttcactctttttcccctgccatcatattcagtgagttgttaaactatttagttctccctaggtttaacctcatgtgtcactttcctctgtgttctctcctttgcttctgccctggctcatgccctgtgaggtaaattattgttagctcctaattaatcttcccatctcttaccatcctgtttcagcttcctggattgcagtttgattgcttcacaatctctcttaatggttctctatattttcattgctccttccccttgtagtcaggttctgtcccttctggctctgacccattttctcagcattttctcccaccattcccattaaggtgaactctgggctacttctttgaaatcctttctacctcagatgttgtatctttccagaagccttctctggtcctcttggagtcatgtggactggacagttaaaattccttacggtcggggtcttacttctccatgtgttccctgtacttctcagcatagagtcttgtgctgagctcttgggctgaatgccatggcataaaattacatgtccacaacgtgttctgctcattctgatttttgttttttgagacggtgccttgctctgtttcccaggctggaatgcagtggtgtgatcttggctcactgcagcctccatctctggggttcaagcgattcttccgcctcagcctcttgagtagctgggattacaggtgtacgccaccaggcctggctaatttttgtatttttattagtggtgggatttcaccatgttggccaagctggtctcaaactcctgacctcaggtgatcgcccacctgggcctcccaaagtgctgggattacaggcatgagccaccgcacctggcctgctcattgtgttttattacctcctcagcattctcaggaaattttggcttttaacaataccttttaaaattttaacttgaggagctggtgcagatgttagttgagttacattggaagaaaatgtttttcagtgagtgtctcttgatggtataaccacaaaagggaaccaaaaaaggaatacagttgctgttagcataggcttgtggttctctaggtgtggtgcccaaaacagcagcctcacccatcacctgggggctagttagaaactcagattcacagaccccaagtcaggcctactggattagaggctctgggagcagatcctagcagtctgttttaacccaccctccaggtgatgctgatgccacttaggtttgagaatatctgtgtagtcctcacacatcttgataaggaatcatgcttttttgtgtttttttaattgagatacagtctacatactgtaaatgattcctttaaaaatgtacagttcagtggtttttactatatttgcaaagttggacaactatcaccatcatctaacttcagaacatttttatcactccaaagagaaactctgtacccattagtaatcactccctcagcccctaccaactgctgatctacttctgtctttatagatttgcctattctagacattttgtgtaaatggatcagttcatatctgatcttttgtgcctggcttcttttacttagcatggtgttcccaaggttcctccatgttgtcacatgaggcagtactttattactttttattgccaaataatgttccagtgtatagatacagcacattttgtttgtccatccattagttaatggaccatttgggttatttctactttttggctgttatgaatagtgcagatctgaacatatgtgtacatttttgtgtggacatatattttcagttatcttgggtaaatacctaggagtggagtttctgggtcacgtggtaactttttttggaaaaacttttccaaagcaactgtaccatttttacatttccattagcaatgtatgagggttccaatttctctgcatcctcaccaacacttgttatctctcttattatagctatgctagagggtgtggagtagtatttcattgtggttttgatttgcattggaatcatatatttttattttgtagctttaaatttttttttttatactagttgcctttgtttgttccagatatggttgtggtatgtgtgttttattgtgtttcttaaaatggcaattttgggagaacaggtatatatatgtatagataggcagagtggtttagaattcacatccaatttttgctaatatttcgcatcaactcctatttatctcgatgtattgcagggtggtggccttgtccatgtcacctgtggatgacactttcatttctgggtctcttgataagaccattcgactctgggatctccggtctcctaactgccaggtaatggtacctcacagttatactttttgagcattttctttggtaggcactgtaatgaactctacctctcaaagaagggagaaaacagtggttccattctgggatcacagggtctttttaaactttggagaaaatctgtttttttagttggtagctgctaagcacataccctaatctagtgcagattgcattgtactctgtggcttaattgttgtgggttttttgttgttttgttttgtttttgtttttgttttgagacagggtttcgctcttgttgcccaggctggagtgcaatggtgcaatctcagctcaccgcaacctccacctccagggttcaagcgattcttctgcctcagcctcccaagtagctgggattacagtcatgcaccaccatgtctggctaattttgtatttttagtagagacggggtttctccatgttggtcaggctagtctcctgacctcaggtgatcctcctaccttggcctcccaaagttctgggattataggcgtgagccactgcgcccagctggcttaatgtttttaaaagtgttcctagagcttttagcttcaagggatttatttttatttgaattctgtgtctgtaatattgtgcagttagagttgatcagaaattgttgtctggagacctgttttttaaaagcttcattttagttttatgttttttttgtgtgtgttctgtaggtaggctgatatttgtttgtatgcctttcttagttttaattgggaaaagtaaattatatagtggtaaggtcctggattcatttttttttccccattgtaccagcagtctttggttattccacgtatggttgtggcatgtgtgttttagtgtatttcttatttcttttctcttagggcctcatgcatctgcaggggaagccagtttgttcttttgatccagaagggttaattttcgctgcaggtgtcaactctgaaatggtcaagctttatgaccttcgttcttttgataaggtaaatctttgaatctttgagatctttgagctgttttttgttttgttttgtttttgagacagagttttgctcttattgcccaggctggagtgcagtggtgtaatctcagctcactgcaacctctgcctcccaggttcaagtgattctcctgcctcagcctcccaagtagctgggattacacgtgtccgccaccacgcctggctaattttttgtatttagtagagatgggtttcaccatgttggtcaggctggtctcaaactcctcacctctggtgatccacccacctcggcctcccaaagtgctgggattacaggcgtgagccaccgcgcccggccctgtaagagccttttctacaaaaggaaaaatgtggtagatattagagagtggcagagaagtagctcattctctgctttccttagtcaaaaagtaatctaaaggaataggatgggaattggctctagcagaagaaattattaatatgcctggggctactgttttttatcttttgcaggggccatttgctacctttaagatgcagtatgatcgaacttgtgagtggacaggacttaaattcagcaatgatggcaagctcatcctcatttccaccaacggcagcttcattcgtctgattgatgcattcaaaggagtggtgatgcacacatttggggtgagctgacagccttcaagcatggctgtttccatgctcatacttcctatgctaagaattatgttagctggttggtggagaccaacagttactcttgacttactcatgaaggcatgcacttgtattttcttcctgctcatgaacttacctctcttggatttcgtagatgttcatttctcaccaagtgacccaagtttggtatttagatataaaataatttcctaacaataaagttttcttgcccccttgagtatgccttgaatacagagttgagggtgggagtggattgtcaacgatggcaacc

SEQ ID NO: 9918 - DNA, 6000 bp, Homo sapiens
tgagaaagctgttgtctttctttcacaaaacagaccttcctctttctgcttgcttccatctccttaattggcctttcctttgttgcctacaaatttacttggtctttcttatcttaaatctacttattgaccctatcacccactccttttcactatcaaacttgaaagaagaatctgtacattcccatctccacctcctcacacatgttcactgttgaaatcatttttgcactagtcccagaatcgtctatggggctttatccaaacctttatccttcattccctgctgcctctagttaaaaagccactggtttgggcttttcttggtgcttaacctctcagtaaaacttactttcccgtggcaggtgacttttcccatgtcggttctgttcttgtagttttcagcctctgttttgactctaaaataaacaaatattttatccgctttcttatctccatcgctgatttcatttacctccattcaggtggcttcccaaatcagtatttttagctcatgtctattatcagtttcagacccgccttccacctacaggttttgtttgtttttttgttttttgagatggaggctcaccgggtcacccaggctggagtgcaatggcatgatcttggctcactgcaacctccacctcctgagttcaaacgattctcctgcctcagcctcccgaatagctgggattacaggcacgcaccatcatgcccggctaatttttgtgtttttatagagacagggtttcaccatgttggccaggccgctgtcaaactcctgacctcaggtgatccatccgcctcagcctcccaaagtgctgggattacaggcatgagccactgcacccagcaccacctacatgttttatacacatctttgtagctgtctcttctgtccaatactctttctaatactcaggtccagtactctgtccatcattgttaccttttttgggccagcttctctctgtcttcctcatatttattcatctctgtctcttccaattctggctcaaagcatctgttgttagttcactctttttcccctgccatcatattcagtgagttgttaaactatttagttctccctaggtttaacctcatgtgtcactttcctctgtgttctctcctttgcttctgccctggctcatgccctgtgaggtaaattattgttagctcctaattaatcttcccatctcttaccatcctgtttcagcttcctggattgcagtttgattgcttcacaatctctcttaatggttctctatattttcattgctccttccccttgtagtcaggttctgtcccttctggctctgacccattttctcagcattttctcccaccattcccattaaggtgaactctgggctacttctttgaaatcctttctacctcagatgttgtatctttccagaagccttctctggtcctcttggagtcatgtggactggacagttaaaattccttacggtcggggtcttacttctccatgtgttccctgtacttctcagcatagagtcttgtgctgagctcttgggctgaatgccatggcataaaattacatgtccacaacgtgttctgctcattctgatttttgttttttgagacggtgccttgctctgtttcccaggctggaatgcagtggtgtgatcttggctcactgcagcctccatctctggggttcaagcgattcttccgcctcagcctcttgagtagctgggattacaggtgtacgccaccaggcctggctaatttttgtatttttattagtggtgggatttcaccatgttggccaagctggtctcaaactcctgacctcaggtgatcgcccacctgggcctcccaaagtgctgggattacaggcatgagccaccgcacctggcctgctcattgtgttttattacctcctcagcattctcaggaaattttggcttttaacaataccttttaaaattttaacttgaggagctggtgcagatgttagttgagttacattggaagaaaatgtttttcagtgagtgtctcttgatggtataaccacaaaagggaaccaaaaaaggaatacagttgctgttagcataggcttgtggttctctaggtgtggtgcccaaaacagcagcctcacccatcacctgggggctagttagaaactcagattcacagaccccaagtcaggcctactggattagaggctctgggagcagatcctagcagtctgttttaacccaccctccaggtgatgctgatgccacttaggtttgagaatatctgtgtagtcctcacacatcttgataaggaatcatgcttttttgtgtttttttaattgagatacagtctacatactgtaaatgattcctttaaaaatgtacagttcagtggtttttactatatttgcaaagttggacaactatcaccatcatctaacttcagaacatttttatcactccaaagagaaactctgtacccattagtaatcactccctcagcccctaccaactgctgatctacttctgtctttatagatttgcctattctagacattttgtgtaaatggatcagttcatatctgatcttttgtgcctggcttcttttacttagcatggtgttcccaaggttcctccatgttgtcacatgaggcagtactttattactttttattgccaaataatgttccagtgtatagatacagcacattttgtttgtccatccattagttaatggaccatttgggttatttctactttttggctgttatgaatagtgcagatctgaacatatgtgtacatttttgtgtggacatatattttcagttatcttgggtaaatacctaggagtggagtttctgggtcacgtggtaactttttttggaaaaacttttccaaagcaactgtaccatttttacatttccattagcaatgtatgagggttccaatttctctgcatcctcaccaacacttgttatctctcttattatagctatgctagagggtgtggagtagtatttcattgtggttttgatttgcattggaatcatatatttttattttgtagctttaaatttttttttttatactagttgcctttgtttgttccagatatggttgtggtatgtgtgttttattgtgtttcttaaaatggcaattttgggagaacaggtatatatatgtatagataggcagagtggtttagaattcacatccaatttttgctaatatttcgcatcaactcctatttatctcgatgtattgcagggtggtggccttgtccatgtcacctgtggatgacactttcatttctgggtctcttgataagaccattcgactctgggatctccggtctcctaactgccaggtaatggtacctcacagttatactttttgagcattttctttggtaggcactgtaatgaactctacctctcaaagaagggagaaaacagtggttccattctgggatcacagggtctttttaaactttggagaaaatctgtttttttagttggtagctgctaagcacataccctaatctagtgcagattgcattgtactctgtggcttaattgttgtgggttttttgttgttttgttttgtttttgtttttgttttgagacagggtttcgctcttgttgcccaggctggagtgcaatggtgcaatctcagctcaccgcaacctccacctccagggttcaagcgattcttctgcctcagcctcccaagtagctgggattacagtcatgcaccaccatgtctggctaattttgtatttttagtagagacggggtttctccatgttggtcaggctagtctcctgacctcaggtgatcctcctaccttggcctcccaaagttctgggattataggcgtgagccactgcgcccagctggcttaatgtttttaaaagtgttcctagagcttttagcttcaagggatttatttttatttgaattctgtgtctgtaatattgtgcagttagagttgatcagaaattgttgtctggagacctgttttttaaaagcttcattttagttttatgttttttttgtgtgtgttctgtaggtaggctgatatttgtttgtatgcctttcttagttttaattgggaaaagtaaattatatagtggtaaggtcctggattcatttttttttccccattgtaccagcagtctttggttattccacgtatggttgtggcatgtgtgttttagtgtatttcttatttcttttctcttagggcctcatgcatctgcaggggaagccagtttgttcttttgatccagaagggttaattttcgctgcaggtgtcaactctgaaatggtcaagctttatgaccttcgttcttttgataaggtaaatctttgaatctttgagatctttgagctgttttttgttttgttttgtttttgagacagagttttgctcttattgcccaggctggagtgcagtggtgtaatctcagctcactgcaacctctgcctcccaggttcaagtgattctcctgcctcagcctcccaagtagctgggattacacgtgtccgccaccacgcctggctaattttttgtatttagtagagatgggtttcaccatgttggtcaggctggtctcaaactcctcacctctggtgatccacccacctcggcctcccaaagtgctgggattacaggcgtgagccaccgcgcccggccctgtaagagccttttctacaaaaggaaaaatgtggtagatattagagagtggcagagaagtagctcattctctgctttccttagtcaaaaagtaatctaaaggaataggatgggaattggctctagcagaagaaattattaatatgcctggggctactgttttttatcttttgcaggggccatttgctacctttaagatgcagtatgatcgaacttgtgagtggacaggacttaaattcagcaatgatggcaagctcatcctcatttccaccaacggcagcttcattcgtctgattgatgcattcaaaggagtggtgatgcacacatttggggtgagctgacagccttcaagcatggctgtttccatgctcatacttcctatgctaagaattatgttagctggttggtggagaccaacagttactcttgacttactcatgaaggcatgcacttgtattttcttcctgctcatgaacttacctctcttggatttcgtagatgttcatttctcaccaagtgacccaagtttggtatttagatataaaataatttcctaacaataaagttttcttgcccccttgagtatgccttgaatacagagttgagggtgggagtggattgtcaacgatggcaaccacatttggaagcttggtggtgtagtacatgacaaggaaagggtttcatggaaaggaaggtgatgcatgtgctgagtcagtgtttgtaggcagctgtttttattaatggctctgtaagaacaaaagaactgctctgttttgttttagggttatgccaacagcaaagctgtcacactggaggcttcatttactccagactctcagtttattatgattggtgagtttccttttatcccctgtgggggttatttctctggtactatgcatttctttgtttaaattattaactgagacattattatctatttgatagatgttcttagatttctgtatagcacattatgccaaggacatagtgtcttttaactgccctgactggaccaaaatttgagttaaactccacaagcactaccttattagtaatgctaatgtcctggtgtaaccctacattcagtcatcttagtggctgcctgttggtagggtaatggtattcggccccttttttagatgagaaaactgaagttagaacggaagtgacatgcctgtgaacaaatagctagggtcaagataaatttccaaagtgtccttccttcactgcctctcctccctctcaattttgcctgagggatgggtcctaaagcttggcgtatcctcagatctcaatccatgtctca

SEQ ID NO: 9919 - DNA, 6000 bp, Homo sapiens
cttttctttttcttttcttttcttttcttttttttttttttttgagagggagtcttgctctgatgcccaggctagagtgcagtggcacgatctcagctcactgcaacctccgcctcctggattcaagcgattctcctgtctcagcctccagagtatctgggactataggcgtgcatcaccacgcctggctaatttttgtatttttttagtagagacggagtttcaccatattggccaggctggtctcaaactcctgacctcgtgattagcccgcctcggcgtcccaaagtgctgggattacaggcgtgagccaccgcatccatcatcttttctttttctttttcttttttctttttttttttttgcgacagtctccctctgtcgcccagtctggagcatcgtggtgcgatctcggctcactacaacatcggcctcctgggtacaagcaattctcatgcctcagccttctgagtaggcgggattacaggcacccaccacaatgcctggctaaatttttgtgtatttttagtagagacagggtttcactatgttggccagactggtctcgaacgcctgacctcgtgatccacccgcctcggcctcccagagtgctgggattacaggcgtgagctaccgcgcccagccctcgtctggtacttaagaaaaacctgtaatcccagctattcaggaggctgaggcaggggaatcgtgtgaacccgggaggcggaggttgcagtgagccaagatcgtgccactgcactccagcctgggtgacagaatgagactccgtctccaaaaaaaaaaaaaaaaaaaaaaaaagtaccagaagagttggtacctagaaagaaattaatctacagagtggtgaattatgttggattttaggcacattaggcctaacccgacacaacctcctctaggggcccttaccctttccaacaaatggcctagaattcttttctgtccaggggtcaggaaaaacaaagttgagaagaagtttgttaaagttctctgaatgctttaaaaggggaaatttgcaagactaaagaatggattggaggggaggtaggtttggaggaagaagggggtggggccctgaaaaggcttcaaggagctgctctgagctgaaaggggataaggatcttcttggagaactggggcatctgattggaacacctgcgaaagcttaagcgatgaggttgtgcccctcttgcagtacaaggctgcaaattatccaagccaagggcagaaatctcaatgtccttgttactccatatggccttgggattctcccatggccctccagtaaagcgctgctaggtcccggaaaggctgtggcagtggtggggttggggttaaggataatcccactccttggccagtggatggacagtcacccatgtctctactgtggaccacaggacagcgaaggcaccaactggcagacaagtcccaggtgggagcgagtataaggatgcgtctccttttcttccttctagagggtaactagggggatatggagggagcatgcacggtgggaggctgaggattgccacattcgattcatgagttattgtttgctgatggggtcctgagattctgactgagatctgtaattctgaagccttctcactcttcctggcagatggccaatgtttcagtattgagtttgtaagggtgctatttatgaggcaggaaaagaaaaaaaaaaatgtgttgttgtgttgcaccgcagggctatcaagtgtgaccccaatatatttctttctttttctttttttttttttttttgagactataaatctcactctgtcacttaggctggagtgcagtggtgaaatcacaactcactgcagccttgactcccacctcagcctcccaagtagctgggactacaggcacatgccaccactcttggccaattaaaaaaaaattttttttagagacaggtctccctgtgttgcccaggctggtctcaaactccctggctcaagtgatcattctgcctggacctcccgaagtgctgggattacaggtgtgagtcaccacacctagcttaccacagtatttcttaaatctcagtggccagacctgggataagttgctattcaaaagcagcttgtaggttttttgttttgttttgttttgtttttgagacagagtctcgctctgtcgccaggctggagtgcagtggcgtgatctcggcttactgcaacctccgcctcccgggttcaagtgattctcctgcctcagcctcccaagtagctgggattacgggcacgcgccaccacgcccagttaatttttagtagagatggggtttcaccatgttggccaggatggtctcgatctcttgacctcgtgatccgcctgccgcggcctcccaaagtgctgggattacaggcatgaaccaccgtgcctggcagagcttgtagttttctgatttatgtgtgtgtgtgttttttaacttggaaaaaaaaattgttctcttaggatgtatgattcgtgtttaaatgaagactgctcttttatttgggagaatcctctcccagtacttgagcgggcttcttggtttggcaaaggcaaagcccaactctcaatagtgagtggaagggacagacgtaactgaactgctttgcacaataatgccaatgactgtcttttgttaataggagtcctgactcttgattacatttacggggagtccagcctgaaatagtcggggtagaggtagagggaaaagtcccttctgttggcagcttgccaaaggtgttacgagtaaagggatggccttgaggtgaagggaattcctttgcgagacaataggccagggactatagatgctacataatctaatagccacttctaagtcttctcagctttgtaatgccccaaactttcagcaacagcctggttggtgtttgctatgcttaggggaataagggaggcgggtgtgtccacacttaggatttgcttccatcctctaggatatgaccccagcccccgaggccagagtggtggtagcttcaggtgtgtggctggtgattctgaagctctagggggtggcttgcagcacaattctggaatgctacatatatatatatatatatatatatatatatatatatatatatatacacacatacacacacacacacacacatacacacacacatgtatttattttatttatttattttttgagacagagtcttgctctgttgcctaggctggagtgcagtggtgcaatctccgcttactgcaacctccacctcccaggttcaagcgattctcctgcctcagccttccaagtagctgggattacaggagtgtactaccatgcctggctaatttttgtatttttttttttagtagagatggggttgtctcaccatgttggccaggctggtcttgaactcctgtcctcaagtgatccgcctgccttggcatcccaaaatgctgggattacaggcgtgtgccaccacacccggcctggaatgctgtctattgaggaaaggaagaggctgtactggggagtgccagcgttgaagttcaagcaagtgtaaaactctggccttaactgaatcacaagtaggaaacaagttaatcaggaatggatttgtggggcatgaaaacctttgaggattcttaggattgtttggaagaggggactggattttctatcactaaatagggtgggatttgttttacagttgataattttttgatggggtgcgtcagggtcccactctgtcaccctggctggagtgcagtggcgtgatcacgactcactgcagtctcaacctcctgggctcaagtgatcgtctcacctcagcctaccaagtagttgggactacaggtgcgtgccaccacacccggctaatttttgtattttttgtaaagatggggttttactatgttgcacagactggtctcaaactcctgggctcaagctatctgcccacctcagcctcccaaagtgctgggattaaaggcaggagccaccgcgcccggcctatagttgacaattaactagaagtgtgacattggaattatagagggagagtaacgagactcattacttactagcccagggtaggagacattagtgggccgcaggtttcatccttaaatttctgtgaagcctttcttgaggacatctgccctttccttctctccctcagtgtgtggttttcctttctctggctcccactgcactctgcacatacctttatcacagcaaccacttacggtgtattgtaatttgtaattatctatgtacatgtctccaagtagactgacctcaagggcgagggactggcgctggtactcagaccccgggttcaagttccagccacgtctctagctagttttgtgatcttagacaaataacttaatcgctctatgcctcaatttccttgacttataaaactggcttaagactctctgtcacacgccattgctgggcatattaaggtgacaatgcgtgaaaagtacgaggcaaaaggtaagtgcaaaataaagggcgcctaaaacggtaaacgtgtgttaattaacctgatctacctttacatgtgcattcagcaaacactgagcacctaatgtcctctgggaccccggaacgcctcctccggagtggagcagcctcacatgtggcctgtgggccttgtcccacgggccggctccggattggctccgccgaagagaaaaccctgccgacagcccttccgatctcgtcagcgattgggccgggaccgtcccacaattactcttgttgctgggctcggaaatagggagcggtgctaggttgcgcgtgcgcagattgagaatggagctttccggtcgggcgggaggaggtgacgtcaggagtggtggcgggcgggggcctctggtagccctggggacgctgtatctgtgggctcttgaatcgcgtcacaaatcagcgaccgaactctggcggtggtggttaagacggcgaaggcggcagcggcggcgacagctctggggtttgcgtctcggggtgtgtcggccgccgctgctgcttgggcctggtatgtacagatggctggttaggattctcggcaccattttccgtttctgcgaccggtcggtgccccctgcccgggccctcctgaagaggcggcgctcagacaggtgagacgagagggggctgagcgccagcctggccttaccccctcccccacagcgggctcctcggccgtgatagctttgattcagccaggctcacccgaaacaggtcgccgggatcctagtgacgtagtcgctcccgccaggctgtagggaggcagctcctgatgaaggaggagctggtcgtcttcgtagcggccggtgatggcagggtctttgacattcttgtcagaggccaagctggttgctgataacaaatggggctttgccgctcttaggctgaacactaacattgaaggaatactgtctttgttgtggctcactgtttacaaagcaccctcgcaagtgtcatctgcagacattaagtgcagttgaagtgagattcatagcttgcccaaagccgttttgactgcaagtactgtccttgcagcaagaaacagcacctgttttgttccaaaacagctgtcaaacagtctgtgtgtttggggccagaagggttttgtgctttagaattagtgaatgagtaaaaaggcttaggtgcctcactcctttaaaacaatcactagtctgtactcttaaattcggttaaaatttgggggaaacgcaaagctattcttttctttttttctttttcttttggttgagacggagtcttgctctgtcgcccaggctggagtgcagtggtgcgatctcggcttaccgcaacctccgcctcctgggttcaagcgattcccctgcctcagcctcccaagtagctgggattgcaggtgtgcaccaccacgcctggctaatttttgtgtttttagtagagatggggtttcactatattggctaggctggccttgaactcctg

SEQ ID NO: 9920 - DNA, 6000 bp, Homo sapiens
ggtatgtcattgtttgactatgccacactttacccttctaatccttagaattggacgtttgggttgcttccaacttttggctaccataagtagtgtggtcatgtccttgtagacttttgatttttttttttttcagtcagcctttaagatgtgcagctcatcatatcatgctgtaatcaagatgtgacaacagtcatgtcatgtcatgccacccagtcctttggctgtaccaccaatgtattgcataaaaccactcgattactcttaggtaatatgtatgtgtgtacatgttcatgtgtgtgtgtgtgcatgtacagattttttttcctttacatccttgaatcacattatatatgaagttctctatactgctgatgtagcggcttcattgtctggggtaaatagctgggatttgttgtctcgcaccaagattaaagacatggacacacgcaaggagtcagtttaggagtagaggtttaataggcaaaaaaaagagaaaggagagcagtttcctctctcttaccagacagaggggcgtctgaaagggaaaagctggcctgcggtggaccatagcagattttacaggtaggcttgaggaggcaatgtatgatttatgtagggcccacagattggtttgaccaggtgtgacatttacctagcttgtggggaaggctggtcatcccaccctaatcttattatgcaaatgggctttccacttggccagtgccatcttgtctgctccttgctgtatgcatggctggcaaagagaagggaagatggatctgccattttgatcatgcgtagtcccaggtagccttttcctattggcacgactggcgacattcacctgtgcaagtttccagcttgcttgtctatgtctgcagcttgattttacaggctgctctttgttagagaagaaaatgatgttggggctgcttttcattaaagggaaaacattactaaggacttccttatcctcactatctgcctaagtaatttctttttaactcctatgtcattgattctgtatgactttgcattgtgagcatttctcactttataaaaattcctgcaaaatgtaatttttaatggagatctctatcattctgtcttatggctctaccacaatttatttaactaaccccctaatggttgatatttagcttatctgcagttcttgtcaatacaaataatgctgtggataaactaccttggatgtaaatctttgtctcttttgcgcctctgctttgaatgggactgaaaattccctgtatggttagtgtgggacttgtagtttagggtagcagaggcactatatatctttcttgtgacatatctcgctttattccattagtatcttcatcttggaaatgagaacatacagtttcccacttacctgggccctctggatgtagcttgtccaggccagccactgcaactttgccctcaagaaatgaacacttgtgtataaccaactcttttaatctttacaactccagaatttacctctcagtttcattgcggtttacaattgtggaggagggaacttagaattgcttcctcttgggagaataatcgggcaggagcaggagatgtaaatgaaagagtagagggacaggtaaagggcagaggggctgtagatccatgatttgcccctgttttgggtctgtattcatttctgtttggcaacaaagctgaggtatcatttaggtaaccgctattttcagtttccatccatatgctattatagtccattcatatgccattctatttcaactgctattttcttttttttttttttgagacggagtctcgctctgtcacccaggctggagtgcagtggcgcgatctgggctcactgccagctccacctcctgggttcatgtcattctcctgcctcagcctcccgagtagctgggactacaggcgtccgccaccatgcacggttaatttctttttatttttggtagagacagggtttcaccgtgttagccaggatggtctcaatctcctgaccttgtgatccgcccgcctcggactcccaaagtgctgggattaaaggcgtgaaccaccgcgcctggcctcaactgctattttcaattccattcatatgctattatgaatatatgattggtggagttaggttcctgagaaagctgaagggcgtggaggcagaattcagaaacatgttcatatctttcctattaaaataattacagggccaggcctggtggctcacatttgtaatcccagcacttcgggaggctgaggcaggaggatcacttgatctcagaagtttgagaccagcctgggcaacgtggcaaaaccccgtctctacaaaaaatacaaaaattagctgggaatggtggtgcatgcctgtagtcctagctactcgggaggttgaggtgggagaatcacttgaacccagggggcagggttgcagtgagctgagatcatgccactgcactccagcccgggcaacagagcaagactccgtctcaaaaaaaaattccactttatcttgtaaccacagttcacttgtccttccttcatggcagggctcttcaaaggaggcatctgcacttgtattcttcacctcctcacctcccaagatgtagtttcaattccaaccagtccaactctgaagtcattcccccgtgacccctgctcctgctcaccattccccatccagttggcagagtcatttttttagccctttttcttccttactttccctttctccacatccaatcaatcatgaagaccttctcagtttacctcttaaatttctttcactttactcccattgtcaccacctgtaataatttgctatggctgccataacaaagtaccgccaagttagtggcgtaagtaacagaaacgtattgtcccattgtctcttgttggttggaagtcgaggtgttggcggggttggttccttctgggggctacgaaggaaggctctgcttcagccctttctccttggctggtagatagccagcttcatgatcataggtgttctccctgtatcttcacattgcctttccccagtacctatctgtgtctcaatttccccttttaccaaggataccagtcatattggattgggacccaccctaattatttcattttaccttgattagctttgtaaagatcctatctccaggccaggcatggtggctcacgcctgtaatcccagcagtttgggaggccgaggcgggcggataacttgagggcaggagttcaagaccagcctggccaacatggtgaaaccctgtctctatcaaaaatgcaaaaaattagccaggtgtggtggtgcacacctgtatgcccagctgcttgggaggctgaagcaggagaatcacttgaacctgggaggcagaggttgcagtgagccaaaattgcaccactgcactccagcctgggcaacagagcaagactctgtctcaaaaaaaaaaaaaaaaaaagaaccctatctccaaatgaggtcacattctgaggtactggggatgaggacttcaccatggattttgttggtggagggaggacacaatacaactcctgacgctgcctctgttcaagcctttagtgtttctcacctatgtcatttcttcaggataagcttaggactgtccctgcttccagcattgtcttatttcaacccagccactactctgctgccagaagatctcataatactgctgtggctgttgggataagccaagctcctcaccatgcctagcatgccctttgtgttctgggcctttgctctccttccgtcttatttcctgctgctcacatagcattgctgcagccatcatgaccctgtgggatcattgccctgcctttgggcttggctgtgtgaagtttttcctgcctgcgatggtttctctccctacactccctgaataaatgactcatgttgggtcttcaggccaactgcagcattatctcctctgagaaaaccttccctaattctgggttttgtgcttctcctccatgacttaggtcccttgagtttcctttgccattgccctgtactacagttttatttatttatgagcttagcccccttacaagagccacatcaccaggacatctagttcaatgccttgtataccaaaggcactcaatgcacatttgctgaacaaataaatatgtgagtgaatcagtcttcatttagaaaattgcagtgtcagcccaggtgcagtggttcatgcctgtaatcccagcactttgggaggccgaggtgggtggatcacctgaggttgggagttcgagaccagcctgaacaacatggtgaaaccccacttctactaaaaatacaaaattagctgggtgtgatagtgcatgcctgtaatcccagctacttgggaggctgaggcaggagaattgcttgaacccgggaggcagaggttgcggtgagttgagattgcgccactgcactccagtttgggcaacaagagtgaaactccattaaaaagaaagaaagaaagaaagaaagaaagaaaacagcagtgttggctgagtgcagtggctcatgcctgtaatcccagcattttgggaggccaaggtgggcggaccacctgaggtcaggagttcgagaccagcctggccaacatggtgaaatcccctcgtctctactaaaaatacaaaaaaaaaaaaaaaaaaaaaaaattagccaggcatagtggcacgtgcctgtaatcccagctacttggaaggctgaggcaggagaatcctttgaacccagtgggtggagattgcagtgagctgtgactgtgacattgcactcaagcctgggtaacaagaacaaaactccatctcaaaaaaaaaaaaaaaaaaaaaaagaagaagaaaagaaaaagaaaaaaagaaaattgaaaattgcagtgtcacagtgagtaagtggactagtggtaacaggaacaaggaggggcacaataaaaggcgtggtaattggaatgggtttataattctcaccagagaagaaacacagcatttcggctggtgtcgctgctccagggaaagttctgttactccactgactctctcttttcctgataacatggccagcaagaaagtaattacagtgtttggagcaacaggtaaaaagtctttaatttttagggcatgctgactttgctcactctcctgtcttcctgtttgtaactttagagcctgcaagtgtgggctgaacaaagagctctttggaagaaattttttaaagtatcctattgctttagttcttgatgtggtaaaggggtggcatgatttgatttgtaacttgatctcagcaggacaaggacactgacgtaatctccctttcccagtcatggggctaactggttggtataagtctcatttcaacataagctatactctgaagtcttctctccactcacttcctaataagcaaaaggtacaagtgtgaggggcctgggggtttgtagtgaatatccaatgcctgaccaatcttccagggagtctgcaaggatggagtgtgtgggaagtttgcattcctggctcccttacagtttgttcctcaacagtcagagccatctttgcacaatataaatcaaatcaggtttttctccttcaatctattctcatttcagcctcccaaggatccatttgaaactgtcagatcatgtcaggcctctgctcaaaaccctctaaaagatcccagccccatggcactcccagtaaagtgcaaagtcctgctaatgccctgcaacagggccttggaaatgttgtgtcagaactctcttcctgccaccctcctctcactccgcttcattaccctggctttcttgctgttcctccaaaacaatcccacaaatacaaaggctctggcctttgtattggctgcttcttcaacctagaatgatctccctctgttactgatataatttgactgtgtccccacccaaatctcatcttgaattgtagttcccacaatccctacatgtcatacgagtgaccaggtggagataaatg

SEQ ID NO: 9921 - DNA, 6000 bp, Homo sapiens
tcagattccacagttaaaaaaagggggtggggataggtggctaacagcaattacgtgaggtttaaaagtttattttacaaccatgtaattgtacaaatgatataaacagaagtcagataaaattattagtacatatatagtactaaagcataaactattacagaaaatttgatacaaagttgtacataagtacttgtaaaggcaattaagcttccccagtctatgggaatacaaaagttgccagcaattaatttacattacaaaaaaggaaaaccattatttatgctatcacaaaagcaatacccttaaaagtaaaaacaatctccacttgatattagtaatttgaaaaacttagcatatctacaactactgcttaatcaacacttttcattgattcaacattatcacttaaatgcagatgcaaaataaccttgcatggcaaacatgtttactctgtgctaatgaaactatgaaacagttcctccaagttcacagacaagtcaatcaatgattgactacagaacagactggtgagtgttacaaaaaaaaaaagacctgcccaggggaccactaggggtggaggaagaacacctgggtctcactcactgggcacttgatgctttcatttttatctgtaagccaggggacaattatattaatattgtatgaatacactgctactgggaaaagcattcattcaacagatgcccactacatactctgtaccaggtagtgtgttaagtgctgaaacagggaaggacaaggcacatcctacgggggctcgcagtgtgggcaggtgctgagctaacgcacacacacaagggctgggtactgccagatctgtatcactccggagcaacgacctgtctctctgaatgatctctggcatggtaaaagagttaactgtatttcaaaaggtgaaacaaaactttttttgctttgttatgcatgtttcaaattgatcagtggttcaggcctggagtatgcatcagaattatctgtgaagcttagtgaaagtgctgatgccagagcccacccaaagcttactgcttcagaaccactggggacctggcagttctgatgtgcacgactagtcaagaatcctttaaaggctgataaagcaatcttgaaatcactgtcaatgcaaaagtggatgttcctcattaataagaactcaaaaaataaagtacagctagtataagacttgttttttgtgcctataaaacccaagtgttagctactttctaactataaaattctatccaaaaagacttgcagtcaaaacaccgagccaaaaaacaaaaaaggcaccaaagcagtgccgacttcaatgtgcaaaggccttttacgtgctgatattgtaagcaatctgtgtgcatgtgtacatatgcatctgttttcagggaaagaaaagctgttaaagccaattaaggttatgaattcttgctactactttaatattaaacctttaagtgaaaatttattgaacactattacaaatgtggcaaactgacatagctggtttactgcacaaactttaatgtcaaagggattagatcagagctccagtctcacttactgggcctataacattgtgcagggcacttatctcacctcaggaaaatggaagtaactgcttcattttacagaggtattaaatgaaagaaatgagaaaactataaaccaacattgaagcctgaattattgcttagtatttaaagtctagtacaattgcaatgtttttaataaaaaaactcattgataggtgtatttttacagtgtatctaaaagcagcatttaacattaaaaacttagtatttaaaagagtacacaaccaggcagggtgtggtggctcacgcctgtaatcctaacactttgggaggccaagatgggaggatcacttgaggccaggagttcgagaccagcctggtcaacacagcgagaccccaactttttttttttttgagacagtttcgctcatcgcccaggctggagtgcaatggtgtgatctcggctcactgcaacctctgcctcccgagttcaaatgattctcctgtcgcagcctcatgaagtagctggaattagatgcccgccaccccgcctagctaatttttttgtatttttagtagagatggggttttaccatgttagtcaggctggtcttgaactcctgacctcaggtgatccacccacctcaccttcccaaaatgctgggattacaggcatgagccaccatgcccggccaatgccatctattaaaaaaacaaagaaaaagagtacacaaccacaaagcactgggccaaatgcattgtttccatgtttgcaaggatttaccatagaaatattaggttgatgcaaaaattaaatttccagactgcgaattttaaatcattgtaactacgctaaaacatattctattaatcaaaacaggaaccattacaatcaacacatttttgccaatgagaaatgtttgtttattcctgtagcataaaaatccgtgcttcaggatttgacgaactcttggaaagcattttctgcaccatgctgaagtgttttccctgcaaaaagttgtcaagatgctagcagaagtggtagtcagttggcgaaaggtcaggtgaatatggtggatgaggcaaaactttgtagcccaattccttcaacttttgaagcactggttgtgcgacacgcagtcaggtgttgtcgtggagaagaattgggccctttctgttgaccaatgcaggcagcaggtattgcagttttcggtgcatcttaccaatttgctgagcatacttctcagatgtaatggtttcaccaggattcagaaaactgtagtggatcagatgggcagcagaccaccgaacagtgaccatgaccttttttttggtgcaagtttggctttgggaactgctttggagctgcctcttggtccaaccactgagctggttgttgtataaaattcacttttcattacatgtcacaatccgattgagaaatggtttgttgttgcgtagcataaaagaagactacacttcaaaacgatagttttgatttccgctcagctcatgaggcacccacttatcaagctttttcacctttccaatttgcttcgaatgctgaacgaccctaatgaccgtagaatagtcaacgctgagttcttctgtaatttttcatgtagttcaatgattgctctcaattggtcgttgtcaacttcccatggcccatatcacgttcctcatcttcaaggctctcttccttgcaaaacttcttaagccaccactgcactgtatgtttgttagcagttcctgggccaaatgtgttactgatgttttgagttgtcttcgctgctttatgaaccattttgaactcgaataagaaaactgctccaaatttgctttttatctaacatcattagacaaaaagcatattctaaaataaacagcaataagtcattagcaaaaaaataaagtgagaaatgtgcattaaaatgatccacatttatttaagaatgtattccaatatcaaacagcaaatttcaaaaatgcaaaaacgcaattgcttttgcctctcaggtacatcacttgacctttctagttctcacccacttcacccctaaaatcggaaaatctttctgcaagaaaaaaatttgaccacattcccttaaggcctcttccaatttcaagagctgtgctttaccatgacaaaacgaacctagctcttttcccaattttgcaacgtcagaaaaaggaggaaggggaaatagctgtgtttaaaacattttttaccaaatagaaatattataagattatggaaaaaaaaatactaaatgttggagtcatcctgataaaaacccaaatggatactgtgtgggaaaaaaagttaacccatccattctggagtcaatatttattcttaataagcaagaaaactgaagaaaaaaaatcagtataagatctacagcctgtagcctaaacacttcagggcatttaggataaataagcgcctgcaccttcccaggcaagtcaaaaccacgacataaaacagagaaatatgtaaggaaaacctacagcccaagagtttaagagcaagacaggccaatttcttcaaataaatttaagcaatgctgctaaaagctgctttacacatccctattaccatgtactacttccaaatttcgaggaggaggggcatggaattacacaagatctggatcgtatgtttactaagaaaccaaaaattataggttctggggcgtttcaacatttcacctgagatggccagaacgggcgcatctttagacctttaaaacctaaattaaaaactatcagtaccgaggaagggccgaagagctcaatacccacccaatacaacccccacttccgacctacagacgctctgctgagcggctgggagaatccgtcgcgccagtcagggcccggcttcttccaacaacagacactttgcgagccttccagaagccttggctaagcgagaaggcagggtggaggccgccactgcgaggacggtccccacccagctgcgaggagctcgcggttccccagaggggcgggcctgcgtccgggtaaccgtgcgcgacgtccacgagtttttaggacgaccagcccttcagcctctaggccccgacgcctgcgccatttaagccacatatccgcccgcccggccgcggccaaggccggcggcagctacgtagccgccgccgcccggggccccacagcccacgggccggatggaccgagcgccggctgcggcgttccggtgcgcgcgcgcgcctcagccaatcgcgttctcgcccgccccccgccgcggcggcgaggctggcgctgggaagaggaagaagaacattcgccctcctcctaccagcgcgcgggcggcggcggcggcggcaccggggtcacgaactctgacctttcactgacaaaaacaataacaaacccccccttctccgcgaccccggcggcgcccccgggcccgtccccgccaccccgctcccacctcggcgtctcgtctctcgcccgctgccccgcgagcccgcggcccccgggctcccgccatccgccgacaccgggagcccgggctccccgcgccctgccctccgcgccgggggccgcccgccgcagacacgggacccgcttcgaggccgctttggcgccaaatcctgaggtaaaattgaaagagggtcgggcgggctcgggccggcggcggagggggcgggcctggcgcgcggacatggaggcgccgcggcggcggctgaacccgacccttttacctttgccacggggtggcggcggcggcgcccggcgctttgcatagtgggccgggccgctcccctcccctccccgcccgcggccgggcgaagcgagcgggttccccctgaccggcccggccggcgcaagggtgggggtggagggggaatggccgcggccccgccttatagttggccctccgccagcgccgccattttgttctcgacggagatggctccggctgggcgggctcccttcctccttatcctcctcctcctcccgcctgcagtcccttcttccttctctgccgggattttcacccctccgcttctagtccgcctttggcggccgtcgcagcccaaccgccgttttttctgaaggggagggtaaaagaaaaggaggaaggcgggtgcgaggcgcgacctcgtgagcgacggatgggctggctaattggcgcccagataggagggccggggcctgtggcaccgcccccctaagctttgctgattggctgaggcggaagagggtggtccttatggggcgcgggagccctggcggggcgggagtagaggccggggcgaagagtggggccgggtcggcgggggcggggccgggggcggggcgcgaggggcgcggccgggtggagaggccggcgcctggtcttgggtcagcaggtgggctgcttccctccgcctggaacgcgtctcgaatgagtactgaggaacaatagtaataaagg

SEQ ID NO: 9922 - DNA, 6000 bp, Homo sapiens
atttaactttaaccactacatctcataagctattattattgcattgtagtgtgtgtgctggagttgtgtactgttttcagtattgcccataaacacatcactgatcttgttggtgtcaatggattgattcagtttgaattagtgttttctatgcacagatgtaatagtggaatgtgtttatttgaatattttatgaagacatcaaataagacataatttacatagtgatatataaatcataatataatttttattatttcgttataacaaaatcatttttttagttaaaaattaagtacagacaaagttttaaatttaaaataaagacatattattgaggcagaattgtggagaaatatagaagctaataccatgaatggaacggtaaagaaaaaaatagcctggaagaaggtacgtcacaaatgtcatgatgaacggcaactgcaatttgctgtgtcacagcaaactgccagagctatttgttgctatgtgatgatgtcgctgctctgagacaaacatgcttgggaatttttgtgttttaaatgtctctgttttcatttctaataagtagatcttgatatagtccacaaaaaaagtactttgtggtcttcaacaattttaagagtgcagagttctgagatcaaaagtttgagaactgctcatctagggcatagaaaaggcaatttaagtggcatgttgtttcggtattaggagctagcaggactcattggaacattttaaaatgaggaatgaccttaaatgtttttaattggccttatctttaatagacttcacctttctctttttttcctaatgcccctccttcatctaggtcctcatactgcagtgcgccacttggcctatcttacttgagtttgggataagaggactcttaacatttaggctcttctttcctttattcatatctagatggacctatcttgtgttgttttgcaggctctgttaattgtatgtaagggctaatgaggtagctttcctagaaagtaatttgcatttttaacagataacttttgaagacacagtcacttcattcaacagttattttggtcagaatgaggaaggtggagtaggtagaaatccactatgaatattctgagaatcccaacagactaagccatagacaccacaggattaataaatgaggctccttggaatgacagcagcaaaaggcaatttccaccgcagctacagcacgctgggtactgcccaaccagaggatgctcctgagcatcctcctctggcactgaggagcccagcgaatttccagtggccagtggtgtggctggtgactgacttgggttatagctctatagcctctactagttacttgcaaagtctcataggaagaaggcagcctctaaaaaacgctgaggctcatagacactgatattattttatagacactatcatcgaagagagggtcttaaagatatactttgcaatggctatttttcacttacattcttcttttcaaatttaaatagtggtaacctcttatacaattttaaatagtctttatttatttacttatttatttatttatttatttttgagacagagtctcactctgttgcctaggctggagtgcagtggcatgatctcagcttacgataaactctgcctcccgggttcaagggattctcgtgactcaacctccctagtggctaggattacaggtgtgtgctaccacatccggctaatttttgtatttttagtagagacggggttttgtcaagttggccaggctggtcttgaactcctggcctcaagagatccgcctgccttgacctctcaaagtgctgggattacaagcgtgagccaccgcgcctggcctagagcagtactgtgaacttcagagttcccaagcacctcctgcctccacaaacgcacagcttctcccactatcaaacatcctgcgacacggtggtacatttgttaccactatcgaacctacactgatacatcattcaaagccatagtttattttttcattttatttttttgagacagagttttgctcttgttgcccaggctggagtgcaacggcacgatctcggctcaccgcaacctccgcctcccaggttcaagcgattctcctgctccaccctccatattagctgggattacaggcatgtgccaccatgcccggctaattttgtatttttagtagagacggggtttctccacgttggtcagtctggtgtcaaactcctgatctcagatgatctgccgtcctcggcctcccaaagtgctgggtgagccaccgctcccggcctcaaagccacagtttacattaggatacacttcttttttttttcgagacgggatctccttgctctgtcacccagactggaatgcactggggagatcatgacttactgcagcctcaacctcccagatcaagagatgctcctgcatcagcctcttgagtagctgggactacagttgcacaccaccaaacccggctaatttttgtattttttgtagagatggagtttcgccatatcgcccaggctagtctccgattctccaatacctgggctcattgatccttccacatcagtctcccaaagtgctgggattacaggtgtgagccactgcgccctgccagggctcactcttgacgttgtaggttctagttttgacaaatgtgtaaaaacatatattcaccattatagtatcatacagaatactttccctgccctaaaaatcctctgtgctctattcatccctccttcccctctagcctttagtaaccactgatctttctactgtctccagttttgccttttcttcctttttttgagacagagttttgctctttttgcccaggctggagtgcaatggcgcgatctcggctcaccgcaacttccgccttccgggttcaagcgattctcctgcctcagcctcccgagtagctgggattacaggcatgcgccaccaccccggctaattttgtatttttagtagagatggggtttctccatgttggtcaggctggtcttgaactcctgacctcaggtgatccacccgccttggcctcccaaagtgctgggattacaggcgtcagcccccgcgcccagcccagttttgccttttctagaatgtcgtatagttggaatcatacagtacacagcctttttagagtggtatcctcttttatgatttcttttctgccttctagactgttcatattaacctcattttacctgtgtagaagtagatggtagttgatacatgaaaaagcaagcaagctacaaagcgtggcctggggaactcttccatcagcatcacatgagggtgataaattccagaagtagggaagaatagagggctaccgtgattagggaactgtgtttagaagggtttgggtatcaagacagccttggaaagagaagcaggacccacatctgtgcagggcgaagcaggtcaggttaagtcgttgaattttttcaaagtgtaacacgaagccattggagggttttcagcagagtaatcagatcttatttacattttaaaaataatactttgactgctggggagaagtgactgtaggaggacccaagaagcactctcctagttagggaaccagagcagtagctgaggcaagagataatggtttgctctagcaataccaacggtgagaaacagggattgaacatattttgaaggtagaatagctcagacttgctaatggattgaatggagaataaaaggctgtgagagtgttaggagagaaacataattttgctggcttcaggaacttgcagatttaccaaaacagtaaatattgatatggtgaagaaacctggggggtggggaaatagggtgttgcacatgtaaatatgtcttccacgtgacattttccccaccttctatagtgaagaatttcagagcaaactggaaagagttttacaagcaacacccatatccccatcgcctaagtttaacatcttaccatatcatctattcatgcctctatcagcccatcttacttcagtaatgcgtttaaattgcgggcatcaatgcactttcctcagaattcacctcagcacgcatacaatttatgtctagcttttttcttttgatctaaaatttacattcaaggtgaaacgcccagatcttgactgcacattagctgagttcggacacacgcgtacacccgtctaaaatctgagatgcaaaaaagcggcataatcaaacgggctgctggatgtaggaatctggagattagaagagaggtcttggcttgaaatataaatctgggaatcacaagaacataggtctacttaagctatgagattggataaaatcacctagagggtgcagagggaaagggaagggtctgtgccctcagagaccagcgtttggaggtcggtcgggtgggagcggggggtgggggtggggggcgcaagggttgagcaagcccgaaccagccggcccagccggggtcctgagaatcacccttgctcggcgccaagccaccgctttgacctaagagccaccaggttggggggcagggcgtggagaggactcccggccagaggcgggaaaggcagccgggaggagaggaaagaggaggaggaggggaggaatatgcggcggagggaaacggagaagaggtttacggcacggaggggaaaaacgaaggaagaggaggggctcggcaaggagaaggaaggggagaagggggaagcgcaggagaaaagggtagccggggagccgggaagcgggcgggagggaggggagcggcggggcggaggtcgccgcagcggccggccgagggcgggcggagggagggggtgtgtgcgcgggtcacatggtcgcggctgccctccccgtcagccgccctcgccgccgcggtgcgctggctgcaggaagccgccgcgccgccgcttttgttgtcagggacccagcgaggagcgccgctcgccggccgccgccaccctctctcgctgcagcctgctgtgcgctgcacggcctggggcccgggagccccgcccgctctgcccatgagggggccccgcgaccaccgctgcttccagcccggggcggcgcggcgctgaggcggcggcggcggcgctgccccctctgcgggaagcgggcggccccggccgcctccgcgagggcaccatggaggtgaatgcaggtaagaaccggactgcggcgggtgggggatggccggagggagcgctcagagcccgcggggcactttggggggcggcggcagggggtgtccccatggccggtggggcggggtgggctgctgcgcgccgcgtgtccgcctctggctcggttcccatcgccccccgggccgcccggcgcccgccctcttgtctccctgcaaagccgcagcgcggcctgccggcgcccggcccggcccccccctcacatggcccggccgcgcgagccacgtgcgcgctgtgtttacgttcggcggcgcgcgggcgccggttggctgggcgggcgcgtgacgcggcattacataatgggcgctgaggcggcggcggcgggcggggacacgtgaggccgctcggctccctgacccacattccccggggccgcagggacacgtgggggcgggggcgcgcgcgcgcgcgctggctgggagcgccgcagcctcccgggaggctccgcccctttggaagcctcggggcagtgacgtcgccgcgattccctcctcccccgcggggttgcacactgcggaggaggccgcgcgtgcgcgcccgctgagcccccgcggcggggcgtccccgaagcgggcgctgacaccgcagtgcaccggacgccgcacgctcttttcgcgaggtgaccccaaggcgcggaccccgcgcaaaccaaacgaaccggcgcctggggaggctggtagctgcataccttgcagattccgaggaggaagtgcaggacgagggcgtgctgcaggccggaggaggcgcctcggggaaggcgtggggctttcccgaagggatacgctcgaag

SEQ ID NO: 9923 - DNA, 6000 bp, Homo sapiens
caggtggaagaacgggcatcaatcatgagggctccaccttcatgacctaatctcctcccaaatgccccacctccaaaaccatcaccttgggggttaggatttcaacatatgaattttgagtggactcaaacacctagcagttccactactaggtatatatccaaaagaaatgaagcagaagctcaaacaaatatttatataccaatgtttatggcagcataattcatagtagcctaaagataaatggataaattaaagatgctatatgcatacaatggattattattcagccataaataggaatgatgttctgacccatgttacaacatgcatgaacattatgctcactgaaataagccagacacataaggacaaatattgtatgattccaattacataaaatacctagaatatgcaaattcatggagatagaaagtagattagaggttaccagggactcaaggaagataacaatggggagttgcttaatggatggagtttctatttgggatgatgaaggggttctggatatgaatagtggtgatggttgcaaaacattataattaatgctactgaattgtacacttaaaatgatttaaatggttaattttatattatatgtattttttaccagaataaaaaatgttggctgggtgtggtggttcatgcctgtaatcccagcactttgagaggccaaggtgggaagatcgcttgaattcaggagttcaagaccagcctgggcaacctagggaaacccgtctctaccagaaaaaaatagctgggcatggtgacatgtgcctgtaggcccagctactcagaaggctgaggcaggagaatcgcttcagcctggaaggttgaggctgcagtgagccatgattgcccccactgcactccagcctgggcaacagtacaagatcctatctcaaaaaaaaaaaaaaaaagtaaagactgataaattgtaccttataaaaataaaataaatacataaaatgtgactagcaattttaagacacttaaatatttgaattaatttattgaatacctgctctgggaattagtgttgtgtttccatttacagagacaaaacaggtctaattgattgactaaacaatagatgtaaatgtggtcagtgtttggatgtctattcatagaataggaacaatttttctgagaaatgatttgactctcagctgtttcctgtatgacctctcaatttacattttattcaagagtttctaatataatattgtggagcaaagaaacttgacagcaacagctgttgagagaaggtaactgtcatattaatatttctgggaagaggtattgcggtgttaccagattccagatttgcaccttttcccctcaatccctttatccctctcaaacattatagtgatttatgaaaatatatgtataattccaaataagttttagataattccatatataccaaatacccaattatctctttgctgtcaaagggtaatttatcctcatcatgacacttgccatcattacaagtttaaagcctaaaaatgaaaagaggtttcacacatttaagagctaactcatttaataataaatcaaaagtaagtatgagtttcatttagtagtagcatgagctagctgcagggaaggtcctctcaaggtggtcctttttcttctcttcaataaaggcagaactctattaaagcatattagtaaaaaccatatttaaaagaattactacactgaactgagcagccaccaaatgcaattggtaccaggtgatataagggcttctcctctcagggggcttataagcaactaaggcaggaagtcacagataccatattctgcagtgtaatttacaaatgaggtgaaaacaaagtgttccaaaattctaagagagacattggaattctgaccacaagtgtaatttatggagcctcagagtaattataggatctggaacagctggtgctcaaatttagtggtcctccagttgctggaatctgcgatttctgggaagttaaactttgtgtcactgcttctacttgtgataaaatgaaaccgctttcaaagagaagattcctattcctagcctttttgggtaacttctactacctccacttaaggatgaaaagggagaagtttcctccaagactgcctcatggggatcagagtgtcacctccatgctcctgccctaagtgcccctgagcacaccccagagggaggctaagagatttttgagaaagaccatgtgactggctgataaacacctattttcctcagattccacctgaatttatatcatcagtgcatcactcttttattttgttctctctgttcctctttttaaatattaatattctctggagaggggtaaaacattaaatgaattcacactgaggaaactggccaggtacaatggcttatgcctgtaatttcagcaatttgggaggccaaggcagacagattgcttgagccccagagtttgagaccagcttgggcaacataatgagacctcgtctctacaaaagaaaaacaaaaaaaaaaattagccaagcatggtggcacacacctgtagtctcaggtatttgggatgctgaggtgggaggattgctttagcccaggaggttgaggctgcagtgagccatgaccatgccactgcactccagcctgggtgacacagcaaaacactgtctcaaaaaaaaaaaagaaactcttcaggctgatcagatctgcttttctctgatgagtttcttaggagctctacatttctggttgctgcaataggcaaagtatagaatggaggtcaaggcctcaaatttctctgacttcccagctgggcttgagagtgactctggccctcaactgagggcattagtaagctgtccttaagaacgagagtgtattttctggctgtattcttaactcatttcactatagagccatgtctgatattaacagtgcagtgctagactagagaggcctggcactcctacagccttctcctgtcttctagctgggacttcacaccacagacccaaaggaaaagagacccaaagatccctgcagaaacctgagaatatttcctttacctcagtggtttcataatctgttcttagtttcctgtttctgctgtaaataattcactatatttttaagagagagaaggtcaggcccttgtgagccagaagggatttgagagatgatgaaagctacgtatgttacccataacctaaggacttctggcaaggtggcctacctgagctggagtcatgccttttttccctggacttggagatacctgtcagtgcagaaaggcctacttttgatcttggaaataagtttcctggggtgagttcttaaccctttccagctttcccaccctctttggctttagccatggccttctgatctgtgtttctcaggggacctgcaggccccagatatagccccatgctgtcctcctaccccagagcacactgttcaggctacttccactggtactgaaatccagtatttcacttactctttttctttccaatatcctcatgacattcaatatttcacttactctaggtcctccctgcctaaggcccaagtcaactttctgtccagtgggatttgtaatccaatacctcctagccctagcagaatcccatgtggataatcagaaatgtgactggaaaaaggacagagctctatggctgtgggtcccagtccccactgctggcagtaagtccccagcagtgagctgtgtaagcaccttacattctgcgcttggttgaaaacagcaaggcaagcatccacttgagaaatgtcaacccctaggaaatcccagcctcaagtctttctcatcccttgggaagtgcaaattggatagagaagaaaccaattaaaaacaaaacaaacaaatcatacttagatattctggcttttctcaccagggctggattaaagcatgtacttcaaaataataacaacttaagtcaataaataaatgtaaggaagtccaaatgttcacctgaagacaactgtggtcattttttggcaatcccaggttctcttttctacctgtttgctcaatcgtggtctccctctccctctcttgttggggcccatgcccctgctttactgttgccagaggcttgtacttgtttgccttttaggtaggagcagttacttccactcccctcacctgccataaagcatctttataaacaaagcaagtagaagaaacacatcctggtatccaccacattcggcttttgttgattctgttcacttgggagcacctgctgctagggaataagaaggttgaggctgaagagtgaggactcttcagctcccctctggcaggacccgggagaggaaagagccctcagctggtccatcctccccactcctggtcagccttctgttctgagatcaaagtggtggggtcacattctcgagaactgtgctcagccccctcatctcacaccctttccctctccctgtgtgcctgcccccctcttacataaccatgctggtgattggcaccgtcataaatcaatactttgctcactttcacatcaagtaacactatccagggaggtggtttcaacaaaggaggaagtataaggagatctaggttcaaattaatgttgcccctagtggtaaaggacagagaccctcagactgatgaaatgcactcagaattacttagacaaagcggatatttgccactctcttccccttttcctgtgtttttgtagtgaagagacctgaaagaaaaaagtagggagaacataatgagaacaaatacggtaatctcttcatttgctagttcaagtgctggacttgggacttaggaggggcaatggagccgcttagtgcctacatctgacttggactgaaatataggtgagagacaagattgtctcatatccggggaaatcataacctatgactaggacgggaagaggaagcactgcctttacttcagtgggaatctcggcctcagcctgcaagccaagtgttcacagtgagaaaagcaagagaataagctaatactcctgtcctgaacaaggcagcggctccttggtaaagctactccttgatcgatcctttgcaccggattgttcaaagtggaccccaggggagaagtcggagcaaagaacttaccaccaagcaggtatggtttttctttctttctcttttgctgggggctgaccgcccttcagctccagccaaaagatgtgtgtgaacacaaatataccttctgtttgaggtcagcatcatagtgggtcgtgaatcatgttggccttgctgctgtctcctcatttctagggtggaaaaaaaaaagcatgaaaacaatcacttaatgttgagccccattactgatgctctctggtcctgcactagcctcctagaaaaatcaccacaggagaagccttaactactgcatgagttaccacaagtcacacatacaaccagctccctgttacagggctggagtccctggacccaggaaataccacctccaaggactgtgggagctggggactatgggaactgggatcaactcagtcctgattccttttggcctgctgggttagtgctggcagccccctgaggccaaggacagcagcatgacagtcaccaggactcaccacttcaaggaggggtccctcagagcacctgccatacccctgcacagtgctgcggctgagttggcttcaaaccagtgagttttctacctctactattgaaagggcaccttgtcccacagaaccgagtcttgcctgcatgtggtcagtgccaccaggtccttcttctctccactttacagcccagctcggctgaagctatggccagaggcactgctttaaggccactccatatctaggacaggtcaacagacacctctgaggccactgagtcttgactcaatgaatcagctatagcaggcactattcctctcccacatggcctctaatgatatggtcagagttgaaaggatgctaagg

SEQ ID NO: 9924 - DNA, 6000 bp, Homo sapiens
caaaagcaagatccattttctactggaatcattgaagacttcatcatgaatctagaataacttcagcctcaatacatagagaatgggactgtcagggaatgcatccacacccagaatttatacatccagccaggtatacagtcaggttgtcctcctaggaggccacaggcctgctcccccacagttcccatggccaaaagatggctggaaatggccctctggggctactggcagagccacagcacactcgagaatcactttgacagcagtgattctgtggccttggaaagtagatacaatgtgtctgaaaacatcatgagtcactcctgtccagtcagggacccagggttgggtagggtgacgacaggttacttggagcccaaaatgataagggaggctttcttatagggctcagaaattcactcgagatagttctcaaagaaaagggcctagagtgttttacatcctgtttgcatattcattttttctttatcttgatatttactgtctggaatatccattttttactcttccccatccttgtgccttttctcatattgattattcctcctgaaatgcctcccatccctccccattctttgtatctctgctgatagaaatcttagccagcccctaaggcccagctgagatggcaggtcccttacaccttcgtgtgccctgcaagattggagcacagcgactcattgtggctgagtgaatggatgctggtgctggaatgctacctgcatagtatgaatacattttcccattttaaaaataagcagtattcactctagaaaaatttagaatgttctagaaaggaaaaaggaaaaagaaaactttttaaaaagcactatccaggggcagggcgtggtgactcacacctgtaattccaacactttgggacactgaggcagcaggattgtttgagcccaggagtttgaaaccaccctgggcaacatagtgagaccccatctctatgacaaaaaaatgaaaaattagtcaggtgcggtggtgtgcacctgtagtcccagttactcagaagtctgaggtgggagactcacttgagcctgggaggttgcggttgcagtgagctgtgatcacatcactccactgcagcctggatgacagagcaagacactatctcaaaaaaacaaaaacaaaaaagcactgtccagatacctactattaacattttgcgtattcacttccagaaattttttatgtattgtaattgggatcataaaataccaaaggttttgtaaccttttttcatgtaatatacaataacaatacgtactcttcttcattttctatggttcctatttccctgctaatgaaaaggtagggtgtttccggtttgggctgtcacacatggcactgcagtagagtcctggcacatgctccacttgctcacctgagatccagtcctggctggggaatggcctggtcacgtgggacacttgagatacacagtgttcagtggccctccagggcagcattgtggtgcaccctccaccccaagtttcttcaaaatgaaagctattttactgctttatttataatgctaaatgaacactggaaattagagcagtacaaaaaataagaaaaaatcacctcaaatcccaatacccagagcccaactgttagcgtggtgaacattttcccaatactttatatacacatctatacttgctgttttataatctccttttaaacttttattgagcaatatgtcatggatgtctttcctggtcagtaaatacaggtttgtattatcgttttttaaatgagtctctagcagttcatcatatgaagactcctactttagtctgtcctctgttgatgaatttccaggttttctcttggtggtgggggtgaggagagttggaataaacaagagtgaagggaacacatctgtacatacattttgtactcatttggttttttctcatgataaatttctataagaggaactgttgaaatcagaaaagagaggtgggtggatggtggatccgtttggtttgattctgtgcaatacagacgggaccccaggagcctttgctgagctgtggttgaagggcatcaaacagtctccttttctaatgacactcccttttatagattggcccggatcctcgttcgcctgccggcactcaggctgatgagctccaacataacagaagaacttttttttactggtctcattggcaatgtttcgatagacagcataatcccctacatcctcaagatggagacagcagagtataatggccagatcaccggagccagtctatagcgcaaaccacacacctgccaaggagcaacagaatccttccaggaccgttcacatacaaagaaaagtagtggtattttggtatgtgcaaatatttccatatgttagccatttcctgtctggtttctccttatctgttaatcccagacaatagcaattaaaagactagtaggatcctttcctgacataagaaatgttttaatgccttttgatgaagcagcagattttggaacaatcttttaactcaatttgtatttagaaattctcaaagggcaaaaaacaaaaaaaaaggttttataatgtcagagactagtattaaagaaaactgaaagaacctgagagaatagtatgtgtgtatatatatatataaaaaagtccttggaattatagatactaattaccagggtaataatattagcactttctaagcacttatcaatgtgtaacgttagcaacatcttgcctgtgggcagggcaaatggaaaactgtgtatgtcttttgccgaaatgctaatgatttctgtgaaaactcactagggtacaggagacaatcatttatgtttaagaaaagaaggcatcattcctaattgtgtgcacatgttgtggagttgagctgaattctgtgaatggaaacgtggctcatttgcatcatgcagtaagtgggagtgtggtagcacagtcggtggtgacccagttcagaagcttctagccatagagcagacacttgtcaggttccctgactacttggtcctggtctctgatgggcatctgcagactcctctagaacctggggttctcctttgatgactggttatctgaattggattgcaactagtcagacattaactgccaaatgagatgtacagttcctccagcaagtgaaaacatccccaagtcacatccgccgctcgtggcagatggagccttgtgaccaaaaagtgcaaggtgggcattttgagctcttgacagtacttccaatacaattgggggtgcttgtgtgtttgtccagatggaggagtgtggccttggagtgtgagcgttaccttcccagggctttccactccaaatgcccccttgaaaagggctcgtgtttctgcagctccatcataactgtgaggctggattggggctgggcaggagcctgctgccgcctggcgagagtggttagggcctggtaaagctggatggaaggtttcaggacaatttcttcctgttgaccttaaataccagagattttaaaaatgtgtatagactcagcatctctgttggcaagtctgttaatgttaccagcacactgtgcactttggttcccccaggtgtgtgccagccgaccaccccggagcattttaaatgcaggctgcttgctccttaaaaacaaccctcaatttccagggtgatagtctttctcctcataaattgtagcaaccagagtttacagcaagaacagtatgcgcttaaaaggaagttatgtctaacttcaaacacccgtaaattcccacggatgtgaatatatagcaagcttttcctgtttgagaacagtggcatgtggaagacccggtcaattgctttgtcttttgctttttaaatagtccagattaagaaaatacaccctgttgggttaaatttgcctctcttgatttgttaatcagatgatatccaaaaagatccctggacactcccctgactcacaggtgctctgatctggctcaggctggcgccacatgtgctccacaggggtgcagtctggccagctacagacgcccctgtggtgccacattggacagaatggaagctgctgcaggctcaaggcagaacaggatgcttgatcctgaagggttagcagcactttacgcaagtcagtgttagtagggtaagtgggaacagtgtttccaacttctaaattcttgtttggatttaattatatcattttataattcttgccttggcagcaaattttggagagtagtgggagtggccattataaaatgatggaaaggatttaattttgccagcttaaagtaatttttacttttctaaccctgatgtgttttcagtttcaaaattaagacaaaaaaccagctgagacaatggaattagggcaggtttgtttcatttctgcttgtgaaggcttttagtagcaggcatcctgcagctcagtggtgcctctaacacagattgttgcctgccttccgtcgttttgatccttgagagtgaccatgagggccatgttgcagttccctgggaatacaagcataacagctttcagatcccagttcttggtgttggtgaaaaggtctccaccagcccctcctctcattcccaggtcattcagtggcagccagtaggctgcttagactcaggctggataaggaagtgttgggctgtggtgaaacaaccttgcagaaaacgtgattttgcttggaaaggtgctgattctaacctggtcctgctctttaagtccccttgctggtgatggctgattccagggactgttttgggctttgaacacctcttggttggtttctgagatcctcttggccttactttgaagtggccttttctttaaggatcatgtccacgtaacctgtattcttgctgctttaactcatttcaagcctctgactgcaggtccatttcatctcctgtcaggttggttaagtaaagtcagcccaaagtcaagaattacttaaagagatgcaaaccaaatatttgggctccaactttcacagggcttatagcccttattagcagtttgtgaaactttgggtttcatgaagtgagacctgtcctctggctactgaactccatggagccacgttcatgctccctcttctactggcctggctgctcctccctcaatgaggagaggcagctggctcagagaggtgggacagacacatgctgtcatcagttaagtgagctcttttccagaagtatctcagataatgttgggttaagacagatagatgttgaaaatggtggagatcattacacattagcataaaacaggacaggaagagattttttgaaagaccaaattagttgagcaagtaatacttttcaagttactcctggaaggtgtttttaaggaagtgtgttacctaccatactctcctaatttgacatttctgtgtcctgaggagttacatttattgtctaacccttgccataaggctgtggtttgaggttcttttgctgttctgggctttatatttaatttcaggtgtagtcacttctaagatgtgtaattgccctcaagagggactgatttttagcttgtcattgtcagtattgaatgtggactcttctgaggcagttaggacaccagccatggtgttaacagtggatgcgttaggctccttaatctcaaggcaatatccacgctacacacatacttattagctgtcttacttgtttgggggatagttacggcaaggagcaaaaaattctaaggactctagctgtttctagtgcttttactttcatagtcctttgaggacatttcctgcagagcactcttgctcacagcccgccctctgcagggcttccagcccctggccgcaatcagcagttcatgccacatgtgtacatccatgttctgggacctgatctcattggagtccagaagcttgttgcccactttccagtgtaaatgactttatgtgcaatggggtcataggtaacattttaactcttttcttagt

SEQ ID NO: 9925 - DNA, 6000 bp, Homo sapiens
aggctagagtacagtgatgtgatctcagctcactacaacctctgcctcttgggttcaaatgattctcctgcctcagcttcctgagtagctgggattacaggtgcctgccaccacacctggctaatttttgtatttttagtagagacaggattttgccatgctggccaggctggtctcaaactcctgacctcaggtgatccgcctcccttggcctcccaaaatgctgggattacaggtgtgagccaccatgcccggcctcatggggaattttaaatggcctaccaaagtgttaatagtgccccaagacagagccaatccacaaagactagaagaggagggggttttacttgttttgttttacttagctcctggcaatcaaggacagctctatcaaaaacactggctgaacacaagctaagccttcagcaatcaagacaagcaaaccgtaaggaactggaagaatctgacttccagagttaaaacactgtaatatttgaatgttcaatttttaaaaatcacaaggcatacaaagaaacaggaaaggataatgcattcaaaggaaaaaaaataaactgacaaaactgtccatgagaaagctcaaacattgaaattattaggcaaagactttaaaaacaactgtcttaaatgtattcaaaaaactaaaagaaatcatggaaacgaagaaaggaaaccaggaaaataatatatgaacaaaacgagaatatcaatacagagatagaaattataatgaggaatcaaatagaaattatgaaggtgagaagtatgataactgaaatgagaaatttcactagaggagttcaacagcaggtttgatcaggcagaagaatgatttaacaaacttgaagataggacaattgaaattatccattctgagaagcagaatgaaagagtgaagaaaagtgaacaaagactaagatacctgtggaacaccatcaagtggaccaacatatgcattatgagagtctcagaaggacaagggagagagagagacagaaattatatgtgaatggccaaaagtgtcccaaatgtgataaaagacatgagtctacatatccaggaagctcaacaaagcccaagcaaaataaacacgaagagatacaccaagatacagtataggcagattgtcagaagacaaagagaatcttgagaacagtgagagagaggcaactcatcctgtacaagggagccttaataagattaacagttgatttcgcatcagaaaccatggaggcctgaaaacaggaggcctgatgccacttcacacctactaggatggatataattttttttaatggaaaataacaaggagaggatgttggagaggacatgaagaaattgggacccttgtacattggtggtgggagtgtaaaacgatgccactgctgtggtaaagcttggtagttcctcaaaaagttaaatgtggaactaccacatgacccaatgtcttagtccatgcaggatactacaacaaaaataccataaactggatagtttataaacaacaaaaatttatttatcatagttatagagaccgagaagtccaaggtcaaggtgccagcagattcagtgactggtgaagggatctatgatcccttcctggatcatagatgacagtcttctcactataacttcaggtggaagaacgggcatcaatcatgagggctccaccttcatgacctaatctcctcccaaatgccccacctccaaaaccatcaccttgggggttaggatttcaacatatgaattttgagtggactcaaacacctagcagttccactactaggtatatatccaaaagaaatgaagcagaagctcaaacaaatatttatataccaatgtttatggcagcataattcatagtagcctaaagataaatggataaattaaagatgctatatgcatacaatggattattattcagccataaataggaatgatgttctgacccatgttacaacatgcatgaacattatgctcactgaaataagccagacacataaggacaaatattgtatgattccaattacataaaatacctagaatatgcaaattcatggagatagaaagtagattagaggttaccagggactcaaggaagataacaatggggagttgcttaatggatggagtttctatttgggatgatgaaggggttctggatatgaatagtggtgatggttgcaaaacattataattaatgctactgaattgtacacttaaaatgatttaaatggttaattttatattatatgtattttttaccagaataaaaaatgttggctgggtgtggtggttcatgcctgtaatcccagcactttgagaggccaaggtgggaagatcgcttgaattcaggagttcaagaccagcctgggcaacctagggaaacccgtctctaccagaaaaaaatagctgggcatggtgacatgtgcctgtaggcccagctactcagaaggctgaggcaggagaatcgcttcagcctggaaggttgaggctgcagtgagccatgattgcccccactgcactccagcctgggcaacagtacaagatcctatctcaaaaaaaaaaaaaaaaagtaaagactgataaattgtaccttataaaaataaaataaatacataaaatgtgactagcaattttaagacacttaaatatttgaattaatttattgaatacctgctctgggaattagtgttgtgtttccatttacagagacaaaacaggtctaattgattgactaaacaatagatgtaaatgtggtcagtgtttggatgtctattcatagaataggaacaatttttctgagaaatgatttgactctcagctgtttcctgtatgacctctcaatttacattttattcaagagtttctaatataatattgtggagcaaagaaacttgacagcaacagctgttgagagaaggtaactgtcatattaatatttctgggaagaggtattgcggtgttaccagattccagatttgcaccttttcccctcaatccctttatccctctcaaacattatagtgatttatgaaaatatatgtataattccaaataagttttagataattccatatataccaaatacccaattatctctttgctgtcaaagggtaatttatcctcatcatgacacttgccatcattacaagtttaaagcctaaaaatgaaaagaggtttcacacatttaagagctaactcatttaataataaatcaaaagtaagtatgagtttcatttagtagtagcatgagctagctgcagggaaggtcctctcaaggtggtcctttttcttctcttcaataaaggcagaactctattaaagcatattagtaaaaaccatatttaaaagaattactacactgaactgagcagccaccaaatgcaattggtaccaggtgatataagggcttctcctctcagggggcttataagcaactaaggcaggaagtcacagataccatattctgcagtgtaatttacaaatgaggtgaaaacaaagtgttccaaaattctaagagagacattggaattctgaccacaagtgtaatttatggagcctcagagtaattataggatctggaacagctggtgctcaaatttagtggtcctccagttgctggaatctgcgatttctgggaagttaaactttgtgtcactgcttctacttgtgataaaatgaaaccgctttcaaagagaagattcctattcctagcctttttgggtaacttctactacctccacttaaggatgaaaagggagaagtttcctccaagactgcctcatggggatcagagtgtcacctccatgctcctgccctaagtgcccctgagcacaccccagagggaggctaagagatttttgagaaagaccatgtgactggctgataaacacctattttcctcagattccacctgaatttatatcatcagtgcatcactcttttattttgttctctctgttcctctttttaaatattaatattctctggagaggggtaaaacattaaatgaattcacactgaggaaactggccaggtacaatggcttatgcctgtaatttcagcaatttgggaggccaaggcagacagattgcttgagccccagagtttgagaccagcttgggcaacataatgagacctcgtctctacaaaagaaaaacaaaaaaaaaaattagccaagcatggtggcacacacctgtagtctcaggtatttgggatgctgaggtgggaggattgctttagcccaggaggttgaggctgcagtgagccatgaccatgccactgcactccagcctgggtgacacagcaaaacactgtctcaaaaaaaaaaaagaaactcttcaggctgatcagatctgcttttctctgatgagtttcttaggagctctacatttctggttgctgcaataggcaaagtatagaatggaggtcaaggcctcaaatttctctgacttcccagctgggcttgagagtgactctggccctcaactgagggcattagtaagctgtccttaagaacgagagtgtattttctggctgtattcttaactcatttcactatagagccatgtctgatattaacagtgcagtgctagactagagaggcctggcactcctacagccttctcctgtcttctagctgggacttcacaccacagacccaaaggaaaagagacccaaagatccctgcagaaacctgagaatatttcctttacctcagtggtttcataatctgttcttagtttcctgtttctgctgtaaataattcactatatttttaagagagagaaggtcaggcccttgtgagccagaagggatttgagagatgatgaaagctacgtatgttacccataacctaaggacttctggcaaggtggcctacctgagctggagtcatgccttttttccctggacttggagatacctgtcagtgcagaaaggcctacttttgatcttggaaataagtttcctggggtgagttcttaaccctttccagctttcccaccctctttggctttagccatggccttctgatctgtgtttctcaggggacctgcaggccccagatatagccccatgctgtcctcctaccccagagcacactgttcaggctacttccactggtactgaaatccagtatttcacttactctttttctttccaatatcctcatgacattcaatatttcacttactctaggtcctccctgcctaaggcccaagtcaactttctgtccagtgggatttgtaatccaatacctcctagccctagcagaatcccatgtggataatcagaaatgtgactggaaaaaggacagagctctatggctgtgggtcccagtccccactgctggcagtaagtccccagcagtgagctgtgtaagcaccttacattctgcgcttggttgaaaacagcaaggcaagcatccacttgagaaatgtcaacccctaggaaatcccagcctcaagtctttctcatcccttgggaagtgcaaattggatagagaagaaaccaattaaaaacaaaacaaacaaatcatacttagatattctggcttttctcaccagggctggattaaagcatgtacttcaaaataataacaacttaagtcaataaataaatgtaaggaagtccaaatgttcacctgaagacaactgtggtcattttttggcaatcccaggttctcttttctacctgtttgctcaatcgtggtctccctctccctctcttgttggggcccatgcccctgctttactgttgccagaggcttgtacttgtttgccttttaggtaggagcagttacttccactcccctcacctgccataaagcatctttataaacaaagcaagtagaagaaacacatcctggtatccaccacattcggcttttgttgattctgttcacttgggagcacctgctgctagggaataagaaggttgaggctgaagagtgaggactcttcagctcccctctggcag

SEQ ID NO: 9926 - DNA, 6000 bp, Homo sapiens
aaacaaaactttttttgctttgttatgcatgtttcaaattgatcagtggttcaggcctggagtatgcatcagaattatctgtgaagcttagtgaaagtgctgatgccagagcccacccaaagcttactgcttcagaaccactggggacctggcagttctgatgtgcacgactagtcaagaatcctttaaaggctgataaagcaatcttgaaatcactgtcaatgcaaaagtggatgttcctcattaataagaactcaaaaaataaagtacagctagtataagacttgttttttgtgcctataaaacccaagtgttagctactttctaactataaaattctatccaaaaagacttgcagtcaaaacaccgagccaaaaaacaaaaaaggcaccaaagcagtgccgacttcaatgtgcaaaggccttttacgtgctgatattgtaagcaatctgtgtgcatgtgtacatatgcatctgttttcagggaaagaaaagctgttaaagccaattaaggttatgaattcttgctactactttaatattaaacctttaagtgaaaatttattgaacactattacaaatgtggcaaactgacatagctggtttactgcacaaactttaatgtcaaagggattagatcagagctccagtctcacttactgggcctataacattgtgcagggcacttatctcacctcaggaaaatggaagtaactgcttcattttacagaggtattaaatgaaagaaatgagaaaactataaaccaacattgaagcctgaattattgcttagtatttaaagtctagtacaattgcaatgtttttaataaaaaaactcattgataggtgtatttttacagtgtatctaaaagcagcatttaacattaaaaacttagtatttaaaagagtacacaaccaggcagggtgtggtggctcacgcctgtaatcctaacactttgggaggccaagatgggaggatcacttgaggccaggagttcgagaccagcctggtcaacacagcgagaccccaactttttttttttttgagacagtttcgctcatcgcccaggctggagtgcaatggtgtgatctcggctcactgcaacctctgcctcccgagttcaaatgattctcctgtcgcagcctcatgaagtagctggaattagatgcccgccaccccgcctagctaatttttttgtatttttagtagagatggggttttaccatgttagtcaggctggtcttgaactcctgacctcaggtgatccacccacctcaccttcccaaaatgctgggattacaggcatgagccaccatgcccggccaatgccatctattaaaaaaacaaagaaaaagagtacacaaccacaaagcactgggccaaatgcattgtttccatgtttgcaaggatttaccatagaaatattaggttgatgcaaaaattaaatttccagactgcgaattttaaatcattgtaactacgctaaaacatattctattaatcaaaacaggaaccattacaatcaacacatttttgccaatgagaaatgtttgtttattcctgtagcataaaaatccgtgcttcaggatttgacgaactcttggaaagcattttctgcaccatgctgaagtgttttccctgcaaaaagttgtcaagatgctagcagaagtggtagtcagttggcgaaaggtcaggtgaatatggtggatgaggcaaaactttgtagcccaattccttcaacttttgaagcactggttgtgcgacacgcagtcaggtgttgtcgtggagaagaattgggccctttctgttgaccaatgcaggcagcaggtattgcagttttcggtgcatcttaccaatttgctgagcatacttctcagatgtaatggtttcaccaggattcagaaaactgtagtggatcagatgggcagcagaccaccgaacagtgaccatgaccttttttttggtgcaagtttggctttgggaactgctttggagctgcctcttggtccaaccactgagctggttgttgtataaaattcacttttcattacatgtcacaatccgattgagaaatggtttgttgttgcgtagcataaaagaagactacacttcaaaacgatagttttgatttccgctcagctcatgaggcacccacttatcaagctttttcacctttccaatttgcttcgaatgctgaacgaccctaatgaccgtagaatagtcaacgctgagttcttctgtaatttttcatgtagttcaatgattgctctcaattggtcgttgtcaacttcccatggcccatatcacgttcctcatcttcaaggctctcttccttgcaaaacttcttaagccaccactgcactgtatgtttgttagcagttcctgggccaaatgtgttactgatgttttgagttgtcttcgctgctttatgaaccattttgaactcgaataagaaaactgctccaaatttgctttttatctaacatcattagacaaaaagcatattctaaaataaacagcaataagtcattagcaaaaaaataaagtgagaaatgtgcattaaaatgatccacatttatttaagaatgtattccaatatcaaacagcaaatttcaaaaatgcaaaaacgcaattgcttttgcctctcaggtacatcacttgacctttctagttctcacccacttcacccctaaaatcggaaaatctttctgcaagaaaaaaatttgaccacattcccttaaggcctcttccaatttcaagagctgtgctttaccatgacaaaacgaacctagctcttttcccaattttgcaacgtcagaaaaaggaggaaggggaaatagctgtgtttaaaacattttttaccaaatagaaatattataagattatggaaaaaaaaatactaaatgttggagtcatcctgataaaaacccaaatggatactgtgtgggaaaaaaagttaacccatccattctggagtcaatatttattcttaataagcaagaaaactgaagaaaaaaaatcagtataagatctacagcctgtagcctaaacacttcagggcatttaggataaataagcgcctgcaccttcccaggcaagtcaaaaccacgacataaaacagagaaatatgtaaggaaaacctacagcccaagagtttaagagcaagacaggccaatttcttcaaataaatttaagcaatgctgctaaaagctgctttacacatccctattaccatgtactacttccaaatttcgaggaggaggggcatggaattacacaagatctggatcgtatgtttactaagaaaccaaaaattataggttctggggcgtttcaacatttcacctgagatggccagaacgggcgcatctttagacctttaaaacctaaattaaaaactatcagtaccgaggaagggccgaagagctcaatacccacccaatacaacccccacttccgacctacagacgctctgctgagcggctgggagaatccgtcgcgccagtcagggcccggcttcttccaacaacagacactttgcgagccttccagaagccttggctaagcgagaaggcagggtggaggccgccactgcgaggacggtccccacccagctgcgaggagctcgcggttccccagaggggcgggcctgcgtccgggtaaccgtgcgcgacgtccacgagtttttaggacgaccagcccttcagcctctaggccccgacgcctgcgccatttaagccacatatccgcccgcccggccgcggccaaggccggcggcagctacgtagccgccgccgcccggggccccacagcccacgggccggatggaccgagcgccggctgcggcgttccggtgcgcgcgcgcgcctcagccaatcgcgttctcgcccgccccccgccgcggcggcgaggctggcgctgggaagaggaagaagaacattcgccctcctcctaccagcgcgcgggcggcggcggcggcggcaccggggtcacgaactctgacctttcactgacaaaaacaataacaaacccccccttctccgcgaccccggcggcgcccccgggcccgtccccgccaccccgctcccacctcggcgtctcgtctctcgcccgctgccccgcgagcccgcggcccccgggctcccgccatccgccgacaccgggagcccgggctccccgcgccctgccctccgcgccgggggccgcccgccgcagacacgggacccgcttcgaggccgctttggcgccaaatcctgaggtaaaattgaaagagggtcgggcgggctcgggccggcggcggagggggcgggcctggcgcgcggacatggaggcgccgcggcggcggctgaacccgacccttttacctttgccacggggtggcggcggcggcgcccggcgctttgcatagtgggccgggccgctcccctcccctccccgcccgcggccgggcgaagcgagcgggttccccctgaccggcccggccggcgcaagggtgggggtggagggggaatggccgcggccccgccttatagttggccctccgccagcgccgccattttgttctcgacggagatggctccggctgggcgggctcccttcctccttatcctcctcctcctcccgcctgcagtcccttcttccttctctgccgggattttcacccctccgcttctagtccgcctttggcggccgtcgcagcccaaccgccgttttttctgaaggggagggtaaaagaaaaggaggaaggcgggtgcgaggcgcgacctcgtgagcgacggatgggctggctaattggcgcccagataggagggccggggcctgtggcaccgcccccctaagctttgctgattggctgaggcggaagagggtggtccttatggggcgcgggagccctggcggggcgggagtagaggccggggcgaagagtggggccgggtcggcgggggcggggccgggggcggggcgcgaggggcgcggccgggtggagaggccggcgcctggtcttgggtcagcaggtgggctgcttccctccgcctggaacgcgtctcgaatgagtactgaggaacaatagtaataaaggtgatgaagcatttcgagtccacgatgcgctctcgtgggaagaggttttcggaaccaggacacttttcagggctcctgctcgttatttcgcagcggccttggcgaatcccctaatgaggctcaattttatcgactgtaaatggggggcatgcgcattcttgccaggccggacctcccttctgagcattgtttgtggggctctactcagaaaatggaggcaacgctactttgcgagcttcagagtcacttgaaaatggtgttattgttaaaaatgggattacagccaccaggagaggcaagcgttaagggtatttggggtttgagagagcacaattcgggagtgattctcttctcattcgttcgctgaatacatgttgacttagttttttaggcactggggacacatctggagaaccagctgtacaagacccctgccctcactagagttgggggctggggggtgaatagacaaataattccagagagtcataagttctgtgaaagaaaagaagccaaatgacctgctgaagaagacctgaggcgttaatttagatggaatggtcagggtggcctctctgagtaagtgatgtttgaacagaggaacccaagggaggaatggcattccagacaggacatcccgtgtaacggccctggaggaagagcatttgatgtgatcgagaactggctgcttgtggctggagagttggttggaactagtaattgtccattatcccactttgtttccaagccaaaggctgtgaaatatagcaacggtagtgaggaacaaatcttcaatgtaataagaaagtcgaggaaaatacagccttcatatgaattactgatgaatacatgacttgggaggagggcctcagaaactcactttacttccagattcaaatccttcgtcagcctcttatatac

SEQ ID NO: 9927 - DNA, 6000 bp, Homo sapiens
acttaaaatgatttaaatggttaattttatattatatgtattttttaccagaataaaaaatgttggctgggtgtggtggttcatgcctgtaatcccagcactttgagaggccaaggtgggaagatcgcttgaattcaggagttcaagaccagcctgggcaacctagggaaacccgtctctaccagaaaaaaatagctgggcatggtgacatgtgcctgtaggcccagctactcagaaggctgaggcaggagaatcgcttcagcctggaaggttgaggctgcagtgagccatgattgcccccactgcactccagcctgggcaacagtacaagatcctatctcaaaaaaaaaaaaaaaaagtaaagactgataaattgtaccttataaaaataaaataaatacataaaatgtgactagcaattttaagacacttaaatatttgaattaatttattgaatacctgctctgggaattagtgttgtgtttccatttacagagacaaaacaggtctaattgattgactaaacaatagatgtaaatgtggtcagtgtttggatgtctattcatagaataggaacaatttttctgagaaatgatttgactctcagctgtttcctgtatgacctctcaatttacattttattcaagagtttctaatataatattgtggagcaaagaaacttgacagcaacagctgttgagagaaggtaactgtcatattaatatttctgggaagaggtattgcggtgttaccagattccagatttgcaccttttcccctcaatccctttatccctctcaaacattatagtgatttatgaaaatatatgtataattccaaataagttttagataattccatatataccaaatacccaattatctctttgctgtcaaagggtaatttatcctcatcatgacacttgccatcattacaagtttaaagcctaaaaatgaaaagaggtttcacacatttaagagctaactcatttaataataaatcaaaagtaagtatgagtttcatttagtagtagcatgagctagctgcagggaaggtcctctcaaggtggtcctttttcttctcttcaataaaggcagaactctattaaagcatattagtaaaaaccatatttaaaagaattactacactgaactgagcagccaccaaatgcaattggtaccaggtgatataagggcttctcctctcagggggcttataagcaactaaggcaggaagtcacagataccatattctgcagtgtaatttacaaatgaggtgaaaacaaagtgttccaaaattctaagagagacattggaattctgaccacaagtgtaatttatggagcctcagagtaattataggatctggaacagctggtgctcaaatttagtggtcctccagttgctggaatctgcgatttctgggaagttaaactttgtgtcactgcttctacttgtgataaaatgaaaccgctttcaaagagaagattcctattcctagcctttttgggtaacttctactacctccacttaaggatgaaaagggagaagtttcctccaagactgcctcatggggatcagagtgtcacctccatgctcctgccctaagtgcccctgagcacaccccagagggaggctaagagatttttgagaaagaccatgtgactggctgataaacacctattttcctcagattccacctgaatttatatcatcagtgcatcactcttttattttgttctctctgttcctctttttaaatattaatattctctggagaggggtaaaacattaaatgaattcacactgaggaaactggccaggtacaatggcttatgcctgtaatttcagcaatttgggaggccaaggcagacagattgcttgagccccagagtttgagaccagcttgggcaacataatgagacctcgtctctacaaaagaaaaacaaaaaaaaaaattagccaagcatggtggcacacacctgtagtctcaggtatttgggatgctgaggtgggaggattgctttagcccaggaggttgaggctgcagtgagccatgaccatgccactgcactccagcctgggtgacacagcaaaacactgtctcaaaaaaaaaaaagaaactcttcaggctgatcagatctgcttttctctgatgagtttcttaggagctctacatttctggttgctgcaataggcaaagtatagaatggaggtcaaggcctcaaatttctctgacttcccagctgggcttgagagtgactctggccctcaactgagggcattagtaagctgtccttaagaacgagagtgtattttctggctgtattcttaactcatttcactatagagccatgtctgatattaacagtgcagtgctagactagagaggcctggcactcctacagccttctcctgtcttctagctgggacttcacaccacagacccaaaggaaaagagacccaaagatccctgcagaaacctgagaatatttcctttacctcagtggtttcataatctgttcttagtttcctgtttctgctgtaaataattcactatatttttaagagagagaaggtcaggcccttgtgagccagaagggatttgagagatgatgaaagctacgtatgttacccataacctaaggacttctggcaaggtggcctacctgagctggagtcatgccttttttccctggacttggagatacctgtcagtgcagaaaggcctacttttgatcttggaaataagtttcctggggtgagttcttaaccctttccagctttcccaccctctttggctttagccatggccttctgatctgtgtttctcaggggacctgcaggccccagatatagccccatgctgtcctcctaccccagagcacactgttcaggctacttccactggtactgaaatccagtatttcacttactctttttctttccaatatcctcatgacattcaatatttcacttactctaggtcctccctgcctaaggcccaagtcaactttctgtccagtgggatttgtaatccaatacctcctagccctagcagaatcccatgtggataatcagaaatgtgactggaaaaaggacagagctctatggctgtgggtcccagtccccactgctggcagtaagtccccagcagtgagctgtgtaagcaccttacattctgcgcttggttgaaaacagcaaggcaagcatccacttgagaaatgtcaacccctaggaaatcccagcctcaagtctttctcatcccttgggaagtgcaaattggatagagaagaaaccaattaaaaacaaaacaaacaaatcatacttagatattctggcttttctcaccagggctggattaaagcatgtacttcaaaataataacaacttaagtcaataaataaatgtaaggaagtccaaatgttcacctgaagacaactgtggtcattttttggcaatcccaggttctcttttctacctgtttgctcaatcgtggtctccctctccctctcttgttggggcccatgcccctgctttactgttgccagaggcttgtacttgtttgccttttaggtaggagcagttacttccactcccctcacctgccataaagcatctttataaacaaagcaagtagaagaaacacatcctggtatccaccacattcggcttttgttgattctgttcacttgggagcacctgctgctagggaataagaaggttgaggctgaagagtgaggactcttcagctcccctctggcaggacccgggagaggaaagagccctcagctggtccatcctccccactcctggtcagccttctgttctgagatcaaagtggtggggtcacattctcgagaactgtgctcagccccctcatctcacaccctttccctctccctgtgtgcctgcccccctcttacataaccatgctggtgattggcaccgtcataaatcaatactttgctcactttcacatcaagtaacactatccagggaggtggtttcaacaaaggaggaagtataaggagatctaggttcaaattaatgttgcccctagtggtaaaggacagagaccctcagactgatgaaatgcactcagaattacttagacaaagcggatatttgccactctcttccccttttcctgtgtttttgtagtgaagagacctgaaagaaaaaagtagggagaacataatgagaacaaatacggtaatctcttcatttgctagttcaagtgctggacttgggacttaggaggggcaatggagccgcttagtgcctacatctgacttggactgaaatataggtgagagacaagattgtctcatatccggggaaatcataacctatgactaggacgggaagaggaagcactgcctttacttcagtgggaatctcggcctcagcctgcaagccaagtgttcacagtgagaaaagcaagagaataagctaatactcctgtcctgaacaaggcagcggctccttggtaaagctactccttgatcgatcctttgcaccggattgttcaaagtggaccccaggggagaagtcggagcaaagaacttaccaccaagcaggtatggtttttctttctttctcttttgctgggggctgaccgcccttcagctccagccaaaagatgtgtgtgaacacaaatataccttctgtttgaggtcagcatcatagtgggtcgtgaatcatgttggccttgctgctgtctcctcatttctagggtggaaaaaaaaaagcatgaaaacaatcacttaatgttgagccccattactgatgctctctggtcctgcactagcctcctagaaaaatcaccacaggagaagccttaactactgcatgagttaccacaagtcacacatacaaccagctccctgttacagggctggagtccctggacccaggaaataccacctccaaggactgtgggagctggggactatgggaactgggatcaactcagtcctgattccttttggcctgctgggttagtgctggcagccccctgaggccaaggacagcagcatgacagtcaccaggactcaccacttcaaggaggggtccctcagagcacctgccatacccctgcacagtgctgcggctgagttggcttcaaaccagtgagttttctacctctactattgaaagggcaccttgtcccacagaaccgagtcttgcctgcatgtggtcagtgccaccaggtccttcttctctccactttacagcccagctcggctgaagctatggccagaggcactgctttaaggccactccatatctaggacaggtcaacagacacctctgaggccactgagtcttgactcaatgaatcagctatagcaggcactattcctctcccacatggcctctaatgatatggtcagagttgaaaggatgctaagggaggcctcagaggcttatttaatcagttggttaatgggaaaaagtattttgtggtacacaaatacgctttaaaaatattttagttatgtcataaaagtctaaacctggggttgacaaactatggctcacaggctaactctggcccaccagctgtttttataaatgaagctttattggaacacagccatgcccattcgttatgtattgtatatggctgtttttgccctacaacatcctttcaactctggccatatcattagaggccatgtgggagaggaatagtgcctgctatagctgattcattgagtcagcaaaattgaccaattgcgaaagagacagtatggcccacaaagcctaaaatattaactatctggcctttaacagaaaaagtttgccaactcctgatctaaaagctgtcaacttgttccaaaattattatggaataaacccaagacaaccacaaaactgactagactaggttttttaggtaataactttttaaattataaagtaatacatgatttcatgctccttgaaaatgagaaagcagtatagataaacctaaattcacctttggccattc

SEQ ID NO: 9928 - DNA, 6000 bp, Homo sapiens
gatggtagagaaattacgtgaagggtgtggccagtatgcttaatgctcaggccacgtggctgttggcatctaacagtgtatggcacccatcacttcaatgagacttgcacaggaactgacagatcacctctttggtgaatccacaaatatagtcacaaaatatttgtgtattctttctcctgtttcaggccgtcactatggggctgtcagttgtgaaggttgcaaaggtttcttcaaaaggagtgtgaggaaaaatttgacctacagctgccggagcaaccaagactgcatcatcaataaacatcaccggaaccgctgtcagttttgccggctgaaaaaatgcttagagatgggcatgaaaatggaatgtgagtaacaatatttaaaaaccacatgagttaatgtggagggagacagtaaatgagtccattaaataaggtttctatacctggccttaaaatactttaagaaaaaaatatgcactcaggcttcattttggtttacctcatgggtcagccaggtgattgagagccaacgctgcaggggttggtctcttcctgctgtgtgtgtggaaagccttattacagatgcatcaggaggcagcttagtggagtgggttgaacacaggctttggaggaaagctgataccaaatctacctccaggtgtgccactaagagagagctatgatgcctgaggatacacgtagcctctcagccacagggtcctcatctgtgatctacttaatcaccttacttatatattgctcctgaggattacatgagcctactccctgtcttcttagcccctctactttcttttgggataaggtcctttgccaagcctctgtgtagctgggattctaaagagaaagctattgctcctggatgtgtggggcagccagggaaggtctcaggcccctcctttccactcccatagacagaattttgggggttttcagggaccagtcagcatggaggtcacttccctagctagtggtgaaaacatgaagaccaggactcaagatgggcagcacaaagaaatccaaggagagtggagttaggcttaagccacagtaggaaaatggagcttagcagagcaaggcatgcaacttgcatgcaacttgcatggcaaggctggtggccgaggacccaggactgcaggcttccgctgagtatgctgcatggttctgtcatcttttgcatagttttctaggaactctgaaaaccaatatatttcagtattgctgttgacgtttctgggaacaggaatccacaaaattcactggagaataaatggaaatgtattttttgagaaattagaaatatcaacctaatttctgcctggtgtgatgtttttattttatctaatgatactgctctttgcccaaagtgaataaataaatcactgacttggtgtgggactggcccacattgccaagctgtcctttttctcaatgatgaatatttttactcagagcaatgactgaaatcagttttcttgtgaacacagctgtagctgcaaacacaatattcaactggatagcagtttgattagtagcatatctgaatattagtccctgaccttcatcagttttgtctttaaaaagctttcattttcttcagttgcttctaacatgcatatctgctcttacattagactgctaaaaggagagtttgctagcataatataaaattgacacccattaaacagtttgcagaagctattcagacttgagttggaaattagaagggttcctctacaaattgtggcataggaaatgcattctattaagggcccacttgaaggtgggcatttcttttttctttttctttcttttttttttttttttttttttgaggcagagtcttgctctgttgcccaggttggagtgcagtggtgccgcgtcttggctcactgcagcctccgcctcccaggttcaagcaattctccctgcctcagcctcccaagtagctgggattacaggtgcctgccaccacacctggctaatttttgtgtttttaatagaggccgggttttgccatgttgggcaagtgatccacccatctcggcttcccaaagtgctgggattacagacgtgagccaccacccccggcccaaagatgggcatttttttatccttgaaagagtctattttgttagcagcatgaagtaaaaaccagctgggcacggtggcttatgcctgtaattccagcactttggcaggctggggcgagtggtttgcttgagcccaggatgagtccagactgggcaacataatgaggcttcatctctacaaaaaataataaaataataacataaaataatagcataaaattaataaaatggcccagaaggctcatgggtgcttccataggccacataggtgctgtgctgcagttttttttagcagggaataccacccatcgtgaggtcttttttatgcctctagatttgacatggcatggtttggctttattccttctctctggccgaaaagtccactgtgaaagctgagctagatgaacctagcaccagagtcatcctccctgcagtaatggatttggggttttcccttgtggtttttattgattggaattgtttctctaaacacaaatatttatgttgtgatttaagctgtgcagagtgaacggaagcccttcgatgtgcaacgggagaaaccaagcaattgtgctgcttcaactgagaaaatctatatccggaaagacctgagaagtcccctgatagctactcccacgtttgtggcagacaaagatggagcaaggtcagtcccttgttctcactgcaatcagcctttgcagctgatggaggaggcacagacgtgtcccacagcaggcactgttgtggcttcccacccatctgccatagcctccagcgttgtgttgcctaattctgccccttctggagctgctcagtcacacctctggacaggcctgaggatgcctgatttatgaaggggtcagaaattctcctagccttgaattcagattatgtcctgcaatttaggcatcattcatacggaagacaattattttatgattcaagattggggcatttctgcagtacacacaaaaggcccaaggtgagataaggtctcagtgctacagttaatttgtatattctttttaatataatctattgaacttactttaaaaggaacggaaagaggggaaaacaagcaatccaaaatgtatcagagagagagctggagttgaggatgccttgctgattttctgaaaatcaagttaacttttctaggcagaatggccacagtctgcagtcatcctggaaagccctgggggatgcatctgcatttcatcctgtctcaagctgtaaacctgactttatgtatatctcattgcagagagacaggggtgggggttctgcttagtcactaagcggctgagtctacttagagcttttctactattcagacagcttcacaaatgtggaaggacaggtaaatgcagcatgatcatactgtgcataaaatgttggaagctactctgagtttctttatgtcttaaatagacaaacaggtcttcttgatccagggatgcttgtgaacatccagcagcctttgatacgtgaggatggtacagttctcctggccacggattctaaggtgacgttctctactcatgctctctctcatcctttatgttgacattgcaggctgcttctctaactgtgtgcaccactttcttcctggccttcagagaccacatcaaaagcatgacctatgtctcggtctccttattgttgtgatagctatcttgtgatttgttttagagatgctgatggcttctcagatcagagctggctggtcataatcactgtaacatgtcagtctagatgtcaatttggtggacattcagtggttctcttttctgttatagttttctttttctcttatacacattggcaaactactagccaaggaaagaaatacttatcagatggcctttttgcaaaagccccgggttcctttttattagatgatcttcaggaggaagctcagccaggaatctatcagttccaaaactttgctagagcagatcagtcatagggatttaacttgtggacagagatgttcgtcagtccaaaagggggagacttgctggctcctgtgaagataaccaaggagggggattttttccaggccagggaactcactgtttgtctcatcctggtgctcctgatgtaaaccaagtaatgaggaagtagtagcagcaagccacaactctaagagggtgacttggtaattgagaacactggcattgctgcaaccattagaaccagagcaaggcctgcaggcttcctcctcatctgttcacagtctcattcatgggtgtactcagggcattacagggcatcctcttttgggaaagagaagacaaaatttagagcccttgcctgtcatggagagctgccctgcatgccttggtcctcaggctgggccttgcaccttctgtctttgggcaggggccacatgcatgatgggagctgatggatcacgcatcgtgggcttagcttatcagcagcacacattctagaacagtggctctgactgcatggtcaaatgcagagaaagcgtaagcctgaaagtaaggcccagataaccttaaaaacagattaccaagggattcacagcaaccattctattgggccatccacacacagactgggaatgagaaccaagactccagaactggctagaactgggttcagagtctgacagtgctcttcgtagccacatgcttctttcctgcacttgtaaatttcttggtacacagtgagcattcaataaatgttaatggttaggaattagttattgtcactttggaggagaatgaccacaaagctgtatggtatttcaggaatcaagagaaagagcttcagaggcagactgtgtcctaccccattccttcctgtgtacaatggaaacaacaataccccccacagaagtttgatacgaataataaaacatatgcaaagcacccacaggaagctactttcagaaactgttttccaattttactttgaagtaattatacatttaaaataatttactatgaaggaagtacagtgctattacagagctcccacatagccttcgcccaggtcctcccagtggttatgtcatacatacctacggtacagtatcacaacgaggacattggctttggtacaaaccatatgtattgttctgtcttttttatatttcactcttcttcaacttcatttccttcaacatacctttctgttaatgaggatcttacagtagctgcacagtattctatgtgtctgttgtgatttaatcatttctgtttatgaccttttctactgattctagtttttcattttgtaatcaagacataaccttgtgtgtacatatcttggtttgagtatatctctggctttcttttctttttctttttctttttttttttgagacagggtcttgctctgttgcccaggctggagtacagtggtatgatcttggctcattgcaacctgcacctcccaggctcaagcaatcttcttacctcagccttccgagtagctgggactgtaggtgcacagcaccacgcctggctaatttttcgtattttttttgtagagacggtgtttcaccatgttgcccagtctggtcttgaactcctggactcaagcaattcacccaccttagtccctgcagagtgctgagattacaggcgtgagccactacccctggctttcttttttaattgaaatataattcacatgccataaaactcacccttttagtgtataatgtagtggtttttggtatatttacaaggttgtacaaaccatccccactatctagttttagaatattttcgtcacctcagaataaaccccaaaccctattatgtagtcactcctcctttccccctcttctcaaaccctaccaaccactaatctgctttctgactctatggttttgtcaactctgt

SEQ ID NO: 9929 - DNA, 6000 bp, Homo sapiens
attacaggcgtgagccaccgcacccagcctaaaattttcattcttaatggaacgtcatcattctgggcacacataggtctgacagtttcatgttacaaaccaacaaatatcctgtctttgacacaagccaagtgcagctggttcttgcaaaacaaaacaacaacaacaaaaaagtaatgaattaaaaccaacataaaattagtctatctctctctcactctctctgtcacacacacacacacacacacacacacacacacacacacacacacactaaccatcctgctgcatcttctacttcccctgactccccacagccaatccctccatcatccccagatcagtgaggcttccccaagtacacaagtgctgaccagtgtccctcctacacatccacacacactaaggtttgcagataaaatgcaggatgcccagttaaatttgaatttcagataaacaacaagtaaatttttaatatatctagatattgcatgggacacgctcatactaaaatcattctttgtctattcaaaatttaaatttaactgaacatcctgtatttttatttgctaaatctggcctcatctccatcccttcccggaagtatgggctgtgaccaaattgtcaccactttcattcctctgggccccggtaccatttccaccctggcacatcccagttcccaggatgatgcatcttctctggaacccactccaaatccctgccctaccaagccctgcctttggaacagcacccactggaattcccactaccatgttctacagggctgttgctactcctagcttttccttgtcaggcagccagagcccttggtcaccggtctcctctccactggtgacctctatgtcactgaacccctctctacctgcccctccctgtggtggccctgattcactacaaataaatttctatacctccctgataaatccccaacaagacagcccacttatattcacattagccaagataaggattggttgcattcataagccaaaatgaacaccagaaggccaaacaatgcagtcaagaacttagtcttacttatttcctaagaagacacataactaaatggaaaaatatctaataagctaatcaatgaattaatagttgcacaaaacataatttatctcagtgcctgcaattcaaccacataagcattcataatgtcaaagctttttttatttcctccaaatttatcaaggtcttatttaattgctataaacacctaaagacatgagcaaattaacacataaaattgcagattttagctgatacatattcatgaatgtatgttgttatgatcaggcaaataatgacccaagacattgataaattcggtagaagaaaaagaaaaacacagcacactgttagaattctctgcagatcacagaatggaatctttgattagaccagctctaagagaccattcataataattattgtatttccgtaattcttccaggagagagatcagcaaatgtttaatcagtaagctttgtaaaaatactatccccaaaacactggaaagctagatcagtgctaaagaatcctggcttcttggaaggctaatccaggccctgtttctcagaatccatctcacatttcttcctggcattcttgcttctctatctactgccactcagaaaggactgacagttttccaagcatttgtgggaatctcaagttacagctattttgcggtcttcaaaatgaatgtattttatttagatggaaatatacatcatgggttggctcacccagagtggctgcagtgtagttattttttaatccctggcctgctaacccttctcgttagagcccatccatacatagctcctattcattaaattcttttgctctcacccaagcaggcagtacccctgtgagctggaaactacatttagtcaaaacatgctggactagtcccgacaaaagtatttgagtaaatgcctaaggcagacagtgaaactgagaggtaaaggcatgggctgtgacaggccctgcaaacagctttggagaaaagggcatcattatgcagcacacacagaggaacacttattcatttcagctgagcccaaagcaaacctcagaatccttctcaacacaatattttagtcagtcatttctcgtcaaactgaagcatgaagcacttcaaagttattcgcctcccctgttcagactgaggtcaaaaaggaagttgagccccagaatagaaaaataacaaccccacgaaacaaatatgttttaagtatttactatgtttcagaaactattgcttatatacgttaactcaattgttcttcacaataaacctatgacctaggaggtgaatacatttgtgcaactaatactgtcccagtttgtaactacttgctcaaagtcatatagaatgaggttgaaggtcagtattgaaatataggcctatttcctcaacatcatgtactcttagccattgtgctgacaacgggactaccattaaatcgggagaaattgactgctgcttatatttatgatttcaagggataataaaaaaaaatcctctctgctcacatcttcaagctctcctcctgacacatatttgtttgctttaaccagaagaaaacaactggttgaatagagagcatgaaatgagtctcacgctcagtcactgcatagtgctctggctttgggtaaatagcttagcctctctggggaagactgttataaggatatttgccccacaagattgtgtgagtattaaatgaaatatgtaaagaaacacattttgaaaatggaatgaggtgtacaagcattaattactattattaaaatccagaattaaataaaagcataagaattctcccagaagtatttgcatttagagaatggtatttacactgagattctgagtggagttgggaggagagtgggagatgaacacctaggggtcagtgggaagtggtgtgaatgagtctgacaaggctggagatggagagaggaggtgcgggctcctactttccatttgtaaccagaaatagtgatgtggctagaagcatcatccgcagatacacaggctagatttgtgcactatctttgtcagaaaattcccaggctatcagacactttctaattagctcttgtaaaatacagatgggataattagagagtagttattatctgaggagatgaagacacaagcaaaggatcctttaggaagtgctgggagtccgggagggagccggggctgagaacaagtgtacatactccagtccttggggcttggtcagtgtagaccaagggagggaaactgtgagtttcccacatccacatgactcattgcccactaacctcaaaggcagcctatggactcttatctcccttttgagataaagtcagtccaattcttcttgtaggtcagtcaagccctctggggtgagaggagttggccgctgtagtccagtggcattccatctctccctgtaggcacctctcacattccatggggtgcttgggttatttgggcactaacctagtacaagatgtgatcatgcaaccccttcgagggctttttatatttgtctgaatcactcacagaggctcgtctggtagatgcttcataaggtgacttcagttgaaccagataggattgaattgaactgaatttgaatcagttcaactggttaccttttctaatcctgaatcaggtaagatcagaggaattctgttttgctccggccactgcctcataccagccctctcttcacatgcctgatcggtgaatggaacacttagtctgtccagtttcaaggtgccatctttgatgccactttttcttttccttctttacctcccatccacccattgccaaatcctgttcatttttatcccatgctcaccttgagaaaccatttgcttctctccatctttgccaccactgtccttggccaagccatcaccatctgtcaattgatcactagtgtagcctattctgtaatctccctatatctattcttgccccaacccctactgcagtctctactctaaagctaaagtgattttatttttttaaatagaaaaagaaaacaaatcacaacaccagtattatcatattgctcccctggtaaaacccctaagagtttcagcaccatcatgataaagataaaagtccttgaagttgcttatgagcacagcctggaccctctctcctgaactgctcacgctgctttcatcactggatcaccattctccaggtttcactcagccattctggcctttgggccattccccaaacgctctgtgcttcctcatattgcgcacattgtcccctcagcctgaaatctctccatctgagcccccacatttccctacttaattgacctcagtaaagatggtttttgttcatgcgatatcaggtcttacagctatcctctctcctagaatattcttttctttcttcatcatgcatgtgacaatttgtaggatatacatgtgtgattatttttactgtcatttttttcccatgaagcaacaagccctctgaaaacagggaccatgtctgctttttcactgttctgcttgcagggatctaaaatgggcctgacataggatgcagaacaatagccatttgttattgaatgataagggaatggaatccactagctcttcaaactacagaatggtcacccagaaagcaggggcatgatgggtaggtaaaacccatccagctctctctccacctcccctcccatatgtagctgactcatattgcctcagaaactttgggtttacaatgtgcagtgatatttcaaaggtgggtgacaacgctacaggccatagaggtactcagaatggccactgacaagtttttatggttgtgtggagcatttcagaatagttcatgttttatagagcaatgttgagaacaattcgtgtcacccagtcattagaatccagatcctaagggtatgtcagaggccagtctttacccattgcatctcctggcttccacaggaggccagaaaggaggttacctagttctgtttaaatgcctcctctgataaagaaggagctcatgatatctgtgccactgtggaacagctgcacttgttagaaagttctgacttatgttgcactgatgtctgccttacggtaaccacacacatcagctatggtctgaatgtttgtgaacctccaaaatttataccttgaaatcctaactctgaaggtactgatatgaggttgtaaggctttgggaaggtaattaggttatgagggcagaactctaatgaatgggcttagtgcccttataaaagagaccccagggagctgccttgtcccttccaccatgtaaggacacacctagaaggcaccatctatcaaacaaaaagcaggcccttaccaaataccaaatctgctggtgccttgatcttggacttcccagtccctagaaatatgagaaataaatttctgttgtttataagccactcggttcatggtattttgttatagctgcccaaacagactacaacacacatatcctcatgttctcgaacccacataccaaatatcccaaaatgctcttccacaagacaacgcttcagttatttgaagaccactggcaagccacatctgaagtcttcttatctatattttatgctttttccagccttgattttttatttatggaccacatcttgctattttattgcatgcattcttataagctaccttaaatcctgtgtggaataaggccatatataaataaattgttgtttcttttttttaggcaacaactcaagctcaccactcgacattcttctcactaagcttacttgattacctcagttgtattctctgatcatgctgacactagaatagcattacctctgaactcgctcttcatctgagacggttactgccaagtctgcagcagggtatctgggtacagtatcttaggatgactgggtagagtttgagaaaatgacagcaggcccatcacta

SEQ ID NO: 9930 - DNA, 6000 bp, Homo sapiens; identical to SEQ ID NO: 3395

SEQ ID NO: 9931 - DNA, 6000 bp, Homo sapiens
ggcttcttagggaaacacaggaaacgtgagaggggcatgaaaaaaatatagaactgagacaaaatagtaggtttactccaagtttacaagtagcaatatttaatgctttggtataaatcgtctttattacagagaacaactaccaaataaatcattgtgtggaaaagaattgatttgggaatcaattgtctgggaaagaaaatcacaaagaagtgattgtgaagacattcatttgttcttcagatatgtaactgtttaatctgaagtaaactttgggatggaaaactattaggaacgtttcttgcttaattttgccattgtacgctctgatattgattgttcaggattattgagcacacatgctgtaatgagaattgtatataatttactatatatacttacatatgatagacattaaaggatatatgtgtctagtaatagcagatgcatgtttctgcccactaaagaaatggttgcagcttttaataaatatggctaagggaatgatgttaagattacgtgtgtgtgtgtgtgtgtgtgtgtgtgtgtgcatgcacatattgttctggatttcaaatgagtatacaaaattatcattatcttacaccacttgcattgggatcttcagtttttccttcaagaagtgaattattaataatatatttaacttttagagtattattgtggtaggactcgccagtttcttgctacaacatctattcatccctttctctttagaaacaaactagaatttttatattgcttcccataataaaaaacatattgccttccagattttgcagctaaatttggctatgggactaaattctggccttgagttgtttaagagagatacttgtgagagttctctgaagattggtcaaaggaaactaactcagatggaagatccatttgccctcctgcctttcctcttagcttttagcctgaaaatcagtggtgatggctggagagccaatagccatcttggaacacgacgtgattctgaaggtgggaagcaaggctgggatggtacagaataaagataggaacttgggtccttgagaaaattgtggagccaccatatctacctgtaattcctactttcagacctttttctatgtgtgagagatttatcttatttaagtcattgttatttttgttgttaatactgttgttgttaagctagcattctagttgagcccaagctaggactcagagtctggttatatctgatgagcccctggatcagcatccctcaatgccaactattaaatgtaatgggttaatgatgaatggaactctatttcacgtaacaaagaacaacttgttatgcccaaatattacgaggtcatattgctcttatttctctctaacctgagatttgggtccgtgttctctatgagaaattagaaatttctgttgtggtattctgtttttgtgttaggatcgtcactgtaaatctacttaatagtaaaaataaaatcttgcttggaattgtgaattaaatgaattctccattgtgcagaaacaggaacagcattatattttgtatgtaatactcttaaacagtcaattcatttattcaattaatatttttgagctattatgggttacataagttatggaggggctttgttatttagtcaactcatgtccaatatcacaggggtcagttgtgaatttggaaaaaatagaagaaaagaaaaattaaagcaaatgacaaaagtctaaatattttcctcaaataattgtcttttttttccttaatgtcttgtgtttacagactggaatttaagccgcatttttctagatggcaccagcctattggtacatatattaatgtcaaacagtaatgctcaaattacacgggttcacagctgtttctacataatttcttaagtattcttgccacgaagtctccccctcttttctgggagacctgggggaagggtctcacatgtccttatgaccggtttgctcacattactcacttactagccacccttgtgcttacaagatccttcatgtaggagcgccaccattctgtcttatgtcaggatcttccagtagaacactgctgtcccgtaataaggccatatacatgttctttctaggttacaatttcccacactgctaactgatgctgcattcactttaaactgcaccctactggggactgacttgttctatagaaatgaggtgactgtttctctagccaactctgtcagcttgaagtactactgcttatgtcctaaaatctcttatggaaacatttctttgtcttcttatttatagtcctgaagcatgcatcttttattgtgctttatctcttgtgtctctactggaggcacccggggtttgaagttttatcccagcagttatttattccccgtgcacatttactttttctaataattggcagggaggacttctactgctccatcagtttatgagagaaaaccaaactgaatccgagtttcagctcaactgggaaccctgctacaccagaacttaacctggattccagattgcttgataaaatagctagttgatgataagctataatttcttgaccacacacacacacacacacacacatgcgtacatatgtacatacagcagttcccttcatccacaggatatgctcaaacccacagtgcatgcttgaaatctcagaaaatactgaacgctatatatactatgagtattccaatacatacatacctatgataagtttatgaagtagtcacagtaagagattaataacaataactattaataaaataataacaatatgctgtaatacaagttatataaatgtggtatttttctctctctcaaaatatctttttgtactatactcacctattttcaaaccctggttgtccacaggtaactagaaccaaggaaagtgagatggcaaataagtggtaagggatgctaccgtatctcacatacatatatttcaaaatacgtcaaaccatacacctcaaaacttgtaatttatatcaacatgatatgcttgataccataggcaatgccattttctcattaactcatctctttcagttgcaaaacaccatataaaaggaatggcacatgctataacatgtattttgggtattttacatttatccagatatgaatataagtaatatacttagttataatgttcccttaagccactgttttgctacatgcttctacacattaattcttttaaaatttattttaaaggtaacacagtttttttcttttacagtctccccttagtaaatgtagctactacgactatgagtaaaagagatatggatgggtggaggagatatggagaggccagcacttttgtagataaatgcaatgtgaaaacaaggaactactctttaattactggcacagaaataatgacaaggaaacaaaattacttcctgaatcacactttatcacctgactggttgcaaaggcacattttttttctgttttcgtcaaattaaaatcttaaccatgtaaattcaaggctgtaaaggaaaactcaggatccttcatagtaataattacagtattaaaattcttagttgctagaaagtggttagaaccattgagaaacattttatcaggttacgtggttagagcaagatttgaaaaaacaaaatcaaaaacaaaaaacccaatgtaaaatatcagaacatctgagatgtccaagctgaaaagtgtaataaacgctatcaactgtagtggaaagaaagttccaaagtatgaagtccagagcaattgttggtagcatgagtggtgggattgaagtaaactgaaataaatggaaggcatttgtttaacctatgatattgctgaaagacaagtcccagcacagtagctttctcctttaaagactagccagatgtcggcctttttaagagcacaaagaagggagccacagaaagaggtaacaatgctggtagagaatggcagctacagtaaggttgtttttaaatggatagaaatctatgtaaaggtgactccgacaaaacacagtagctgtctcctcctcagtcatttaggcagaaacttgcactaagtaaaaaggtgcaaggtatttatcagcaattcccattatctggtacttttattgctttggcatgattagcagagactgtttggccagcgttgtcaactatttgctttttcatcagcctgatgtttggtctgcaatccctctaaaactaacagcaaaagagaaactcggaaacttgggaagtttcagttggcattcagatgtcaccccagcctactctctgtgagatttattctgcattttagaagctcagtggctgttgctctttttgatagccaacaagaagcaacgtcatagacctgtttggctgctgtcctgggtagaagggtttggcagccctagggagatgaatttctccagcgttggacccgcccagagcggagaagcaacacccttccagccactactctgttgctatgaaacaaaagactaggaaggtaagcgaagcaggaagtcccgcctttcagccccagatggctttggctcccggtcccgacgctcacgcccacctgccaccccttattggttagctccttcgtgccttgcatcccttcgtccatttcctttcccgtttccactttcgttcccgggagagtccaggcccctcatttctctccgagtccaattcctttctgacgtgctgcgagcgggccttcctctggggccattgtgtactgtggaggacgtggacggggcggcagcgcgaggaggacgggcgcctcccgtccattggctgcacccgctgtcgggcagtgcgcggttgcgcggcattggctcagcggcgcccggccccgcccccgccccgccccgccccgagcctgggtcctgtgtgtgccacaggggtggggtgtccagcgagcggtctcctcctcctgctagtgctgctgcggcgtcccgcggcctccccgagtcgggcgggaggggagagcgggtgtggatttgtcttgacggtaattgttgcgtttccacgtctcggaggcctgcgcgctgggttgctccttcttcgggagcgagctgttctcagcgatcccactcccagccggggctccccacacacactgggctgcgtgcgtgtggagtgggacccgcgcacacgcgtgtctctggacagctacggcgccgaaaggcaagaagggaaggggtcgccggggaggctccacacttcttgccggcccgggggcccggggtagccaggcgcgggccaaggaggaagaggggacagccctggctctcagctgcctttgccgccgccgtccagtttgaagtggggcatttaaagaccagaacccgcaggccggggaggagggagagggcgtccaggcagacggcggtgaggactgcagcaggcggccgggaggcgcgtccacccaggcgccgagcccacagtgtccctcccgcgccctagacggacggtgctgcgggcacgggagggacactttgtcccctcccagtccaccttcctcctgcagctcagacccgaggggccgggaaggggcctgagcagggaagggacacaggcgtcctgaaacaaagctttgggttgagggcagaggcgaggagccagagaagtgaactcctcctttccgtggccgctcttgtcatttttctcttttctcttttcaaatgggctatttgtgtgttaatttcatttggttcttgggaataacgactcaccgcgttgatttaaagaaaggtgttcgtgtgtccgtacttggtggttttagtgtgggacatgccctgcgcttttgttgacaacagagctgtcccttacgtttgtgtaggataatctttatgtttatgtaacttggagaaatctaacagagtgaaagtgaagtttctgcgtaaggctcccaaaatgtatgataggaccttcagttgttctggtattttgaattggaattaaggcaggaggggaagaacattctgttttt

SEQ ID NO: 9932 - DNA, 6000 bp, Homo sapiens
gtgttttgtgggggttctctgtattcctgaatttgaatgttggtctctctagctagatttggtaaattttaatagatgatatcctgaaaaatgttttccaagttgcttctattctccccatctctttcagggatgtcaatgagttgtagatttggcctctctacataatcccatgtttcttggaggtttgtttgttccttttcattttctctatttttattcttgtctgtcttactttaaaaagccagtcttcaagctctgagtttctttcctcagctttttgtattctgctcttcatacttatgaatgcattattaaattattttagtgtggtttcagatctattaagttggttacattcttttctatactggctattttgtctgtcagctcccgtaccattttattgcgatccttagtttccttagtttgagtttcaacattctcctgaatctcaacaatctttgttgttatccatattctgaattctttttctgtcatttgagccatctcagctgagttaagaactcttcttgaagaactagtgtgatcatatggaggaaagaagatgctctggcttttgtagttgtcagagttcttgtgctgcttttttctcatctttgtggaccaatgttccttcgatctttgaagctgctgtcctttggatgggctttctttttcttttaccctatttgatgatattaggggtttgtttgtggtataaggtggcttcatttctggaatgttttagaggtccaaggctcagctcaggacccctggacttcatgctctaactctggggttctattattgggtcctggttttgttctttggcttcttgaggttaggaaggaacctgctgcactggaggggccatggtgctccaagctggtcacaacactctaatggttacaacactctaatgggtggtgccaggcaaaccactccatagggcagtagcagtgggatccatcctggttcacatgtaccagcaacagtgacagtggcagcatgtcagggtgcacactcatggactttaccagggtgctagttggtgccaggctgccagcctccatgtggttgtttgcagcagtatggtgggatcatagctcaggggtgcagggcccctgccagtgtctgtgcactcatttgtgccattcatggtgttagcatggggacaggttactggcagatgcagaactgtgtgtgccctctgcaagagttcacactggcagccttggctgctcaggacaggggtggttctgcttttctccctccatagtttctctctggtggcagtgtcagaacagggtagttgcaggtgggggcaggtctagtgtgctccgtgcctgccaatgctccaatgacaatggctgttcagcaaagggtaggagcggggtgcactcacatttgcagcagtgacagggcagggtgcatgtgcacacacatggtagtgtgtaagggaagggaaggtcccctggtgcacacgtgcaccagcaaagtaatgttggtgggggagggctggcagcaaagtgacacaagtgagcctatggatgggggagggtgcaggcgagctggtgtgtgtctgcagggtctgctctgctggagcactctgccagtcaggcatggtccaccagtgcagaagttatgatctgagccgccaagaggtacctggtacttggagccctgggagaggccagtagactgaggggtgctcaggtcaaaccagccccatctcatgggcaagaccaccctgcagagttaaggtccaacagttaccctagggacaaagtctcctgtggcagcaagttgagcctaagggtatgggtaaccctggctgtgcttcactacagatgctctagaaccaaactctctgggcttcacaccagcaggagctctgcttctatcacttctctaagcaggtctttctatcagttcaagtgtccgtggtggtccaggggtcttctcctgctgggattccagaggcccatggtgaaactgggttgctccttgcctgtttaacccatcatcaccttgcaggagtcactgggggccaggaatgagttctagtgttccatagctccatgcagcatttccatcttcctcccccttcagcccagcatctgcttcttccctccatctgctctcagtgccttccctctgaagaagggctagaagtgtgccagcctttccaatgcccgggtgtctcagtggaagatattcctcctggctgtttctagttggccatcttggaagagaaatccctgattgaagatctgtttgcagcacaacctatttcataactgaaaaccttgggctgttgggaattttaaattcagccacacttaattgaggctttaattatgccattcagttctagtgctttgatacataacagcagtatcatggatactgacctcacctttgctaactgtgcacctcaaagctccttgacttaaatgatatttgcatatcaagcccctaggcctaacattgccttcatattccacatgtggttcagcctcgttatagtaccacagagccacaaaaataagacccacatcaactcaagtttgtgatcatttgaaaaggatgtcccacatcacagttccagtttcagtttcacattatagatgatattacttcggcccaagactttgaccttgaagatgaatttgcccttttccccagaaacgacttcaccctggacactgagaccaccaccccagcaacatccataggctggctttcctaaggagctaaaaaattggacacaggacatttatcattttacttcctttgatataagaaattctgtttcgtttcctgagttcaccatttgcttaaactcttgttctttgccaaagtgtacccctttatacttccatgcctaaaggaaaatctggtagagtgtattactctttgagccattctaataattaatgagattattgctttccccaggaagcaactgcctcatatgggttcaccacttaaccccctggagagaggacctcccattgcccattacctcctctgacactttccattccagtttgccaccacaacatcctgccctgcacccatgacccacagctgctacctcttcctctaggttacaaacgtcattaatctttacatataccttacttaactaacttcatactctccaaaaatataattgttggacctgccaccttgaaccctggaatgtaccaagagattaccgtcacgcacacaaaaatatagctcatgttttaacatactttaagtcaatcaggatattgttagagatcttggaaatcccggatctgttttcttggctaaggccatacaatgtgaaacttggttatgaaccagcctacaaggactctttatactcctacttgttttcctcctttttaaggagaaaataataaaatttttgtgtgtgtgtgctatttagggcaatgtatgcactacttactaaaactctgctctacaacttaggccacccaaataattcaagtaatcaagcttaacactaatgtggagatcaagaagtcaattttaatatagttttcatgtaaaaaaaaaatgccttctagtcccagttttgagcccctaacagttagctccccttcttgaatatctgatttaagtccccccagcctcttcccttatctggttctcacactgtatgtcactatatacctgccctaattgcccagggctaagtaccagacaactacaaacagccccatggacagctatgtcctagagcttgtgaagttattcaaattagctaaggcacagggttctcaggaaacctaattctactccaattaccatatataaggtactctctacagctccagtgtgttgttaccctgtccctgtgtgcaaccactgtgtggccctacatggaattcttctcttgtttggagctataagtaacaaagaggtttgcctttcacctatccaagagtcttcatgttgtgtcctgtcatcaaaagaatctttaatcttataaaacagaagggtagaatctttgcttcggtcttagtttccagtggtttcctggcaacctttggttttccttggcttgtagaagaaacatcactcagatctctgccttttatcttcacatggtgttcctgtgtatgcgcccagttttcctctttttataaggacaccataaaaagctaagaagtgcaaaagaagaaaaaaagaataaaccaaagacgccagtcatattggattagggaccaatctatttcagcatggccacatcttaactaattatatctccaatgaccctatttccaaataaggtcatcttctgaggtactggggattagaatttcaacaaataaatgttgggcgggggttgcactattcaaccatgactgaaagtagttattaaagacacacatatgactatcttataacccaacaatttaattcctaggtgtatatccaagaaaatgaatgtacacatagaccaaaaattatgtacaaaacaagaatgttcttagaagctttatgttagccccaaactgggataatgtaaatctacagagaaattgatgaataaattgtgatatagttattgaaaatttactatacagcattaaaaattgaaatttgcaaagaatttcatgcatgtgaagttcaaaaactgtcagaatgaattaaagctattagaagtctgagtagtgtttactcaacttctctggaggagatgatatcagcagagaaggaacaaaggacactttggaacaaaggacactttgaataataattatcaacatcttggttttggaagtaattagataagcgcatatataggtagaaattcatcaaaccatacactcaagatttgttcattttaccatatgtaatttatactctcaaaatgctactttttaaatgagttgttatatagtttatcttgctacttcaatgttgtgggagaagcaatgagtagtaagcattggcttttttgctttattacacagcaaaactcactgacatttcccatcagtggttaatcagtcaaaaacatatagaatgacagcaaaaattaaagataagcaagataatgaagaaatatgttttgcaatcctgttgaagacagaataagcaaaagtgaccaagagaaacagattcaccaagtctgttgattgatttaaagtggatttatgtttaagtagaaaaccactccaaaagcatactttagggaagatgtcagctccaagattactgatttccatcattatcatggtgtctggtaagtctgatactgtgacattttcagctgaaaataaagctttctttcaatgattatgaggatactcttgatctacttacttataaggtgtttcttgacttgtcctagcagcagtgataaatgtgtacattatccagcaaaactccttctgagttgccttatcccagtggtgtactgactaggtgactggctgaattcagagtaattgggggctgggattgaagtgaaactaaaattttgtgacctaaaagtggtcctgggctgcttttgttggtagatttttaaaattactgattcaatttgagaacttgttattagtttgcttagggtttcaatttctcctgattcaatcttgggaggttgtgtattttcaggaattcatcaatctcttctagatttttctagtgtgtgtgcatagaggtgtttataatagtctccgaggacattttgtatttctgtgagatcaattgtaatgtcacctgtgtaatatctgattgtagttatttgaacctcctctttttttttctttgttaatccagctagtactctattgaccttgtttgtcttttcaaggagtcaccttttggttttgttgatgctttgtatagatttttggatctcaatttcattcagttctgctctgattttagtgatttattttcttctgctggctttggggttagtttattcttgtttttctagttcttcttcaacttcctcttcttttt

SEQ ID NO: 9933 - DNA, 6000 bp, Homo sapiens
tttttgggtagtcattcattaatttcccatttgggcacacctcactggttataagacacataaccaactatgccacatcttgttactctgggcatattttcagcaacaggaaaaaccacagtgtatgttacttcagaggctttcctataatggtaatgtcttacatctgctaaagtacctctccactgtctacaggacaaagcccagttttttttttttttttttcctgtaacaaagctccctcaaacctaccttttcaaccttatcttccattagtcttctctatcagctttttgttccagccaaactggttttcccaaagtcagaagaacagagtcacactgtccttaattgctgttacagctccacccacatgcaggtttactaaagagaggttttatctgatgggttgaaattgaagtgatggaaagtaatttacctcccctcttctttcttcatcttcaaatcctactactcctcctttaagatcactttagattgaagtgtcctccactcacctattataaataggaatgcatgggcaatttattttaaactttgtagtaacaaccatattaacaaattataggccaggcatggtgactcacgccagtaatcctagcgttttgagaagccatggcacgcagattttgagcccaggagtttgagaccagtctgggcaacatggcgaaaccccatttatacaaaaaatacaaaaattagctgggtgtggtggtgcacccttgtagtcctagctacttggggggctgaggcagcaggatcccttgaacctgggaggttgaggccgcagcactccagcctggaggacaaagtgagaccctgtctcaaaaaaataaataaaaaccaaattatgttctgtctcataacttttatcaattcaaaatgtgatttttataatttatttaacttttcatgtagttgcttccctagagggtaaactcccaaaggacactgatcctctcatccaccttatatcagatgcctagcaggtgtctcaaatataatacttactcactattgtctagttttactattttaacttatatgacaaaggattatcataaaaattttcgttggaaagctttgctgagaaatgtgaattttttttaagaattccattgtaattagaggcttctgagggacatgtgaatcatagtgaagaaataatataaatgttattttttgggccaattccccttaaaatcaaacacagaggtggggtacagtggcttacacctgtaatcccagctacttaggaggctgaggtgggaggactgcttgagcccagaagttcaaggccatagtgagctatgactgtgctactgcactccatcctggataacagtgagattaaaagataaataaaagtaaaaaaatagaaatttattataaaaatactaagcaaagacatttaaatattttcatttatatttaaatatgttattgacgagttattctaatttgtcttcctttccaatcttgatccaaatgtacttatattttacagattggaaatatggtagatatacaacctgaagttctatatttttcaattagtattgtttcctaaacatatttctgagttacttttggtggttgtatttatttttactggctgcctaatatggagttaatacagcatagtttactttactcctctattatcctgtgatattttcctttattttctcttggcccacatcttagacattacataatttcaaactatctcaaggtctccaaataccttgttaaacatttcagccattgcataaccttttctctttgcctggaatgttctttccttccttatccatctgtacaactgtacaactattctttgtctaaactagtggttcataaactttttttttttttttttttttgagacggagttttgctcttgttgccttggctggagtgcaatggtgcgatctcagctcactgcaacctccacctcctgggttcaagcaattatcctgcctcagcctcccaagtaactggtattatagacgcccgccaccacgcccagctaagttttaaagttttagtagagacggggtttcaccatgatgaccaggctagtcttgaactcctaacctcaggcgatccacctgcctcggcctcccaaattgctgggattacagtcataagccaccactcctggcttgtccataaactcttgatcttgagctaacatgatatgcacattataagatacacacagaaataaaaaaaggattaaaggtgcactattttaaagataaatttcaaccggcccggtgtggtggcttacgcctgtaatcctgacactctgtgaggctgaggcaggcagatcacctgaggtcgggagttcgagaccagcctgaccaacatgaagaaaccccgtctctactaaaaatacaaaagtagctggcatggtggcacatgcctgtgatcccaactacttgggaggctgaggcaggagaatcacttgaatcggggaggcggaggttgcggtgagccgagatcgcgccactgcactccagcctgggcaacaagagtgaaactccgtctcaaaaataaataaataaataaagatacatttcaattatttaaggtcccaaaccattttgttttcaccctcctactgctatcgggcccctaacaattattaacactttttccaatgcctcattggccaagggatgtttttaggttggcctgcagggtttgaaaatttggttaccaacatttaaaaatgcagagatttcacacaaaaatccaattttggggtttcttttgggaggaaaaaaattgaacatctgagaacactggacccacattcctgagggcaacaatctgctagagttgagcagctgttccttttagttatggcatggatattccaatttgccattttccctatcattccccattgtcttacacaaggccagtctcactcatttgctttacttgtctggcctctgtagccatttgaatctgcaaacactatctagacctttcctgtcttccatcaaagcttactttgttctgtcccaagtccttcatcagtgtttcaaagcaagagccaggtaatctgatcaaatataggtcctttaacatgtgctttctggagacagcatcttaacagaaagagatgactctgcaggtagaaattacaggcaccactggattacaatcaggatggcaactgtctgttctactttctctgttatcttgacgtagccatacctcactgttctaaagcagaccaaaggaactggttctatggtagaacaatggacgctggtcttatgtatgaaatcttctcaagctgcacttttatagatcaccctagttccaaaagatccaaagctaccacgggctcctctgacccccccatttcctcggaggcttcaggatatccggcctgacggcatttcccctcacctgctttcggggcccgttttgcgctgggcagttgcgcccaaggagcgcgcgcatccagcatgagctcatttctcatgggcgtttccagaggcccggccgggccgcgcacaccaagcgcagcaagcctctgtatcaatggcccccgcggctgggcggggcgcggccgcccaaaggcgctgcctttctggaagctttgttcccattttagcgtctgagagcttgcagccggctgggaaggcccccttggtccgtctggccctttcggggaagaggccaacactcggcacacgcgatccacggcagaggggagccttgggcgcgcagaattggctgcgccccgccgagagcctcctgtgggtggggagagcccctccacccctctgctcgcttgagcgctcagagcccagggccgccgaccgcagcactttccgatttgctgcaccgagggcccgcggtccctgtgtgcggtttccaccgttgttggaggcggccgcaggcgaaccgtcgggtcgtcagccacgacccgagtcaggcatctccccgctcctgggaccggggccgaaggccaatcacactgcagctaggtcttgcgattggacggcagtgagagccgattggccgccgccgcgagtttcgggctccctccctctcccttttgccccaactccagcgcctaagcttcaggccaatgagacagcgctttatagacgccctcccttcgctttcttctccccaccttggagagggaggggaagtcctgactggccagactgtcctcggaagcccccttctcttcaccaatcaccgaaggaggtacgctcccagcggagttttccagccaatcacaaagcggcggcggcgcccagccgtgcagtttcaccagcgtctctgggtttcaccgtcctcaactcttcaagcctcttcgtaagggccggcgactctgattggccactgttgccattgtcgaatgtctcctccagccagccaccgaacaaggcgaattcaccctttccgttcggctaccttcggcattttccgctctttgggcgtggcttcccagcgtcactttctaattggtttctcaggctgatcggctttttccgggaggagccgcaaacaaacgacgtccgtgattggctccgttcgggcttcggctcccagccgaagcgggcgagcgtggggctcggccggcgattcccagacgcctgttacgcgggcggcggggcgctgggcggtgtaaggctgggtgggggaggaaggaggtggaggacgagtaggaggggggaggaggagtggggaagtgcaaggcggctgcgcagacagcgctcctcacacagagcagctcctgacccgggcgaatgcgggcttgtgccgccgccgccgccgccgccgcccgggccaagtgacaaaggaaggaaggaagcgaggaggagccggccccgcagccgctgacagggctctgggctggggcaaagcgcggacacttcctgagcgggcaccgagcagagccgaggggcgggagggcggccgagctgttgccgcggacgggggagggggccccgagggacggaagcggttgccgggttcccatgtccccggcgaatggggaacagtcgaggagccgctgcctggggtctgaagggagctgcctccgccaccgccatggccgctggatccagccgccgcctgcagctgctcctggcgcaatgaggagaggagccgccgccaccgccaccgcccgcctctgactgactcgcgactccgccgccctctagttcgccgggcccctgccgtcagcccgccggatcccgcggcttgccggagctgcagcgtttcccgtcgcatctccgagccaccccctccctccctctccctccctcctacccatccccctttctcttcaagcgtgagactcgtgatccttccgccgcttcccttcttcattgactcggaaaaaaaatccccgaggaaaatataatattcgaagtactcattttcaatcaagtatttgcccccgtttcacgtgatacatatttttttaggatttgccctctcttttctctcctcccaggaaagggaggggaaagaattgtattttttcccaagtcctaaatcatctatatgttaaatatccgtgccgatctgtcttgaaggagaaatatatcgcttgttttgttttttatagtatacaaaaggagtgaaaagccaagaggacgaagtctttttctttttcttctgtgggagaacttaatgctgcatttatcgttaacctaacaccccaacataaagacaaaaggaagaaaaggaggaaggaaggaaaaggtgattcgcgaagagagtgatcatgtcagggcggcccagaaccacctcctttgcggagagctgcaagccggtgcagcagccttcagcttttggcagcatgaaagttagcagtgagtattggttttattttacaccccttttccacctcgcccttaaaataagaaacctcgaaataccaggatctgaaattattagacctcctgataaacaggcaatggaaaaggg

SEQ ID NO: 9934 - DNA, 6000 bp, Homo sapiens
tttcagtaacggtttacaattttcttcattaagctattccacatattttgttggacttatttctagttacttaatagatttattgtgtattttaaagtcatatcttccaaatatatgttgctggtatattcaaatgtcagtgacattaatatattgatcttgtttccagcaacctctcttgttagtccttatatataatgtatagattctctttatattctgtgtagataacgtaatattatcaataatatttttactcttcattttcagccttttaattctattttataattgtgttggctagaatatccagtataatgttaaataggagttgtaataataaacatacttgttcccagacccctttcattagcttccaccacctcctgcttttatccttactccagattgttttgttctaggccactagccaagaagtaagtctctcagtccctgccgacccagacttccctgtacaggcatgcagctcctacaaacctcattcagccagttgtgcttaataaaggtgtccaaccatccttaggagttttattttggtggtccagtactctctagcgcaatgtgtctgaggtgcttgaaaacattttattctttctatatgtttatgttcattaaaggaatcactatctatctagggtcaatagtcagaaacctatatccttgtctcaacccccacactaattgatcatcaattatgtcagttccacattctacataactgtcaaaatattctctctgctccatttccaacaccagttattgacttgggccctcagttctcccaccttaactatagtaacagtttcctaactagtctccctgtctttcatctaagttcccaaacaccattcttctcactgctgccaagtttatctttcgaaaatgcaattctcattatgcctctccggattcaaaattcttcattggctctccattgtctcctgcatgaagtcttagttctccagctggtcatacagactctttatttattctggctagctctctaacacaccagcctagcaaaacttaagtgcttattgttcagctatgctgtttattggtgctgtgatttttgtataggctggtctctctgcttggattgctctggcaaagtcatattcattttcaaacctagagcagatgtcccttcctccaggaattattgataaagagtgcaacaaatatttattgagtatatctatatttcagatactatgctagatgctgggaatacaaaatgcataagacatagtctgaatcttctagtgtcaatcagctacttacacttcttacctccctttagctttaagtagctggtgcatgatttttacttacctgattcttcattcttttccctgtatgtctacaaaatcttctccattcttgataaatactgtacacatataaatgtacaaatattacattattctaacacagatgcacatatatagtattcagaaaacacacagtgttcagaaacattcatagacacagtttcaactaggaagtatgattataaatgatgagataacagcttagtactttgtggtcagatcctagctcagtcaacacacagaagcattgtacagctagggtggtgaagggtattgtgttctgaaaatagattgcctaaatttgcatctcagctctgctacttacaagctgggtaggcttgggtaagttaatgaacctttgcacctcatctgtaaaatggggacaatgatgatccctgagtcatagtgctgttcagtacaaattattgaatttgtatttacttcaataatgaaagtgcttggaagctagtttgagcgtagtgagttatctcaattggttattcccagtcagctacagatggaactccttgttgtctttcccccattctcactagcacatttagctagcatttttttaaaagtgcctagaatagtgcctaagacaatgtgtttaatacatggtagctattatcataactttgtataggaggaagtcactatcagcaggtcaagtgatttttactttatatctagcaatgaaagaactgctgttgttctgagccacgtacatgctcttatctaatctttattggacgaatggcacatgtgggaagaatgactggcccaagagagcccagagctgtgggattcagttttcccttatgtagagctgaataacatatgtggaaagaaattgtattagcacacattgacagagccagctagctgtaaacacagacagatggaaatatattaatagctatgtgagggtctatagtgtttcagctaagagcacaaactctggagtcagatcacctcacctaggctcattattctgccatttaccagcatcgtaacattgagcaagttatctctttgtacctcggtttccacatctataaaatgggattgataataatagcccttatttcatgcagttattgtaagactttaattaaataaagcatgtgaagcactaagaacattgcttggtacatagtacataataaatcatgaagaaaaaagatgcacacagtagacagagaagcaggtgaaaataagtcatctaagtgttcacttcaagagaagccatgaaggtagatgttcaactggataagtaattcccaagggaaaaataaggaaattctaattctaatgcacttgagataaactttattaaagctatttttcatttgtttacatagaagtctccaacttatcttccctattatgtttggtttacagcaccagtatttcccaaaataagttctgtggagcatctgccctaaaccatatgtgagaaaaaagggttttgtggctgaatgactttgggggaatgctgagtgccatatttctttctatattcaaatgtacattaacactctaaggtttaatatgtcctgaaaaattgtttcatttagtttaatccagcatttcttgaattgacttaataatagagcccttttttcatatactgtgtattaacattccggggaactactgttcaacggaacaaacatgggagaaatgctggcttagatgaatattaaaatggcctttataccaaagcgggggctgaggggtatgggggggaggtatgggaaagacagggctcacatgtctttttagactggaattgagcacttgccgaagactattcacaaacccggaaactatgcaaatccctcaggatcacagacatccaaacatacacagtgttgctgggagcatgtacagggtctttagagggggttgagggacctgaccctcaaccctcacactgcagcttcctcctgctgctgctgctgctgctgctgctgtgctaggatccctccacggaagacctatgaggctcctaaacattttaccatctatctttggccacttacttcctgaatttactctctggaagagaagaggcccactggggaaaagagaagtcagatccaggagggaaccggaagaaggaaagacagggagaagagactgggttaagatcccgcatcagatctaggacaaggatgctcctctgggtagaggcgaaatgaaagatatcagcaacgcagggtaaggggccccctcacagcagagcagggcatgacatgcgctcaggagaaaaaatatcgacttctaaggttagtgaccagaatgggagcttcctgaaactgtgtttaatgaatttaatgaatttttattcatttatttttcttgaagaaaaatgtgatggctggtgggcttcctgccgtggaaggagagactgagattacatgctacgtggcctggtgcaaagagacctaaagtctttgcaaagcaaaaggtcaaaaccttgatctggcaaggtcaaaaccttggtgggggttgaggtctgtgagtggcttctcagtgacaatgaaggataagaaaaaataaaataaatatgtacctacttataatatttttataagaaaaaataaataaacattagaatattagaataaataatagaataaataaataaatatacctacttgaacagtgcctagctatggaaagctgcagcaggatttttttaaactcccataactttttatttttctataatattttacttttatagttgtagaaacttgagtcaacttctctagtttatctctaccttctagaaacaaatatttatttatttatttatttatttatttatttatttatttattttcgagaccgagtttcgctctgtcgcccaggctggagtgcagtggcgccatctccgctcacttcaacctccgcctcccaggttcaagtaactctcgggcctcagcgtcccgagtagctgagatttcaggggcgtgccaccacgcacggctgttttgtatttttattagacagggtttcgccatgtaggccaggctggtctcgaactcctgacctcggatgatccacccgcctcggcctcccaaagtgctgggattacaggcgtgagccactgcgcctggcctagatacgaatctttatttcctagaaaatctgaacagacattacgtgtaaacttcatattactgtgtttttagtaaaacaatgttttgcaagtatttataagggaatggaaatataacgcaggaaacacaccctagaaagttatatccacataattctagaaggagagggggatacatttgcaggggatgagatttcccgagaacttctggaggaaagtgggaatcttctccgtcagcggggtgggggacggtgtttcagcgagcaggaggcggcagcaggtagggaaggtggccgcagtcccccgggaggcgggggcggagcaggaaacggcggcgcgcggggcgggaggcggagccgtggggagcgccgcaggtggggacgagccgggcggcacctgccccgggaccagagcggacgctccctccccgctgcgccgagggaggggaaacccgaggggttccttggagaaggtggtgcgtcctggggcggcagctgaggaagaaagacgcagtgccccgaagcccctgagctgaaaagggccagaaagggggcggcatggcatggcccaaactgcccgcaccttggctgctgctctgcacctggctcccagcaggtgagccttggaaaaatggtacccaccctggacccaaggagacaggaagccattgtggcgtggccttgcagagctggccgcgggcagggcagtggaggcctgggccgcgctctggtggcgcttggcatgggcgccaggaggtgcggggactggatcgagtttctgcctgtgggaacctgttgcttttctcttttgttagtccaggcccttcccaaacaggtgcaactgagaaacctggagcctttgaactttcgttcctgcagtcattaggcagttcttgatctctgaagctgaactgataggggcaaaagcaccgttctttaaaattcctaattactttttcctttcatctgatatggtgacaaccatattggcccagaagtgcatatatttcatttctgggaggttataatgtgtcctcagtatgtaaagcaatgtttggccagaatctgaatctactgtgcaggaccacaacatgtacttctgggctaaccatgttcaatgtcacttttctactttctctgtatccagtcactgccctaactttaccccttgctcatcctgcatcaggtgtccaaccatctaccctctcaggcttcattctcttaccctccacaccaatctcctctctgttttggaaaacatgattttgtgtatctctgtgtgtgtcctggaaatctgacagaagtgtgtatctccacgagtgaaaccaggtaggaaagggtagctgagggacagaatgggcaggctctttcagctcttttccaattaggatgtaggtgtgaccttgcaaagaagaatttataagttcccttggaagctccaccctgttttatttcattttacccctcccctccctttcagaatagctgccctcttacctctaagttgtcagtg

SEQ ID NO: 9935 - DNA, 6000 bp, Homo sapiens
caacatgctgtgtgtgtggttggttttctgttttgactgaatcacaatcgcaggatacaacctgctattttcattatctgagaggcataaatacttgtaagatagttgtatgtttcttttgcaatttaaatgaagactctcaagtaaagtttattgttgtaatgaaattgggtcatagaagcatggaaaactgtgacaaggttcacactgatgaggaaaggtcacaagcaacacgctatgcactgaaggagaaaagcagcttgtgtactgacatcttgagatgtgtggttggcatgtgcctcatctcggaagaaccacaaagaattgcacaaggtaagtcaaaatgaaacggaaacatcacagagtatcagcaagacgcctgggggtaaacgctacagacgtaaagccactgaattccagggtgagtaaagaatataaaatgagttatagcactaggagaatatttttggtatcaaatgtcttttttatacaattaagtttgttttgaatactttatgtagatgagctaatgtaaacaatttaaaacatcatgatgatttaaaaatatatatagtaatgagaccctgtagtcctgggattgaagcagtttcaatttaaaatgttccatgtctttagcgatgaaagttgcaaatgtgtaggctatcttgccatgccacactcctctcggaaaaatattactgaaataaaacaagtcaggatttgttttttttttttttttttttttgagatgtaatctcactctgtcacccgcccaggctggagtgcaatggcaagatctcggctcactgcaacctccccctctcggtttcaagccattcttctgcctcagcctcctgagtagctaggattacaggcatgtgccaccacgctcagctaatttttgaatttttagtagagacggggtttcaccatgttggtcaggctggtctcgaactcccgacctcgtgatccgcccgcctcggcctcccaaagtgctgggattacaggtgtgagccactgcacccggcaaaacaagtcaggatttgtttagccattttacaatatatagtaacttctgataacagttactggtatgaggtttctcttcattgagtaattagctagaaaattcaagagagaactttttttttttgagacggagtctcactctgtcgcctaggctggagtgcagtggcactatctcggctcactgcaacctccgcctccagggttcaagcgattctcctgcctcagcctcccaagtagctgcgattacaggcacccgccaccacgcccgactaatattttgtatttttagtacagacgaggtttcaccatgttggccaggctggtcttgaactcccgacctcaagtgatctgcccacctcagcctcccaaaatgctaggattacaggcgtgaaccaccacacccagcggagaacttaatgtgttcctttgctttacaatttcttagtaatacagtaatatctcctttctagaaacacattaacatttaattcaaagtgtaatgggagtgttagattaggacaaagtactgaatattagtaacaatagttccttctttgtcctttcctcacccagtgagtctaatcattgcttgtattttggtgcagccctgatcctttatgctggatatgttgggacagctagagggcgaggcgacaatacatatgacctttgagtgatggtttatttctctgagtatttaacattgaagccacactgttgtttcagatagtttccagaatataaaaatcaaagggatcaaaatatgatctgatttaaaaccccctttgctggaagaatcaaggcctttccacatttgggtgcccctatttttgtttgtttgtttaaaaacactccaggctgccgggcacagtggctcacgcctgtaatcccaacactttgggaggctgaggcaggcagatgacttgaggtcgggagtttgagacgagcctgaccaacatggagaaaccccatctctactaaaaatacaaaattagccaggcgtggtggtgcatgcctgtaatcccaactactcgggaggctgagacaggagaatcgcttgaacctgggaggcagaggttgcagtgagccgacattccgccattgcactctagcctgggcgacaagagcgaaactccacctaaaaaaaaaaaatgtactcctgctctctcctctctcttcaattagtatgatccaacagtggtgagtaaagtacattttactgcaacggatttgtaagtccccagcctcgatgatcttcatatttaaatgcagtcatttacgcacagaaatgtcttgtaaactacagggatataaacaaatgcatggattattatcattgtgaggaggctcaactaacactgaacaactttaggaggcagcttggtgtagggtataagaacttcaggctggaagacctgatcctatgaacctgaaggagggtgtctcctcccttgtggaataagggatagaagtcatttaggggaaggagaaggggtggggtgggcagctttgaatatgacgctttaagaatggtatggttgagaagtcctcactcactgaaagtggggtttgattttacagtcactgctgtatggagaggacccgcccgtggtggcacaatatgaaacttaaaaaataatctaagccaatagatatgtttcattgagtggctccaccgagatagtttacttactgaagacagggtatgtttagtgatatctacgtcatttatcaactcaaaaaaaaaaaaaggaagatactatatactcttttcaattctgaaataaagtcttctgaaaggtgttagttctgaggtaaacaagcctcagctttagaatcctattgaaatgcaaaacttgctttgtgcggtttccctgtacactctgcatagtgttttggaaacctgcagttatctaaattcccatcgggtgacattgtttaatccaacattcccactttcatacatgaaaatagctctaaggacacaccactaatatgctttgaactctctggtggttggaagggagtttccaatcccactccctttcctctgatggttttcctgctccctgccccactaggtcattcaggaaaggcctctggcagctcccccaagcaagggctcaggggggaaagagacattgaccttggccaagaaagcacctgtctaattactgaacttattaggccaccaggagtccagactggtgcaagttacgagtagtgtgtgtgtgtgtgtgtgtgtgtgtgtgtgtgtgtgtgtgtcgcaaaacttcaggtttctgatattgagaggaaatgatggttgctttaaagtgatcactacatctattttcaaatattctgatgaaagtaggaaaacagaacccttcacctttaagaaagctgcaaacattattttgctttgaaggcagtaataagcgaaataacaaaaaggtttcaagtcgtatcttaatgtaaaagggtggctgcttctccagtcctgagcttatacaaagctctaaaaagcaccctaccccatctttctgaaagtcttagaaagattaccaccccatttgctttaaaacctgtgaggtgcctcccttctttaaaaacaaccctccctcaaccatactgccacattatcactcatctaagttatactttataaaccgccttgctgtgcttcacacatgcaaaaagtacacaaagtggataaacttctactgtggatgccactgtgcaggtatatatttagtaaacatttagttacattattttatttttgtgaaataagaactgatcgagcaaacctttcaaacagacccaccagatgataaataccaccatatgcttgattcacagtacatttgggcataaatacttcaattacagctttgtgtttagtatcaaaaaccttttcttgtgtgcgtgttttctctccagatcccgtgctctggatcacattttgaaagtcgcttattacagataaagcacctttccaggtacgcttcggagaaccatatgtatttacgcacacaaaggtgttcacagagattttcacaaacaaatgtccatatgatgccgcgccgcactcccccacatgcccgccgcgtgtgcgcccagcccccaacgccgccgggccgccccccggacacgcgggagcccgcggcgtccttggggaaacttcgccggcggctccaccccggccaccgcgcgggcctccccgcccccacccgtctcgggcccagcggcccacacccgagcacacccaggccggcccgcggcggtgggggcggggcgggcggcccggggccccgaggcgccttcgagtgcccgcggggctcgcctgatttttaaaagaatgcgccgcacagcccagcccccagtgccgccagagcgggccgggaaggagaggagcgcggccgctggagcccccccgccgcgccgccgccgcctcccggcgtccgcggcgcccctcccccgccggcccctcccccgcgcgcccgcccgcccgctcgcccgcccgcccggcgcaggccgctcgggtttgttttgctgcgcggccgccgccgccgccgccgccgcgggcctcgcgagctcatttgtgcctggctggtccccattcctctctccccagtgttgagtgtctgagccgttggctgctccgaaccgtttggctctttcccttagtaacagcttttaccttctgcctcaattcctctccccgctcgcgcccttcccccgcgcgccgcctccccccgccgccggccgcgtgcgcccccgcccctccccccgcggcgggagcacctccgctcgccacctggggacccgcgccgcgctccccgcccccgcccgcccggcgcccatcccccgcgccctccgctcgctggggttataattgcctctcaccccccggaggggttattttgggggtggttggaggcggtggcggcggcggcgaggaggggaatttccttgtgcctccattcccgggaggggggagcggcgttggaggccaccgtttccaggtaagcgctgggggccggaccctggagtgggggcggccgggggcctgggcggggggcgcgggccagaggcggccgggggcgctgggccgcggggggatgggcgcgagtggaacatgcatttttcaacttggcccttgggggaactgggcttgcgtgggggaagggaaggcagggagggcacttggggcgcccccatccccccgttttcctctctcaggtttctttgaaatgctcacgtgcctgcccacccccctaccctttcccggtctcgggggatcctcaccctaattatgttgtccccgaaaatgtgcacctcggccttctccccctcttcctcccttcgtgcatttacaccccctttttgtgcgtgtgtgtttggggggggaggctttcaggaaaggatttgcagcaaattgaatcaaggagccatcatgaggccgactcctttatagcctatttttagcagaggagaaggagcttttcggtgcatgctattttgtgaaacctcgggcggcaatggaaatctcccctccccgggcgcgtccccggcccgggcgcggcgaccccggccggcgtgctgggggctgcgggcggctgttggggccgcgcgtccggggcgggggcgccggccgggggaggggcgcgcggcagccgggccttgctccgggacgtgtttatttgtaacttagtgctttttatcgtcttaaggaggtatttggtggaggctctttgaagttgggttcaggagtgtagaattggcaaagttattgccagcttcctggtaagttttgggtggcacagagtcacgttattttctgacagtgtaaaggccacgttgtgagggtggtttctcggtaacttcctctttgcaaccgatttaattttttgaacagaagcagacttttatttaagtggaatattaatcttaaatggcagctcgagggaagccatgcatgtgtta

SEQ ID NO: 9936 - DNA, 6000 bp, Homo sapiens
gccattacaggaagaacctggagctactgttccatggtctgaccagagttcatgcacagataaggcggtgacaagaaaaatggctgcccaaggtccctacagtgcactctaagcatgtgcaggggcctgccaggacttcctgagctcctggctttgttcccaagtaaaggctattaatcattaatcatgaagtcttggtcagctcattttgacacaaaccacagatgagacaggccttagccacctgccaagaagacagggcctctgtgctgaagccctacaacacacctttgttgctttactccaattggccacctcctattccagccacagttactcctcccttgttgacacttgccaaacaatcccaactctcctacaagtctaaccactggtaacattattataagatctactttcctttctttccaacactttcatttctttctttacattgttaaccctgccaattgtatcacactgctaagtttagtaacttctgtgaactacagggtccagaaaccctctgatctccccaagtagtgtgttctggcagaaaaggccaggaagacatagcggtgagtctccagaggagaaaagcgaggctcagagaggaaaaattggcagggaggggaacccaggtcttctggcccatcctcttaggacaccatctcctaggcctcatatttctgaagttctcacagtgctgcggtgtttagcgctctgatctattggcaagcggactggtagacttggcagcccttttccccctctgactccagggagagtacctgcatgccttctgggggcttcccccagctcaggtgtgaagtgtgattgtgtgtgtgtgcatgtgtgtgtatgagacagagaaaggggatgtgtgtgcacaaggtgcatgtcagcagcactcacaggcttcctgccagctctggaagggacattttttgcccctcacagtgtcctcttgcaggtaggatgcctggagagacgggagcaggtggggagggtcagaggaatggcttttccaatctcactcagacctaaaactcattctggctttactttactgtgacgcaagctgcctgagctggccaggcaccaaataggagggggcaatgtggggtgagggcaagggtggggaggaactcagagcgtaagcgtaggagagagatcagcaagtgaggggctgacttcagctcttaggtgtgtgtgcttggactttacctaatcttcctgagtgttttgcagtctgtaaaatggggtaataagactgtgaactcaagggttgtagtacaaataaaataaactgggcaaaatgcatgactcagagcctgatagtaggatttcagcaaatgttgatcccatccctccccttccttaggttgtgccagaattcacccctgtgcttcttaccttaaatactttttggaacagtctctacaataaataagtaaaccagcaagacaataaataaaatgcacacgtccttttctttttccccctttcttcctcacctttattccttttacttttccagcgggtcctggaatgctgtttttcttccctttcttccctctttccctctcttctctcctcccatcctccttccctcccttcctctcttcctccgtcccttcctccctccctcccttctttcctcccttcctccttccctccctgctgccttctctccctccctcctttcttccctccctcccttctttccttccttcctttttttcccttcctctcttccttcttatctccatttcttttctgcttctcctcccataccttaaccagaagcaattaaccaatattttctctgtgagagatcagaagataagggtaaagaagaaggattgttttggaatagaaccaagtttctcacttcatgcctccagcattagaaaactcattatttgggccgggcgcagtggctcacgcctgtaatcccagcactttgggaggccgaggtgggcggatcacaaggtcagcagattgagaccatcctggctaacacggtgaaaccccctctctactaaaaacgcaaaaaattagccgggtgaggtggcgggtgcctgtagtcccagctgctcgggaggctgaggcaagagaatggcgtgaacctgggaggcggagcttgcagtgagccgagatcgcaccactgcactccagcctgggcaacagagcaagactccgtctcaaaaaaaaaaaaagaaaactcattattggccagacacagtggctcacacctgtaatcctagcaccttgggaagctgaggcaggataactgctagaggccaggagtttgagaccagcttgagcaccatagccagaccctatatgtagccaggcaaaatggtgtgtgcctgtgaagggaggattcacttgagtccaggaggttgaggctgcagtaagtggtgattgcgccattgtcctccagcttgggtgatagagtgagactctgtctcaaaaaaaaaaaaagaaaagaaagaaacctcatatttatatagctctaaaccactgtgagttaggtagaatttgggggaaggctctctaacctattcttagtatggccagaccaccctttcctcctttcagatcttactgttttgtttgcagagatggacttcaaggccaaaaggcatactgtgttagggtctgtgtcaggcagccccttttgggttccaagagcagaggaagatgaggctgtgtgagggaagaccataggatgatagagaattggtaccgggcacagtggctcatgcccataatcctagcactttggaaggttgaagcaggtggatcacttgaggccaagagttcaagaccagcctggccaatgtggcaaaaccctgtctctactaaaaatacaaaaattagccaggcatagtggtgcacagctgtaatcccagctactcaggaggctaaggcacaagaatcacttgaacctaggaggcggaggttgcagtgagccaagaacacaccactgcactccagcctgggcaacagagcaagactatctcaaaaaaaaaaaaaaaaaaaaaaagccaggtgctgtggttcatgcctgtaatcccagcactttgggaggccaagctgggctcagatcaccttaggtcaggagtccaggaccagcctggccaacatggtgaaacccgtctctactaaaaatacaaaaattagtctggtgtggtggcgtgcacctgtaatcccagctactcgggaggctgaggcgggagaatcgtttgaacctgggaggtggagattgcagtgacctgagattgcaccatttgcactccagcttgggtgacacagtgagactctgtctcaaaaaaaaaaaaaaaaaagagagagttgagttgcgagggcctagcaaaaggggagctccctgaactatagactttgaccttgtccaaatcattatccctctgcttccttatctctctatgaaatgaaaacaataattaacacttacctgtctcacaggtagggttaggaggattaaatataaaagtgttttgtgaagtgtgaaacagataaactacatagatgaaatgtatcatgacatttattcaattacacagcacatacttcataatatctactgctaggcttggagaaacataaagaataagagtttttatcttttcatgaactcaaaaagctagagggtacttttaggataatgggtaggatgcagccttcagacaatgaacctaaagacaggaatagaattggccaaaagcaggctgtggttaggccactgaaaggtggtctagattgaattgcagggggacaataacaatctcaagatgccttggctgggcgccgtggctcacgcttgtaatcccagcactttgggaggccaaggtaggtggatcacatagtcaggagttcgagaccagcctggccaatatggtgaaaccctgtctctactaaaatacaaaaattagccaggcatggggcaggtgcctgtactcccagctactcaggaggctgaggcaagagaatcggttgaacccagcaggtggaggttgcagtgagcagagattgtgccacggcactccagcctgggtaatagagcaagactcagtctcaaaaaaaaaaaaaaaaaaaaaaaaaaagatgccttgacctggtaggtgtgccccaaactttctttccagtgtgtgtgttaccaaggtgagggctgaagctgctcaaatgctccatgaaggggaggaagctgtgggatgatggggagggttcccacaaagatggagcctcgtcagcctttctccagcaccggaaaccacaggaaaccaggtcagtgtgtggggcccgctccctctgctccagggctcagctgtgagctctggggcttcctgagcagggcgtactgactagtgggtccttgaagctagaggcccctttggtatggagccctttgcctagaagagctggacctggctcatgggtagagagaactcggctatagtcctgagagttaaccagttgggaagccagggtacatatgggcttcatgtgcatcctagagtgctttttttcttccccactctaaatggtgcctcagtcacctctgtatctccagcacccagtgctgagtagtgcttaagagctcggctaattctctaagtgagggggtgaagcgcatgtctatgggagacacaagttccagagtgtgctgatgggtggatcagatctgcagtgtgtttcaggagtaggaggggctaagaaatgggtgcgtcccccaacctgatgctagcccctttcctgttacttctcacccacagcaggagccccttgtctttcaggtggggggcagtagggtttttgggggcacaagctttcctcagtccctccacttggaggggaaggaatgtggcctggctggctggttgggatcaaggaggagctttcgggcagggcggggccagggcaggctggggcgagggctcctgctggtactgtgttcgctgctgcacagcaaggccctgccacccaccttcaggccatgcagccatgttccgggagccctaattgcacagaagcccatggggagctccagactggcagccctgctcctgcctctcctcctcatagtcatcgacctctctgactctgctgggattggctttcgccacctgccccactggaacacccgctgtcctctggcctcccacacggtaaggtgctgctgccaggtagggacacctgcctggcacagccataaagctccccactcccctgcctgccctgtgctacctccgcagtccctgtgctctggtggcagctttgatgtgtcctctacctagtctcaaaggggtagccaaggtcctttgtgctgagggcctggacagggtggagctgggaagataagagccagaaggtatgggctattagctatggggctcagaatttgctgatttgaagcaaagaccccaggaatgtgccttatgggagtctctcctaataatagctctttcctttcttttccctactgggccctgtgcctcaggatgacagtttcactggtgagtcgcatttcctgccccattgctcctccccacgcccactatttttgcagatgcctagcaagccctccattctaattttcagttcccaacccgggaagtagcacaatatcaaggaaaaatttggaatcatgacaagcctgggttcacattgcagttctgccagactcccgtgtggcctcagactgtgcacctaacccctccaactgaccctcagtttctgaggggtagtagcatagtagaaatgattgtacactaaaggcagtgttgcttctgatctgtagagaggattagatgagaaacatgagtaaatctccaggttctccatatatgttggctcctccccttaactgatccctcacttctatcagtaatacaacaataatccttcctattttatggtatgttctacttcacaagacattttcccatacactacaattttgatttttataac

SEQ ID NO: 9937 - DNA, 6000 bp, Homo sapiens
cgtctcaaaaagagagaaaaaaaaagaaaaatatatgcaaagtgcatagagaagctttattattctcctttcatcagtcttccctcctgctccagctttttttttttttttttttttttttttgatatggagtctcactgtgtcccccagtctggagtgcagtggtatgatcttggctcagtgcagtctccacctcccgggttcaaatgattctcctgcctcagcctcccaagtagctgggattacaggtgcgtgccatcacgcccagcgaatttttttgtatttttagtagaaacggggttccgccgtgttggttgggctggtctcgaactcctgacctcaagtgatccacccacctcggtctcccaaagtgctgggattgcaggcatgagccaccatgcttggcctctgccccagctttctgatatgactggttctcaactgtgccagcacatattagaattatctgggaagctttaaaaaacagtagtgcctgagccccactccagaataattgaatctgtctccctggaggtagggctaggcatttatactttttaaaagcaccccagatgtttctactgtgcagccagggttgcaaaccactgactataatttcaagggaattaaacttgaacagctcaaaatgacgtaagtgtgtaattaattacattcagcctcaataactgtttctaactgatcctggtgggtgttggtcatggaaaatagccagaggaagaaattaactgcaagatcagaggaaatttcttgtggtgaggcagtataacacagcagaaagagcatttgctttgggtcagacttgagttgcatcctgttgatgcgggacaggcaagcccccaaattggggtttagcctgggagggttcttagcttcacccagaaaggaattccagggccagccagtggtgttaaatagcaccttttattgaaatagcagtgtgcagccgcagcagaggtactgctccttgcagggtagggctactccataggcagtgtgcccagagtagtggctcagaggcagttctacagtcacatttatacacacttttaattatatgcaaattaaggggcagtttatgcagaacattctagaaaggggcggtgacttcttggagtcgccatggcaatggtaaactgacaaggtacactggtggcagtgtcttatgcgaggtacttcccaccacacctgttttagctagtcctcaatttggtccgatgtcccagccattcctttcgagtcgagtgctgccccctacctcactgtcacttggccaacttggcccagttacaattgacttcagcctcagtttcttcatctgtaaaacagaaacaataaacctttgcagggttgtatggattacagataatgtatgctaaatgcctgctaggtgagttggtaggtgaagggcaaccattagtaatagcaaagaccttactttgaagaacttattctaaagagtggtaactgagatgtgtccctgtgatgacctgctcaggcccaaaatgactcaagcttctctggaagacagaatcctaggacacagatcccaagccctgaggctggggtgagaaggaattgcgggaagggcctgaggatgcagcagagagagcagtgggggctcctctgccttccaggattgaccaaggctgaatgtgaaacttccgtggtcttaaagcctcaccccagggaagaggccctgtggcactgagggaggagctctacacacacgctgcttgcggaagagaaggagaagcaggtaggggactctgcaaaaagagaaaaggagaaaaagaagaggatctttattctcttttacccccgtgtgcctgggatggagatgcttctccacccagcctatggcaaacaatcattacagttcccaagtccaccttcagccactgctgaaaacacaggacttcacttgaaaagtagtctcagaacactgaaatatgtcccactttcaacatcaaggaggacataatagtaatcctttactgggctcagcacttcacagttgatcttgagcgttttggagtccatttaggcttcataacaatccttccaagtggctgcagcaggagatccagtttccaaaagggaaaacagaactggctcaaaggactaagagccggagagtggctgaaccaggtctccaaacttgataggactccaaggccagtgggtgccttttcaagaccactaatgacagctaccattttttgggcacattctctgtgcgaggaaagccctgtagtaggtgttctatataggctacataatttgatttattccactcccctcacaactctaagcagtaggaaggagcaggcccactttacagatgctggaaacaaggcttgacgaatgaaatgagttgtccagagtcacaaagcctgttggtggcagaactgcaacttggccctaggacttctcactttgatttcagcttcctccttttgcagcgctactccatagctgacggccacagctatacagtggtacctactctagttacttatctgcccttcgtgacctcgcctaacctcttggaatctatttacttctgtgtaaaatggggataataatatctatagtataggcttgtaagaatgacataagatcatttttgcaaagtacattgtagatacagataaatgtatctgtatctacaatatactttagccagtggtgatggagagcctggggtcagaatacttaggttcaaatgattttagccatattatttaacctctctgtgccttagtttccttatttgtagaatggggctataaccatacctacctcagagggtcattgtaaggagtaagtaaagtaacccaggtgaaggctacacatagtaagtgctcaataaatactagctattttatatatgtgtgtgtgtattttatatatatatatatatatatatatatatatatatatgtatacacacactataaattctgttccttgtaccctctttgtttatttagagacagggtctcactctcacccaggctggagtgcagtggtgcaatcttggctcactgcaatctccacctcctgggctcaagtgatccccctaccttagcctcccaagtacctgggactacaggcacatgccaccatgcctggctaatttttgtagagacagggtcttgctctgtttcccaggctggtctcgaattcctgggctcaagcgatctgcctgcctctgcctcccaaagtgctggggttataggtgggagccgccgcacccagccccttataccctatttaataatccagtttgtcctgcagtcccctgcaccatactctgcttttttcccagtaatagtatcatctaagataatgcaattggccacttgcactcccttttaccaccctctacttttattctttcttttctttctttttttttttttttttttcagagacagggtctcattctgtcactcaggctgcagtgcagtcatagctcactgcagcctcaaactcctgggttcaagagatcctaccaccttagcctcctgagtagctgggactataggtgtacactaccatgcttggctcattttaaaattttttgtagaggccaggcgtggtggctcatgcctgtaatcctagcactttgggaggccgaggcaggcggatcacgaggtcaggagttcaagaccatcctggccaacacagtgaaaccctgtctctactaaaaatacaaaaattagctgggcgtggtggcgcgtgcctgtaatcccagctactcgggagactgaggcaggagaattgcttgaaccgggacctgggaggcagaggctgcagtgagccaagattgcgccactgcactccagcctgggctacagagcaagactccgtctcaaaaaaaaaaagttttttgtagagataagatcttcctatgttgcccaggcttctactttcattctccaacatagcttatctgcctatttttattgcttgttgtctgtctccctccaggacaaggattttgtccttctcttcagaggtattcccagcacctacaacagtgcctggcacatagtagctgcacgatacatattagctactatagtaaagtctacctgactaccctatttaatagaatattccccatgctcaatctgaattcctgattccctttaaccaactttttttcctttttttttttttttgcaatagtgcttattacctttaagacactctgtaacatactatatttattatttattgttagtctttctctccacacctagattgtaagtcttatgaaagcaagggcttttgtaggcttttttttttttttttttttttttttgagacagagcctcactcttcacccaggctggagtacaagggcacaatctgggcttactgcaacctccgcctccagggttcaagcgattcttctgcctcagcctcccaggtagctgggactacaggcgtgcgccaccgtgcccggctaatttttgtatttttagtagtgacggggtttcaccatattggccaggctagtctcgaactcctgacctcgtgatccgtccgcctcggcctcccaaagtactgggattacaggagtgatccaccgcgcccggctgtagggtttcttattcaggtattaccaacacctagggagttgcctggcatacagtaggtaattaatggagtatttgatgagcgcatgatgcatggtgtagtgccgatggaagtggggtcagaaggcctcctgccgctgcggcagaattcccgtgtggccttctcccaccagggcctcagtttcccctcgcagttccgattctctggccggcgctggggtggagccggcggggccgtcgtgccgcccgtggccgctggggacgctggtgccctcccgccccgcccacttccccgccggtccgcccctggctagagaagccgcagcccgcagtgtccgacccagtcgtcccgcgccggagccggccccgtagcgtgccatggcctgctacatctaccagctgccctcctgggtgctggacgacctgtgccgcaacatggacgcgctcagcgagtgggactggatggagttcggtgagtgcggcccggggaggggaggggaccagggcgaccggagcccccagcgatcccgcctggagcggccgccaagctccctcgggcacccgggttcagcgggtcccgatccgagggcgtgcgagctgagcctcctggaccgggtccgccgcggacctcggcctgtcacctgaaggtgccgcgtggtctctgaggacgtctgtcgacgagcaggggccgccgccactgcgctctgagtccagagaacggtgggtacgggggccctcctgtcagcgctgctggctcggtgacgtccccaggtggcctctcatccagcccacaacagcctgcaaagtgcgagcctcgaccctgtagggacccacggtgctgtcacttcttgggggggtgtgtgtgtgtgtgtgtgtggtgtgtttagttttagtgtatattagaaggatctatgatttaacatatatatatatattgaaacggagtttcgctgttgttgcccaggctggagtgcaatggcacggtctcggctcactgcaacctccacctctgggattcaagcgattttcctgcctcggcctcccgagtagctgggattacaggcgcccgctaccaccctggctaattttttgtattttcagtagagaccgggtttcaccatgttggccagactggtcttgaactatttttttttttttttttttttttttttaagacggagtctcactctgtcgcccaggctggagtgcagtggcgcgatctaggctcgttgcaagctccgcctcccgggttcacgccattctcctgcctcagccttctgagtagctgggactacaggcgcccgccaccacgcccggctaactttgtattcttagtagagacggggtttcaccgtgttagccaggatgg

SEQ ID NO: 9938 - DNA, 6000 bp, Homo sapiens
ttgtgggtaaaatttcataactagacataaaaatcacaagtgggaacatgtcagagtcattcaaaaagtagatacatttgtggaagtgtgtgtgtgtgcatatgtgtatgtttaacctgcctggcatgttcaactggttatgatttttgaaattttaaattaagatcttctaaacctcctgggaatttataaggcttagagattgataaatggtgtctcagataaagagaaggagcaaatgtcagcgctatgatgatacacagctgctataaatgagtggcttgattgcttgacttcaaatacagcacactaactttcctaaactcagtctgcaaaatggtttacatgtcactattctcaatgcccagttttgccgaacactcggatgataatgaaaaagttttgctacaattttaaatttttcctttaagaagtagcataacactactataaaatatctgaggtctgtccagtgagaccagtttaaatatagctggagtaaaatggaaaacaattcagttatggtaaacttctatttctagacttgcactctcttcttaatataataaacatagtatgtaattataaacctgggaacaaagtcctctttattgaaagaaaagcaaatatgtatgcaaatctcaaatgagataatcaactaagcattaattgcaaaaaaaaaaaaaaaaaaagaagtcccatgggaccatgggaccatgggaccaaacaccaatatttggaaggagtccttgtggtttggaaaaattgaaacgggcatagtctttcgtctctaggaaccccatatggatggcactgcctatgtgcaaagttgcagggtggggaccatgtgctgtttatcattttattccccgcacttagcagagggcctggcacaaaataagcactcaataaaatgtttgtggaaagaaagaattctacagctatagtttatacagtgtttttccaactttaaaagatatggcccacagtaaaaaccacattttataccaactcctggtacactcagatacacacacacatgcattacacaaaagttacgaagcagcactttctttaatacagtaggcatgttctgattatttctgtcctttttgcttgactaaaaaatactgattatgactgaataaattgatttcataacctactaaatcaagccttgcaatttgaaaaacagacatattatttcagtttacattacttaacctcttacatttatacacttcactacccataagtctccttaaaaaaaaaaatcacaaaatttttgatccagagggaatttagaaaatattcagctcaactctaaagttttgcaccacttacgaattcactgttgtggggttccccttagtcactgttgttgaattatgggaattttccgaccaaaaaaacagattggcccccatctcacatcatatacaaaatttaactcaacatgaatttaaaacctaaaggtaagaactaaacctataaaactcttaaaataaacattaggagcaaatttcatgactttgggttagtcactgacacgacaccaaaagaaaaaacaggtaaactggacttcatcaaaattaaaaactcaaatgacaacatcaagaaagtaaaaagaaccaagcatggtggcatctgcctgtaattccagctattcagaaggctgaggcaggaggatcacttgagccctaaagttcaagaccagcctaggcaacatagcaagacctcgtctttaaataaataaataaataataaataaataaataaataaataattattttaaaatgtaaaaagacaacttacagcctggaataatatattggcaaatcatgtatctgataagagactcggatatagactatataaataaataactctcacaactcaacaatagaaagaaaaataatccaatttaaaaacagggaaaggatttaagcagactttcttcaaaaaagataaatggccaatgaacacatgaaaagatgctcaacgggatagtcaccaaggcaatgcaaatcaaaaccatgagacaccggctcgggcaacatagtgagatcccatctctacaaaagaatacaaaaattagctggtgtggtggcatgcacctgttgtcccagccacttgggaggctgaggtgggaggattgctttagcccaggaattcgaggctgcagtgaactatgattgcaccactgcactccagcctgggtgagagagcaataccttgtctcaaaacaaacaaacaaacaaaaccccatgagatatcacttcataccctttaggttggctaaaataaaaaagactataacaagtgttgacaaggatgtggaaaaactggaaccctgacacattgctggtgggattgtaaaatggtgtgcccactttggaaaacagactggcagttcctcaaaaacaccgagttaccttatgatcctgcagttctgtccctaggtatatactcaagagaaataaaaatatatgtccacaagtaaccttgtacatgaatgctcacagcagcattattcataatagcccataaaagtagaaacaacctaaatattcatcaattcatgggatgaataaacaaaatgtggtatatgtgtataatggaatattgaccataaaaaggaatgaaatattaatataagctataacatggatgagcctcacaaatactatgctaagtgaaagaagaaagtcacaaaggacttcatattctatgattctatttatatgaattgtccagaataggtaaatctatagagaaagaatatctctatctagagttggtggaatgactgttaatggagagggggttcctttttggagtgatgaaaatgttctaagggtagatttggtgatgatggcacaactctgtcaataaactaaaactcattgaactgtacattttatttatttatttttgagatggagtcttgctctggggctgaagtgcagtggcgcaatctcggcttgtaacctctgcctcccagggtcaagcgattctactgcctcagccccccgagtagctgagattacaggcacgtgccaccacgcccagctaatttttgtatttcttagtagagatggagtttcaccatgttggccaggctggtcttgaactcccggcctcaagtgatccacctgcctcggcctcccaaagtgctgggattacaggcgtgagctgccatacccggcctgaattgtacattttacttctatggtatttacattttagattatattaattattcctcaataaagctgtgattttaaaaagcaggctaggcgcagtggctggtgcctataatcccagcactttggaaagctgaggcaggaggatcacttgagcccaggagtttcagactagtctaggcaacatgtcaagacacagtctctactaaacaattaaaattaaaaaaaaaaattagccaggcatggtggtgtgcacctgtagtcccagctacttgggagcctggggtgggaggattccttgagcccgggaagtcgaggctgaagtgagccgtgattgcgccacagcactccagcctgggcgacacagcaacaccctgtctcatggaagaaagaaagaaaagaaaggaagaaagaaaaaaaaaaagcagattggaactctggaattaacaagaagtaggacgcacggagcacttccgcctgagtggagactgtggatccgggtcaacctgactacctaaatcacaggccaataaatggtctttcagtggtcagtccctgtaagatccgtggctctcagcttcttatcttaggggctgtggaggaaggacatgattatgttgatttaagcgctgaatattttcccttgtgatacccatcctcgcaaaactttgcttcaaccacaaacgaggaccttctgtaccagaggggcaataaccacaatgaagctaggaagaaatgcagagcaccccagcatacagtccataagcttcctgaagtggggggcctcaggcatcgctgcctccccaaagaggatcaggcccagaacagtatgctccagaaataagactggaaaaagggaaagaggggcctcaagtccaggagaccagcggctttctgaacgcgcacctgccaacccactttggacaggtcacgatggacagcgtggcaggaaaagaaaaggtcactgtctacccaacacatgagaaactgtttctcgtgcctcacgtccccactccgtccccacccatgttgtctgagtccctcggtgtcagaaacactgctaagaaatttaagaaattctgttaatgagtttaagaaatgtttttaatgattaaaagtcagtgacttgtgaataaccatgtaacttacaaacgcaaggaactctgaaagtgtgcagcaccaccgatcagaagagaaaaccaagggacccgaaatatgctttaattaaattttcttttaaaatgtcactggaaagaacatcttgggaagacggcctggccgatcgccgtgtgaagggcaagccactctggccgagagggagccccacacctcggtctccccagaccggccctggccgggggcatccccctaaacttcggatccctcctcggaaatgggaccctctctgggccgcctcccagcggtggtggcgaggagcaaacgacaccaggtagcctgccgcggggcagagagtggacgcgggaaagccggtggctcccgccgtgggccctactgtgcgcgggcggcggccgagcccgggccgctccctcccagtcgcgcgccgccgcccccgcccccgcccccgcccccgcccccacccccacccccacccccacccccagccggcgcccgcgcccgcccccgcgccgggcccggctcggcccgacccggctccgccgcgggcaggcggggcccagcgcactcggagcccgagcccgagccgcagccgccgcctggggcgcttgggtcggcctcgaggacaccggagaggggcgccacgccgccgtggccgcaggtcagagtacgggtgcccgcggcgctcgggaaccggctgctggctgggcggggagtgctcagggagggggcgcggagggctggggccgagggtctgggggctagggccgaggaaacgggaactgacggggtcccagacggatgagagctggggagaagggggtctcggctgaggggtccggggctgaggcagggtcatggtccggcaggacccggactgacgggtcgcgggcgggcggctcacgggtgaccgggtgaaggggtcttgggctgagggcacccgggctgagggtcgcgtctaccggagcgcgcactaggggcggagggcgcgggcacagagagccgcggccggtgccgactcgagtggacgcgagccggtgcgtcccggcttccaggacagcccccctcgggagagcgccgggtgggcgcggagccggggacacggggacctccgcgtccccggcggaggtgcgcaagcgtcgggagccgctccgggggaactttggagcagggtgtctggacccggggaagcgaagatccgcgtgcgtccgtcctgaggccgcgcggcacccctgctgaggaggaggtcccgttcgctgtccagagcccaggggcgaccgccgcttggggaccgggggaccgttcagcgaggggcgcgcttgtagctggccaggccctgtgccctgacgcgttgtgctggccctacgcccggcggaggggctggggacggggactgggtgcctccgtgcctccgcggatggagcgcgcagccaggacccccagccgcaccccggggggctggaaaggcgaagtcgctgctttgtgggctcctgcaagtgccaggcgctgaccactcctcctgggagcctaactgaggggggtagaggcagcagaggttaacagaaatctcaggtcccttggtggaaggtgggtgtgtagtcgtggtactttacgcctcggtgtttagggaggagcctaaggtaaggagtcagaaacggg

SEQ ID NO: 9939 - DNA, 6000 bp, Homo sapiens
aaaggaaatgtaaacaagatgaaatagccaaagataggtctccccaaaactaatgttgagacaatgccaccagcagtgacagtcagctaagagatggttcgcagctcactgctcagtactgaggcattcagcaggggttgtatttaactttcaagttggaaccaaccgaaactgttgggcttgaagagctgtctttatgagtcatcgacggcagaaagcacagaagcactaaagaaaataattcagaaatgtggaaagagaaaagtatgcccttgtcttgggagaacaatatttgtgtgtaaccaagtaggaagactttgtggaggaaagtctgaaaaagcagagagctgaagagaaaagagccaaatgaaggacacggtggccaacactcaaagtaaaaagacatttttgaagaagatgtgtttctagggtttctaagaagtcgctatactcatgcccagagccaccttgcaagttcatttggaaagtgcattggtgtcttttggtataagatccacgaacatcaacagtcctgttatgtgagcaggtgttcatactgaagggccacaagcaaagtttccatgtgttattactgttagaacttcccccgctcccttccaacacaaaagcagctctgcctgctagtatggaagccctgggaagagcctcatacttgcctcgtgctgccaacatctctgccttggcttccctgctggaacacacaagtcactcagtactagccatttattcttctggcagaactgtggcaagaggggattaacagggaaaaaaaattaaaaaacaaacaaaaagccaaaacaacatgaaagagctgggcatgtctttaaaacaatcagtgtccacctcccccagccctgtgcctgtgtctgcctgcactttgcatgtctgcccctgtggtggggggggatatgtctgcgcctctgaaaatcttcttatttagacatcacaaggtattagcccaattttgaacacagccggctgcagtacggtgcacagacacgactgctctttcttcagaaaactctccagttcaaacatgtttgcagagcatgattcatggtgtttctttctggattgtccagtgggtaattgctgtacgaaaaccagagaaacagatgtagaccctgaaccctggctataaatttttgttttatgattatgggtttcaaatgtgctgtgtcacactgacaaatatacagttactctgaaacaaaatggattttactctcaaagttttgctttttgtttttcactttttgtttgcttgttggttggaaatacatttattagatcattgatcaaacacaaagaaaatagagatgacacatatcagaatgttattttatgccataacaagaagatatttgggaaagtttcttccaaccctgtggctaatgtttaaaatgggtgtcagtagtttacatttcattacggacaaatcggtctatttttcactttctaccctactcattaatctttatagtgcacggatctgtatttaaagaattatggcttatttatgtatctttccttcattttacttaaaatgaagaatttggagacagaatcaagttttcaagaagtgtaagcatttactgatgaagaaataattagcatgtggctaaatcatgggtctgttttataaattaatacttggattaagtaatagctctaattattgctatcagcataattaattcatgatgaggaatgattaattgactagcgaatattgtcatattataagaaacccatactattcctttcatggggatttaaatactgattattcatttcaaggcccaagttcatttctcagttgagaacttcaaggtaattatatattttacattttcttgcacaaagaaagaaaacatcgagtcgcccaacctttaccacacacagagagagacacactaatgttgttatttttgtgcaatgatacagtatagaggtaagaaattcggaagcagtggtctcgctcaatgaggctgattccatagcttaagaaatgagaatgaacagaattttgaggacacccatccccatcttcacttccctgggaccagtgcatctctactctttggagagatgttaagcaagaatgtgcagcagcctcccctggataacagatccctgtacacacatacctgtcagtgatgccatgtttctcatctctaacttaagtttctcctgctctacttccaatatagctgtttcctcttctcttgtctaacaacttttcatccacctccactgtccggtaaaaatgaactcagtttccaaggaactctaaggaccttaaataagcatttggagccataagcctcatggaccaagtagaaattggcacataatgtagtgctttgtgtatctttacaactaccttaatgacagtgtgttaaatgttttgtaaattcctctgtgttctcttgcttaaaatgtgtgttttctttgtagttaaagggtttcttacaataagtctctgttacaaaatgatggccatataaaagagagaagagaggcgcaaaaataacaaacacagattcagcaaaaatctcacccctttattgccctgaacttttcaatagcaagaactgagcttgctgggctgaaaattgttttaatgtaccttcataaaaggatctttgacttggtaagtgtgtgcgatgcatacttttcatgttacaccacaagtgccacttagcaactccactagacagggcagtgtttcagcatggggtggggtgccccctgacaggcttttaaaaggcccggatgccaatgcacattccaacactatccacaaaaaggagactggagcagtgctcttccctgcattgggcaaggagactctccctccctgcctaaccacttgcctgccctgttttgtgggagaattacaagtaaatgctacagaggcagtggagaaaaaagggtgttttaattcctctccagagtttcctttatttgatgtatgttgcatcctttaaacaagttgtgcaaaatggctgcagggtagattggctctcccttttaaagctctccatccggctgggtttatttgtaaatactgcatctatccttcttagtgttttaggactggctggaaagactcttcttcctgtaggttgggtcagtgtgagagatctaaaaaatcattttcccttaaaattactgtattttaataaaaggattgggcaggggctggaatgagagaaaactggtccttcaaaatgtaaaactgtcatacttaaaccagtttacaaaatatgcgtttaattatgtggtgggatgtgtgtaggtgtatgatgagagaggcaaccaacatggctatttggggtgcaaggatgtgggaacaggcaagtaattttcacattggactttcatcctagggagctgggttctagtcacagctctgagctgtgtgaccttgggtaggtctcatctccccggggttttgtttcaccagttgaacagtatgaggatgagtcacagctaacatttgttccatgatatttacccagcaccatacaagtgttatttctgtcctcccagttaacactgacgtgggtagtattatatgcccattttacagatgaggaaactgaagcctgaagaagttaaatacttatcccagaacacacagctggtaagtggcagacctggaattggaatctagttcagtttgattccccaacccatgctcttgaccactatactgttttttcaagtccagatctgaaatctcattttctgtgtggctgtgtgtttgggacaggggtaaccaattcctgactactctatatgctgcatagaacctggagaggatttttcaaagtaaatgaatctcgaaagctggattgcagagcaaacgagtgcagtcaattcagccaggggcttgcaagagggagaaagagaaaaagactgtggaatggaaagtttcccaacccaagcctttcccaaggggtagccattctctgttctacagtttagggcttgcatgtgctttttctggagtggaaaaatacataagttataaggaatttaacagacagaaaggcgcacagaggaatttaaagtgtgggctggggggcgaggcggtgggcgggaggcgagcgggcgcaggcggaacaccgttttccaagctaagccgccgcaaataaaaaggcgtaaagggagagaagttggtgctcaacgtgagccaggagcagcgtcccggctcctcccctgctcattttaaaagcacttcttgtattgtttttaaggtgagaaataggaaagaaaacgccggcttgtgcgctcgctgcctgcctctctggctgtctgcttttgcagggctgctgggagtttttaagctctgtgagaatcctgggagttggtgatgtcagactagttgggtcatttgaaggttagcagcccgggtagggttcaccgaaagttcactcgcatatattaggcaattcaatctttcattctgtgtgacagaagtagtaggaagtgagctgttcagaggcaggagggtctattctttgccaaaggggggaccagaattcccccatgcgagctgtttgaggactgggatgccgagaacgcgagcgatccgagcagggtttgtctgggcaccgtcggggtaggatccggaacgcattcggaaggctttttgcaagcatttacttggaaggagaacttgggatctttctgggaaccccccgccccggctggattggccgagcaagcctggaaaatggtaaatgatcatttggatcaattacaggcttttagctggcttgtctgtcataattcatgattcggggctgggaaaaagaccaacagcctacgtgccaaaaaaggggcagagtttgatggagttgggtggacttttctatgccatttgcctccacacctagaggataagcacttttgcagacattcagtgcaagggagatcatgtttgactgtatggatgttctgtcagtgagtcctgggcaaatcctggatttctacactgcgagtccgtcttcctgcatgctccaggagaaagctctcaaagcatgcttcagtggattgacccaaaccgaatggcagcatcggcacactgctcaatgtaggtttatttttttcccttcttctaccaagaaaaaaaaaattgtctctcttgcatgcaataaagacgttggaaataaactgcattggtagcaagacaaaggatttaatgatttaatgctgaaggggtgtgatatgctggcatgcatattgattccctttgctgaaaatttcctgttagatgttttcttcccaaataacccctcccgcccccatgctcctctccttaccaaccttatagtctcttgaaaacagtttttaaaatatgcataaaaatgtggggggtggggagtagagggtgaccacaagactttaaaacattcttcaagtagggcaatttgacacattttgcagtttttactaaaatgtatgcagagtggaatttaactttgctgttctttggattagctactagttgtataggtccccccaccccttgtgtattccaacagtccaaagtaattaaaatatgacattttccttgaaaggaatttagtttaattaaggtggctgctgctcccgaagttcataaaccaccagttcaagctgccgcttccaatgttttccttgctaaggaaaggcaatatttcttagcattgaccctgctgccacctttccaagtcactttgttggtctaagaagttgctgttttgctagaaaactactggcaatgaacaccccttggactgagccatccattatttccatatcttgcagttcagcccggaacgtggacatcagttaaaggaaaggaaatataagtggggtagcccaatttaaaaaaaaaatattgactattttgttatctgatgctgacacagtgccgaggtacgcacctggtcaacagtagcctggctgcaggcttgagaaatg

SEQ ID NO: 9940 - DNA, 6000 bp, Homo sapiens
gaataaatatttgttgaataaaagaactgagagagatgagactcatgcccagcccagactcttttttttttttttttttttttttttttgagacagagtctcgctctgtccccagtctggagtgcagtggcatgatctcagctcactgcaacctctgcctcccgggtacaagcgattcccctgcctcagcctcccaagtagctgggattacaggtgcccgccaccatgcctggctaatgtttgtattttttagtagagatggagtttcaccatgttggcaaagctgatcttgaactcctgacctcaggtgatctgtttgcctctgcctctgcctcccaaagtgcagcccagactcatgtatattcacttgttgagactttgggtggtcccctccccagtccaggcctgggtttctacattggtaaaatggggaagggtgtgtgtgtttttaagggcccatccaactctgctgggtgtgatggggaggctgtcttgagaaaagggtgtgctgccccctcgtgatgaggcagactcttccccaggaccatcaagtcttaggcttctaactcccaaccctgcctggaaatacatgttaggagggcactccctgccccggagtcaccctttctgctgtctcacctccaccaacccatccccgccctcagcattcaaggcctgtgaaggtcctcttggtctttgatgcctttcacaccaattgcccttcatgtcactgtgaccctgtgttatgggctaaatgtgccccctccattactcctcatttcatgtttgaagtcctaacctccagtacctcagaatgtgactgagtttaaaggcagggtcaccaggcccagggataagatggccattaacaagccaaagagagaggcctcagaagaaaccaactctactaataccttatctcagacctctagcctccagaactgtgaggaaatacatttctgcttaacctactcagtatgtggtactttcctatggccactctagcaaatgaatacaccctggaactcacagaatactttatttcttttgttgtagttcaactccagaagcaccatgtggggacaaggtgttcccattccacctcgggagtagaggccaggggaaggaaaggcagtagggccaaagctatcactgtaggaagctcatgagatagggacccatctgcccagctctcctgaatcctggagcctcgccagagctccctcttgcatctgcaattccacctgcctggaatgcccatctctataggtcttctctgtcttgcaaggcccaatttagggcttcctacttctccccttcctctctcacttcctgttccagcccatactgaactgcaacagcttaatcctgaccccttgctggcctcaagtttgggtcctgggctgtctgtgtcctgtggccaagcagccgcctgcttctttgctcagtaatgctatgatgtagtctcccaattcccagcctgctctggactcagctgttgtgcctaggtcttgcagctccctcatggctgaccactgcctcaccatcagaaagccccaaggtaggctgctttatgcttttgtattttacttactacaaattgtgttcgggcagttttgcaggttgtaggccttcccatactttctttcttgtgtttgttttgagacagagtcttgctctgtcacccaggctggagtgcagtcgtgcaatcttggctcactgcaacctccacctcccaggttcaagcgattgtcttgcctcagcctccctagtagctgggactacagccacacgccaccacacccagctaatttttgtatttttagtagaggtggagtttcactatattagccaggttggtcttgaactcctgacctcaagtgatccgcccgccttggcctccaaaagtgctgggattacaggcgtgagccaccatgcccagctttgcccaaaatttctctatctctgtccaggtgacctcaagatggtcttccaggctgggcgcagtggctcttgtctgtaatcccagcactttgggaggctgagacaggcagattgcttgagcctaggagttcaagaccagcctgggcaacatggcaaaaacccatctctacaaaaaatacaagaaaaaattagccaggcctggtggcacacgcctgtactccagccactagggaggctgaggttggagaattgagtgagctcaggaggccaaggctgcagtgagccgacatcacaccattgcactctggcctgggcaaacagagcaagactctgtctcaaagaaaaaaaagtcttccagaaacaagctcttctaagatgctggaagaactggcaaaatttttctttctctttaaataaattatttgcaaggtcttatattttattttttttaaactgtggtaaaatatacctaacaaagtttacaatttttcttttttttttttgagacagagtttcgctctttgttgcccaggctggagtgcaatggcacaaatcttggctcaccgcgacctccgcttcccgggttcagcgattctcctgcctcagcctcccgagtagctgggattacaggcatgcaccatcaggcccggctaattttgcatttttagtagagatggggtttctccctgttggtcaggctggtcttgaactcccaaatcaggcgatccactcgccttggcctcccaaagtgctggaattacaggtgtgagctaccgtgcccagccacaaagtttacaatttcaagcatacagttcagtggcattaaattgttcagattgttatacagccattaaacagtaactctccattctcccctcccctagcccaacagacaccattctactttctgtctccataactctgactaactaggtatctcagataagcagaatacagtatttgtccttttgcaactggcttatttcacttagcataatgtcttcagggttcattcatgttgcagcatgtaacagaatttcattcctttttaaggctgaataatattccattgtatgtacacacatcatctttattcatgcatccatccatcactgcatggattgcttctcttttggctactgtgaaatggtactgctatgaacattcatgtaatttcattttcttctgctctaactccaactggaatgaagctaggcccttgactaagtcttgaaagggtttgaggtctcacaacaaagggacctgggctctaccttgtgggtgaagcctgtcttagaatcccagatcccacccacatcccacggtctccataatttttctttttcttttcttttttttttttttaacacatggtttcacttttgtcgcccaggctggagtacaatggcacaatcacggctcactgcaacctctgcctcccgggctcaaggttcctcccgcctcagcctcctgagtagctgggactacaggcgtacatgagccaccatgtcctgctaatttttatattttttgtagggacggggtttggccatgtgggctaggctggtcttgaactcccgggcttaagcgatccgcccgcctcggcctcccaaagtgatgggattacaagcgtgaaccaccgcacccggcatcgtggtctccacatttcatccagaacgagtcaaaggccttgacctcgagcttaacacggacctgaacctttgctcttcccttgttttcccttatcagtaaacagccccacagccacccacctgcacaagccagaagcttggaaatcatattcgacgtcctcatgcccttacatccatccattccaagttctgatacttttgtctccaaaatattcctcaaatatttctcaaagtgggcaaaatatttctttgctcactttttacttccctctgctccaagccacaatcacctgtctcctggaagactacaaaaggctcactgatctcccagctcgcacttttgcactcactatctccaggccattctctgttatttctattgttactattattattttgagacggagtctcgctctgtcgctcaggctggagagcagtggcaagatctaggctcaccgcaatctccgcctcccaggtcaagcgattgaacctccagcctcagcctcccgagtagcctattatttatttctaaaagtaggtgatacagccatatgatttaacaattcctgctctataggtcccctctccagaggcaacaggtgctctccattccgtggtctccttccagatactgtgggcgtccctgggtgctcacctggccgtataccttcccccacccacttccccacagggcccggggcctcctcactccgcttgagaccctccatccaggcgctccctccctatcgtccgtctcccttgggcactgcccggcctcccaggctgggctgagtaggccagtctccggtcagtgattctgttccaaagctcgaaagccttcgcagcactgggactgaaacccccagctctcagccccgactccttcaggccaggtgctccctccgcaccctctctaaggcccgttttcgcgtcatctctttccagcggcccgcccgccacgtcatctctaccacagcaccagtcctccacggctcttgacaatacgtgggagggcaagttcataggtgaggtctcatgctcttcctaggagggaggagcgcggcgggcgggacccgcagctgggcttggcccgggagcggggaataagctcgctccgcgcctctcagtttagtggatgaagactactatcccagaagccgtttcgcctcgggctggcgagctcctccccgccctactccctccgcgcgaagaagactgagcatgcgcaacagggacagcgcctgcgcaaaagactacgcgagcgggtggctgggttcactgcaactcccggcaggccgctggcatttttcattccctcccgtgaccagtgacttccggcacgaaggggcggggctgggctcgtggctgagccagcagctgcagcagctacgggagtggccgggtggccggcgggtgccagccgccatggaggccgtgccccgcatgcccatgatctggctggacctgaaggaggccggtgactttcacttccagccagctgtgaagaaggtgagcttgccttccatcttcccccctatccgccgcgtatctccgtcgtctgcaagcgcgtgacgcccccctgcgcgcccatcacctcctcaggcccggtcgcagggtccggtgaggccaggaggggccttcgccggttttcctcagcctgtcccacaccccggcgcccgcaggccattcttctcctccccgatagccccgtgctagcacctgcatcttcatctgaacccggttcccgacttctgccccgagtcatccgctgttcccactgaggcagcacacttcctccttctgacgctcggacccagttctgccccgcccctcctccatgccaggaccgccccgcgcgggagcggtgggcggccctgaccgtgcggattcttttgctgcgcccggccctcggtgcgctgtcaagtccacgcccgcctgggacagacactggggatggctcaggggcgtgtgtttaagacgtgagccccggtggcccagggagatgcccgacccctgcggtgagggtttgttttacaattgctgcgattctgtatggtctcccattcgggagtctctttggaccaaacaatacaatcccacgacatttttaggagggttactgcttttcgtaaccgactggagggcataaacagtgttgtagagctcagagaaatcttactgtgttggaagaacagacgggcaggtttggcgttgactaaggcaaggaacttctgtggagaggttcaggtgtggtgattgaacacaggtgccctccgagacatccgctgtattggtagcactgagggctagagcagaaatgaaaaggaacaaccaggaggccgtcgcaggtggggggccttgtgggcttagcacagcagatgccagagtaagccccaatctagat

SEQ ID NO: 9941 - DNA, 6000 bp, Homo sapiens
cttactccaggggtccacatttcctccagtgacctctattgatagaacccgtcaggaagccagtcggtaaaggagatacacagtttgcagagtcctagcaccagccttacaaaaccagggcagaactatgaatacagagtggagagataatagtttaataaacagcactaataacaattatatcaagagtgttaagcaatggtcagagtaaccaccttccagcttaaaaaaactatacatgatcaatcctattgttcaagaccttaaagaagtataaacctctactgaatgagacatgcacttgagtatgctatgtcataataatcatttaatcatccagtttggaatctatatggcagacattattctaggtacttggggtttttgttttgttttgttctggttttggttttttttgggggacagggtctttctccagctgcctaggctagagtacagggatgcaatcttggctcactgcagcctcgacctcctgggctcagctgattctcgtacctcagccttcaaagtagctgggactacaagagcacatcactacacccggctaatttttttttttttgtatttataggagaaaggaggttttgctattgatatggtttggctgtgtacccacccaaatctcatctttaattgtagctcccacaattcccacgtgttgtggaagggacctagtggaaggtgatcgaatcatgggggcaggtctttcctgtgctgttctcctgatagtgaataagtctcatgagatctgatggttttataaaggggagttttcctggacatgttctcttgcctgccaccactttgctcctccttgccttcttccatgattaaggcctcccaagccatgtggaactgtgagtcaattaaacctctttcctttataaattacacaatctcaagtatgtcgttattagcagcatgagaacagactaacacagccatgttgccaggctcgtcttgaactcctggacccaagcaatctgccagccttggcctcccaaagtggtgggatttcaggcaggaggcactgtgcctggcctacttgagttttaacagtgaaaatatagatacttgcttgcccttgtggactgttcattctagtgaaagggaacagacagtaaattagagacatgtcagatggtaagggcaatggagaaaataaagcaagttaagggcatagggattagggtgggggaagctctttcatatgatgtggtcctggagagcctcaatgataaagttaaattttatcaaagattcaaaggaaataggagggagaaagtcatatgagcatacagggaagatctgttcagtaagaaagacttgcatttaataagagtaaggttggtgaacgttttgcaagtggatggacttttctgcgattttgcagtttgttttttattatttgcataattctctttacaaaaactgtgatcctaactggataacataagcttattatcaaatatagtacaaagttcaaatattctacaaaatatcattcatctcttttactaaaggaaaagctatgcgtcctcacacagcaggttatagaatttgctgatgttaagaagaattagctgaagtatataatgtcttacctctcctgtaaaatacctcctttgtttcagagtcagctatgaaattctaataatagtctcaaacttttcacttggattatttgagtaaatgtaaaatgcccagcactgtacataattacttctttgttaagatgtcaacctttgttttttagttaagagttaatgaaccttgataattggcaaacaatctttgagccgaaagtaggatggacaccatcagtactcttaacccaaaacaatgaaactattgttggcattaggattacattgctttctgttcagataatttttttctgaaaaaatgcatgtatactttgttattcaatggtgtcagaaatattaataagttagctataattaagtattccttaaacagtttgttattcaaacaataaatgtgaacttatgtataaagttagaagactaaaaatggcatagaacgcactaatactctcatgctaaaggttttaaaaaaattaatagtatttctgcccttgaaaaacatgagttgtatatgtaatgtaaaatctttttctgtggccagtaaaaatttccaacaggaaagcttggggtgagtatgtctaaaattcactcatctgaggagaatgtaatttaagattgggcacttttattatagaaagtagaaatttgagttatcttactttttaacttaaagaatcatcttgagagatcaatggtgtccactggaaggcaagaacttggttctggcaggaaaaccaccactggctggtagtatttgcagagcacttaacctctgtgcctaggttcttgtagctgtcaagtagataatagtaattgctaccttccgtgggaagtgagcttgtgctttgacatctttagttgaagatgctgtataaacacaaattattattattagaatataatacatatatgcacataaaacaccagcatggtgctcttttaatgcttatataacatctataaataatgctcttccatgctctctcttcactttaggtcagagaatatcatagcagaccactattcaatttctgtaagtatggaggaaatatatttgttaaagctccatgtcatctttttgagacgaacttaacctgctaattccttatggtctctgtagcaattgcccgatggcccctacccaagttaagcctttggtattttttgaaatgttggctaaattacttttcttggagatgtggagccatcagggaaaacctggaagaatgaaattggctagtgatattaaaattttggttgtttaacatttaactgagtctcaacaacgtgttaaagtgctatctaaacagataattagctagtggctgcgcagtgagctgtctaaatttagcagtgaaattaggtttagggaatgcgaatatagaaaaagaaattttctcaagggaaacggtggtgtcagcacagctgaggaatgtcacaatagctacattttgtcaattatgatcatcatcaggggatctcccggagcgatgcaggacaaggtttattcataagtgcatcttgagaataggtgatagaaagccttggctgcaggagacaagcttacaggggacgacagaggcagacaggcacagggagggagggaagaggaaagggctggagggaaaaaggcactagaccgagcgctgggagactggaagggaggcagaagttaagaaagaaaaaagaggtgggcagggtgtagaatggcttgtagccttggaggttagtaaagccttgtaatccagcgggcggaaggtgggaagaccctattgactgaaagccgaggacagcgtggtcttggccgcaagcatgcattagtttagctgcgacaggctaacttctgggcggctgatccttgttcagctttcctgttactggaacacatttatggctatctcgtggagatgacaggacctacataaaattaatagtgtcaggcctgaggactggtgtcctctgccttcaattcaccccctacgctggacagtccaaattgtccaccctcctactccccccgcggaaccaatgtggcagtggctccaaggtcaagctgccggtactgtgcgaggcgggaggatggagagggcagggcggagagccacctgggatgagcgagggtcatggtggaccacagacgctcttcttatacgggcaaatgtttaatacttcccgaggtcgcctctctgccatcaaacgaaaacaggcaagaaaataaaactacacatacgaacatgcaaaggaaacaaaaccaaagaaaaacaccaacgcactcgttgggggaaatccatggcctcctgttgccagtcgcccggcgcggaaagtggacagcccagcggccagtgagaagcaagagcaagaaagcaaaccttctgaagacccctctcctcgcccagctccgccgaccattctaccaagctgccctcccagaaaaaagagcaggaaaaatgcctgtgcaaacgtgccttggcgagcggggaataagtgggctgggaagaagggaaggattcggagagcacagctgtcccggggaacaggaaggaggagaaagtctctccctcccttcagtgccccgcgccccagcgaggaggaagattactagtccagcaggctgcgtccagcttcctacacaggaacctttagcatgggcaacggaagggcagccccctcctgccttcccctccccaccccaccccctcgtcccaggtccccgccacagggagagcgccgcccgggagaggagaaggccgagcgtgattgtcccgcagccctcgcctcagtcggcgccggggcccccgtggacccgcgaggggtggagtgggcgagaccattggaaaggcagggaaggggggaaaccaggcaggaacgaggggcggggccgactaacctattccagattttcctgtcccttttaaatctctgctgtgggagaaaccccgttatcaaagtggatgaaaagaatatttttttttgaaaggggaggagcatgtgtaggagggcggggtgggaggagacagggcttgcgcccggggatcagacgggaggtggagttgcgcggggagggcgggcgagtcgggcgcccgctctgagagtcggtttcttttccccctcttgcgtggggcggggtggtgcgttccgagttcccaggagttcgacgcgggcgggtgccgaggggaggggagtggcggcggcggcgggcggctcccgcttcagcctcggcagtggcgtcggcgacggcggtgtcgaggcagccgccagcgttcggccaagtgtcagccggcagcgacggcgctagagctgggagctggggacgcgcgcgccggaccttccacagcctccgcccagagcctgaggcgccggggccgggggagccggggggcgggcgggcgagcgggccggggggagggtgggggatggcgcggaccctgcggccgtccccgctgtgtcctggaggcggcaaagcacaactttcctccgcttctctcctcggagccgggctcctgctgcagcccccgacgccacctccgctgctgctgctgctcttcccgctgctgctcttctccaggctctgtggtaggtgaacctcggcggccggcgtgggctgagggagccgccactgagggtgcgggcgccgcggccggctctgccagccgttctctggagcagcgaggcggttggttgtgcgagcgagtgccgaggactttggctggaaacttttcgccgcgcccggggcgaggccctggaagggccaggccagcgaatgctgagccggcggcccgctgccctcccccgcggccgcgcgggtcgccgtgcggatggccgagggttggcgatggtgcttcgtgcgccgaactccgggtttgctccggggaccgttacttcctcgctcattctctgggaaccctcgtaggttaaggtgccgggatgcacgtttgccgctttttttcccggtgaaacttgagctgtgagcccagaaaccctagggaccggagcccgatggaatgaagcctccgggtccacttctcatggccttccaccctggagaaggcaccattttagcccacccagccgcagaatcccctacagctagttttcttctgtcttgtgcccactcccccggctctgccctgacagcttctggagctctctagattgaccctcgtccctgccctccagcttgtgggacgtctctcacactgcccgtgcttattttaccaaaccgcaggaacaagatttacgtgttaaatacctgatttcatggactgtgtgccccggctgttctaaccaaaacagtcacgcgcctgtttcccatctcttgaccctcgtgttatgttactgttttcctgtcatatttgggagttagtctctgagt

SEQ ID NO: 9942 - DNA, 6000 bp, Homo sapiens
ttcatgttacatgtatttttaaatccaaggaaatgataaaccataaaaatcaggatagtggccaggcgcagtggctcacgcctgtaatcccagcactttgggaggctgagatgggtggatcacgaggtcaggagttcaagaccagcctggccaaaatggtgaaactccatctctactaaaaacacaaaaaattagccaggcatggtggcaggagcctgtaattccagctactcgggagactgaggcagagaattgcttgaacctgggaggtggaggttgcagtgagctgagatggtgccactgcactccagcctgggtgacagagcaagactccatctaaaaaaaaaatcaggatagtgtttttgtgtgaaggagaggcaaaaagatgggctaggaaaggagcacccgggaagatgtaggtgttggaaatgttctaggtcttgggttcaatagtgggttcatgtgtgttcatcatgttatgaataaatacatgaattaataagtcccatacttgggctaatgttgacaatgtgtcatgatcaaggattatgattaattcaattctgatcattcaatacctaaatggaagacagaaatagagagggagagagagaagccaatggagctggcctttcttccttttttcctccctcccttcctccctgcctgcctgtctttcttttcttttcctttacctttaattattccacaaacatctactgtttgtcgactgtataccatgccccaggctgagaactaggaacactgggatgaatcagacacagtcctgccctacagagtcaccatgtgatgcaagagtctgacaattccccaaatgttttcaaggtgctatgacagatgtaaagcaacaaggtgtggtagggcttacagaaggggcccttaatccagcctgggctatttgggaagactgtggagctttctgctttgagaaattagcaagaagaaaatgtggttgggggtgtaacagctataaaaatgaaaaagacagccttgcccttgaagtgctcatatcttggggtgagggacaagaaaggaggtcacaacagtgggacttggggttgtgagagaggcaagcacaggcttgagatgcacataggagggcaccgtgctgtgcctgcagtgttgggaaggcttcctggaggagatgacatgtatacaagcagagagacgaagtatgaattagagttacctggaaagtctgtaccaggaagaaaggtaagcacctacaatggcctgtggcagggagaaagagcatggaggagctcagggggccccagtgtggcctggcccagagcgcaaatgagaggaggtgaaactagatgagtaggcagggagccagattccatgaaaaagcatgaaaattatgctgtggaccatggggtacctctgaagggagtggcaagggtgatttttccttcatgaagagagcccagcagtagaggtgagggggccgctataactgctagggaaagagatggtgatgcttgggctgtaaagaggaacagaatttgagagctgagcacctgatggacaatgctgcatggcaggctgggctcaaacagggttgctcctgaggggtgggcagaggacattcaaacctcacacaacacagttctgtcttgccacagacctccttggagcaagctgcaagctccaaaatttctcagaactgaaagtttttcctccaacttctgtaaaaccatggttaatacttttacaagacagagaaggagtccgagatttcaatagctaaaaactgggaagtagaccgaataccattccttgtgggagcaaaggcaggaggagtgaggttcagagctttgctttatccaaggggttctggacccctgactgcagcagctccctactggaccttctgccccaggcattactttgccttagtccaagaatcccacgaatgctacagatcttggtctactcctgagaagtagaaggaaaaagatttattgtgcaccgactacacgacaagctacaacccacaactgtactctagggacattcttctgttcctgtttagaaatgagaaagctaggacccaaaggcttggaattgagatttaagcccagagctgtctgactatgcccatgcaatactgtacattctttagagcaatactgtggctagtttttcacggttgcatttttagactcactcttggacagttaagaacatcttgcattagttacctactgctgaataacaaattactccaacatttagctgattaaaacaacaaacatttattatcttacagtttccatgcatcagaaatctaagcacaggtagttggtttcggtgattcacgatctctcatgaggttgcagtcaaggcatcacacagggctgtattgtcctatgaagggctcagctcggcggggcagagatctgctcccaagttcactcatgtggttatcggtaggtctcagtcactcaccatatgggcctctctccacagtgccactgcaggatatagcagctggcttctccagagaggtgatcccaaaagagagcaagagtgtatgctcaaaacagaagccacagtcttcttataacctaatattggaaggaacatcccattacctctgctgtattctgttagtgagaagcaagtcagtaagtctagcccacactttaagggaaagggtttacacaagggagtatataccaggagtcagggatcactgggggccatttagaagctgctgatctcaatctaaagaattttagtagccaggctatcctggcttctccccaaatggcaagttgtttcccttgttatccagaggctggaggatttgggggtctacagggacacaagggggccctgttttggcccactcctttgtgcctggggcataatctcattgggaaaggccagtgtggtgaacctaactggagcccccaagggagggggggagttgttttctcaaattgtggccactgctccctccctcccttatccttgaagctactgtgatgcttcccagcaccgagtggaagcaacgggcatcctccacacacacacccagcctgtcagccagatgggtagagaaaccatcagcatgaacgtctgctttaaactttcctttgcttctgagcttctttccacaaattttcttttcttgctccccaaccacatccataacccccacagtagctcacagtagaggtgctccaggagcttgtcaataggaggtaggaaggaaagacaccaagtgtgaatgtaggtcagcactgccacttagggcagttcaaatcacattcactgtcctcagcatctatcctatgctggtgcagggcatccagagatgtgtgaggtacctatacttgccctccagggggggctcacagttttaggaggggcagacatgcaaacagacagtgatgaaacgttagaataagtacaataaatacgtgtcaatacacacttttgtcacctcatcatggttatcttggttcataaagcatcatcttatgcttagactattacagtagctgccaacctggtttcctccatccatccatccagttggctgctaagaggtctttctggaatgcaaatccgacaaggtcactaccctggttaaaggcctcccaaagtgatggggaaggtcaagctcttgatacagtctccacccaagaccctagacaccgtccatccctccagttccgtcataccccctctgctcatagcacaggctctgtgctgtgataggtagctctccaggtgaccatgttgtacccctgcctccaggagctaattcatgtagacacatttactaggaaacattcccagttgccctttccagtctgacaaattcgccccagaacctctctcaaaacgtttccttcatagagttggattgtctttacttgttttccatgtccttgatgaaatgcgcactctgcatctagactctgtctgcatctagactctgtctgcatctagactctgcctggtacctggcacagagagggattgggttagcaaatgactgcgtaatggacctaaagtcaattctgggagcacagacgagggccaccaaaccaagaactttcaatttccccaaggaagcgcagataccagaagcaccctcgaggcttctgttttggccacgccctttaccccatcgctcagttcaggctcccaatgaggcggcccaccatcagcgctggtagagcaaagagaccgacttcctgcgcctcgggtgggcggggaacgctccttgagcaggtgcggtatgaaattggactttaagagatgagttggagcctgatctcaaaaataaagtgtggacgtgtgtgtctgaggaagggggataataaaccacccttttttcctcctggctgctatttcccacgtgcgttgagtaaaggcaccaaagctgcctagtgactgggtgtctcctccccgtcaggggcacccaccctggcgctccaggagcgcttgaatgaatccgggaggacccgcgcgcaggaatgaatgcgagagctagggagtgagcgggcgagtgggcgggtgagtgaatggcgaccgcgccgccgccttggcacaggggcgcgggcgcgggctccacttccctctcccgccagctggtggcctcgagaaggtggcggcgccggcagcggcccgagctgggacggccggggcgcgggatggtgggggaaggggcgttcccggcgaccgcgccttccgcggctattggattagtggccttcagggatgagctcagccagatcggctttcagctgcagcctccgggccggccgggaaggcggggagcgggcggcggcggcggaggagggggaggcggcggcggctgcagcatccagagctggccgtggcggccggcgcgccccgcgcacaaaagcacccagccccaggggagggcgatgaacacaccacatcccgggcccgggccccagctgctgctaccgctgcgtgcgctcagggcgctggggaagacgcccggcgcgccgggggccagcggccgaggcgcggcccgtgcgccctgagcgcgggactcgtcgccctccgggtcaggcgccaagcttccaagcggctagagcgcgggccttggagcgcccccaggatcgcttcagtaaggcgcttccccactccaggcccgacccccggcgcctgagcgccaacttcgccaagaacgctcctaactccaggccatcctgcagcgcagagggggcgctgctgccgggcatcagccgtgaggacgcgcccctggccgtgcggagagagccggcatttgcgggtcactcgggcgcccctgagtgggcggcggcggcagcagacccctctccagggagtccaggacctgccagcgctggggattcttcccgaacaggcgcttgccctctcttttatggtaagtactctccagctcctggtgaggggcgcgcgggggccgggagccgagatccggctgcacggactttgtgcgggccagcactcgacacagctggcgctcctgacgtcccagtccctgagaattcctctctgcaggttgtggcagttcgagatggttgatttgcgcgcagccctggggcgtttggggcccggcctttggtatcatgggttctaagccctttgcttctctgcgtagcggacaacgcacaaaaaactgccatccgattcacccgctttggtttggatccaggatccgtcactcactggctgagtgaccttggacagggcgccaaacctgtttcctcatccgtaggatgggaatgataattgtgcacattttataggggtattggaaagatctatgggatggtgttcgtaggtagacatgtgctgggcacacaggaaacactcaatcatatgttagctagtattattattagctttgcgagcccaagcttgttatccaactttccgaagctgcagcagttccgtcgtccgtgtaatggggacaataattcctgggggtctgttcgtccg

SEQ ID NO: 9943 - DNA, 6000 bp, Homo sapiens
tttccttttttggggagtttaaaataaaggggaaatttttctgttttgatttagaagtaggcatgagacaaatacattgaaatataatggggatgtaagaaaaatggaaagtaagcaaactgcctatagacaatctgttaacaaaacacagtatatacacctggacacgcaacaatcccatgaggaaagctagcaactttaattactttacctacaggcactacactgagaattgtttctttccacttgagtggaattgtgctgctatgccagagtgagctgtcaggagttttgcttctcttataccagaactgtcttcaaaggctcacctttatgtgttatgtaaatgataattaatacatgtaacacattgacaacaataataagcataagtttgggagtcagagagattctaggtttgattctggctttgctagtcgctaactcaatggcctgggaacagcagcttcacctctggagccctacctactaatctgtaaaataggaataggaatagtaggaccactcccttcccttcccttcccttcccttcccttcccttcccttcccttcccttcccttcccttcccttcccttcccttccctcccctcccctcccctcccctcccctcccctcccctcccctccccttccctcccccttccccctccccctcccacttcccctgccttttccttcccttcccttcccttctcttttctcttttcttttttctttttttgagacagagtctctgttacccaggctggagtgcagtggggtgaccgccgctcactgcaaccttcacctcccagattcaagcgattctcctgcctcagcctcccaagcagctgggactacaggcatgcaccaccacgcccagctaattttttgtttgctatgttggccaggctggtcttgaactcctggcctcaagtgatccacccacctgggccctcccaaagtgctgggattacatgtgtgagccaccatgcccagccaggaccacagtttctgatgggtaaacatcctgcctctgctcctagccattcttcactctcatttaaaaaatctgctctgctgccaggtgcggtggctcatgcctgtaatcccagcactttgggaggccaagatgggtggatcgcttgaggccaggagtttgagactagcctggccaacatggcaaaactccatctctactaaaaatacaaaaattagccaggtgtgggggcatgcacctgtgatcccagctactcaggaggctgaggcaggagaatcgcctgaatccgggaggtggagattgcagtgagcagagatggcgccactgcactccagcctgggtgacagagcaaaactctgtctcaaacaaaacaaaacaaacaaacaaaacaaaacaaaaaacaacttctctgcaaatgattgtgtctctgcctttcaccaaagaaattttattcctcacttcaaactttttgagagggtcactgacctgagcatttgacattcatcctctgcagtttggatgaacctgaggaactggtctccgatttagactattgaactttcaaggtggagaattgtggcttgcagagtgtgttcatggtgggcaaggacagaaggctggttagaaaatgcctgcactagcgtatgtacaggcaaaggacatttgtgtatttctggcagaccaaatgtagggagagaaagccagccatgagctatattgaagggatttgcccaaaagcacaaatggataccaactgtgagggactccttgcagaatgctgaaaatcagggctttcagagggaacataagcagttagggaatctttgagaaacccttgaatgtgacccaagaaaaagggtcaacttttaaatacctggtaaccctcaaaagcagcagtgaagactcagctttatacttggaggatatagcaccatatgcttaaaatggtttgtaattcattcacctttctccagccacatttcaaccccatttccctggatagctatacaaaacttccttaggaacctgaactcatcccttcttgctaggctgaggttcaaggctgggacctatttggggagcctctggtcttctctaatttctgttccatgcaaatttttcctggtcccagggaatcattagctaggtaaagataaaataccccttaggaacagtatcagctagaacccacattattcaacgagaatgtttgcctgctatattaaccagcaccacgtgggaaattcaagcactgtatagaacacagtgggttacaggttaagcccatcatgatgagctgatcttagtctgcttaaagacctggaatggaagaaggggaccaggaggaaaaggtgagaatgaggcaacaagactattctgtgtgacacattcaaatgcatgccaataaataagtgttaagataataaaaattaagtgctaagggcactaaaaagccaaaagatcaccttttgccaggggaatttgaaggggctttgtacaggaatccgtactctgaggactgtagaggtgagtatttgaagatgaagagcctgggaattccatattaggaaaggaagctaactagggcaagaggttaaggagaaaaagctgaattgctaggtagggggtagattacaaagatttcccagggtaaggagccaaatgcccatgggaaatccatgcagtaaaataatgattcctaggggaagcttctaagcatattaaagttttcaatatttatttattttgtgttgagagggtcaaggaattcatgccagactgtttcaggagagggagttaagaagggacaacaacagggagagggctattattttcccttcttcccaaacaccaggggcacactactgacacattttgattttaagataaaattcttatgggcagataagattttaagtgcttcaaagtgtttcagttggaggcgcttgcttaggcatcccaagggaagaactgagattacatttctcccccaaactaggggtgtttgattcagtagcagcgcaggctgttattcccaaagtaccactaatgatgcaatcatcagtccatccacacatcgcctacctatcatccattccataagccaacatttttgaatgctcaccatgtgtcaggtcccatacagtgtttctgagttgcaacaatgagtaaaactgtccttactagtgtatgtcagtgagttgggaatgggggagaaagatgaaacaaaaatagtaactttaatttttatagctgagagatgaatatttgagggctccttatatgatttcttcagctttttgtatgtttaataatttccctaataaagttagataataaaaaaaaccctttcggccgggcgcggtggctcacgcctgtaatcccagcactttgggaggccgaggtgggcggattgcgaggtcaggagatcgagaccatcctagctaacactgtgaaaccccgtctctactaaaaaaaagaaatacaaaaaaaattagccgggcgtggtggcgggcgcctgtagccccagctacgcgggaggctgaggcaggagaatggcgtgaacccaggaggcggagcttgcagtgagccgagatctcgccactgcactccagcctgggcgacagagcgaggctctgtctcaaaaaacaaccaaccaaccaaacaaagaaaacaacaacaacaaaaaactgtcctttctttcaaacaagggagctacatttgatagatgcctgtatcacaagggcaagtccagccatgaaattaatcccaggatattagtggaagagaagaccctggggcaagatggggaaggtggtcaggaaatgccctccagtgaagttaggtaaatgctctctagaagtaattgttcagattaaggaagccaaaagctaaacacctgactcagcctcaaactgggtttggaggtgctcacaggtcaggatcaggagtgaggaactagcctctaccacattaccttcactttatttatctccttcttccccctttgcttaaatgtcaacgaacatcaaagttgatgttcagattcaaccagcatttccagagcacctactatgtatcaaaggcttccggttagaatctgcctttaccaccttacagagagggaaggccgagaatgcctcaagccgtggagaacgtgagtccatcaggcaaggacaggttaggaacccagtccctccaagtccaagtcagggaaaacaggtcagaaacttagaatcagtcgtgggttcaaattccgactcgtttcgtggctttcggcaagtgagtggtcctctctgagctggctcaatttctccatccataaaaagggtacagtaagaccgtggaaggttgtaaggaccagagattctgactatcaagatcctggcacgtagcgaaggctccataaatggcagccatcattcttggccaagtgcgggcgcattctcccgggcacgcctcccgcggggtccctcaggacaggccgagcccgcctccgcggctccggtctcgcagagctcgcgccaggtggcccagcatcttggtgcccgcgccccgaagcgaggagcgagggcgggttggatgaccaaggtctgccctggaggatcaccccccccgccccttccacgctcccggcgcaggtgaggttttcggcccaggccacggggaccgcgacctctggggaggtcgaggcggagggtgcagcggggggcttggagcagggctccagagggcgctccctccctcgcccaggttcaccccagggccagcctcggcgccggggcccgcgggctgcgcgctctgcggctgcgaaaacccggagaggcggattggagcgcgctcaccgcgctctcagccaactcctccgcggtccggccgccgagctgggcatgctcagtgcggacgccgcgccgccgtccgccaactcggaagctcgcgctcccgggccgtgggggcgagaacgccggcggcgagccggcgtcgctcgccgcccccagacagtggcaaacttcgcggcgttcccggagctcgtccgggcgaggcagataccgcacaaataaaatcaaatccaagtcccccatcccaacccgaatgatggaggctgcggcggccggagtgaccccgccgccgccagccccagcccgctagccgcggaccaacaggtaaagtgttgggggttgggggcggaagggaagaggagctggggccgtggggaggcggcgggctggaggagcccgagacgcctgcgggctggctgcccccgtcggcgctcacagccatcgctcctcacccccttccccagcccctggagggactgtaaagggttaagtcggccccacgccaccgtgagcacggccccctccagccgccgcgaccgccagcagcgcgcctcggcgcctgcccggagccgccgaggggaccgtagctgcggatgcgccactggaacctggcgggcgtctaggaggcaccggccgcttcccaccggccgcatccctgcgtctcgcgccccctccagacctgcctctgcctgcactggcccggtccgtgtccaggtggcggggtctgcggggcgcgtggcggcgggggaagggtccctgccggggaagagaggcgggggcggtccgctccacagcttcttcccgggaggggagggccaccctcgccttgggcgagcacttcagccaccagcctaggcgccaagaaaagtttttttttttttttttccagtgccccacccccacccccatcctgcgcccagctggggtgggtttgggtccattggtgaaaaaagtcacacgttcccatcagctgctcctccccctggagacaaggtaggggggagcagaggaggcaggcgccgcggaggaccctggccgacctctagtccctccgccgccgccaccggagcggtgcgtcccggggctcgagcgcagccgagtacccgccgaaggctgtccccatcagtgcgtgtctgctgccgggcagcggcagcatccaac

SEQ ID NO: 9944 - DNA, 6000 bp, Homo sapiens
acattgattattgttatttaattcattgtttcttaaactgcagattacaatgcattagtagtggacttaaatacaaagaaacagaataaaattgaatgatcagagagcattgctcatagtaaggataagtattactgtgggttgtgataaatgtacccaacctgtgagttttaatatttgctctttttgaataatttgaagcagtccttatagcttatttgaatgtgcacaagaagactgagaaaacgaatggaactccgtggatgtgggtcaagtccatttggtttcaatgtctgttctatcaccgatgagcaatgtggtttagcaggcgacctaaactctgtctcaacttcccttttgttaaaaaaaggggatttcttgtatgtatctcataagaataagtgaagcactttgagctacgtagagtctagcactactaattcagcatctctcaatttatggtttgcaaatcatagctcggcaatatcatagagctgttgccaagataatagttcttcccatttttttttttccaggagaacgtcagagaaaaaagtttctgatttgcaataaattaaactgcttaactttctaaacacttatgaaattcctagaattgataatgaaatacacttaatgtgactattacattgattttagaattttttgcaaattaaatattgaaaattcaaacatttctaacatgatctttctctattttaccatatctggctactcctttttgtttttttctctttccttccagttgcatggagcctaagttaaagcctgaaaaaacagctaggcatggtggcatgcacctatagtctgagctactcaggaggctgaagtgggaggattgcttgagtacaggagttcaaggctgcagtatgctatgatcacatctatgaacagccactgtattccagcctgggcaacatagctagaccctatcttatttaaaaaagaaaagaaaggaaaaaaagctggaaaaaaataaaaggaagtgctgcatgacactattcagggagatgaggttaatagtttttaagcatgtggttttcatcctattttataccttactataaggtataaaagtagaaatagggaccttgtagatccagtactgacttggcagataagaggagaaagcagtccagaggagaaaccctactcaacgaggggaagatactgtgcattggcagtaacagtaacacaaaacaagtatggaggaataaagtgtaaagggaagaggacaggtacgaaaatgattaaagtgctgtgaagaagttatagatcagaccgggtgctgtggctcacgcttgtaatcccagcactttgggaggccaagtcgggcagatcacctgaggtctggagttcgagaccagcctggccaacatggtgaaaccccctctctacaaaaatacaaaaaatgagccagacgtggtggtgcgcgcctgtagttccagccacttgggagctagcaccactgcacttcagactgggtgagagagccagactccatctcaaaagaagaaaaaaaaaagttaaagatcataattccgaaaaaaagaaattaacgaaaagctacaggaaaaaaatgagatggaaaaggaaatggttgacattcttttgtgaaactgacctcctagcatttgacttgctgctaaacaaacaaaacaaaaccttttaaacacatttttttaaatcgaggctcaaggaaggaggactttggcagaaggaccatcagagaccataactggtttcttttctttggaaaagagcagaaggtgtaaatgcaaacacaagccagtgtttgcatgctcaattaacatttgaatttcttccccctccttcataaaaataaaaataatttatgttgaatttttgcatcttaccctatcctttctcatttccatcttctttgtaattaatattagtgggtcattatcaacagatcagtaaatggagacaaaagaaaagcatttgcctcaaactatttatcaggtcacagaacagagctggccttcgagtttgtaacctctccattcttggtctctgttatcagacagccataattaacgaagaagacattctagactacctagtaccagttaatttggatcttgtatctgtactatttaatggaagaagatgaaacaataggtagtccccacccccaatcatttgaaattctcatgcgcagacaagcacactctcatggtggtcttgctcaactcctgctggcagccaagaaggtgaggtgggaggtcatgcaaaatccacctaataactacataactatttgttgaccaatcctttaattgacttttcgacactgatgaagaccatgagcctgtggaattacaaaattcattacctcgcagtgcttattttttctaaggcctgcattttctgtgtctgtgcaattctgtatttggaataaagaaccattatcatttgtgttcaatgtcgtatgatacatacaatcaattttactgataacttctgaaaatccttaagtaggcctgcaaaaatgtgccttcctgtgagcctccccatctgcctcagatctatgtataaatggaccccgttcagtttcacttgctttcaaacgcgtacctttgaggtttgggaattcaaggacaaaatgattttaatttgatgcattttgtactttgaccaataagggaaaaataaatgccctcaaatttgattggttctagtcatatttgccggtcactatttgtcaaaccattgcacttaaaatcacaggcatgaaagatctctcaaaaacagatttctgaggaatgcaaatcaacagaacggggaggcggattaatgtgtttgatttctcaaaagtctatttactgtccaatttatcttcgtccttggacatgctagcaagtaattattcttatggctggtaaaatgactgctaaacatttattaataattgcagttttggaattacttttttattaaccagtcatgttggtttctaaaaattgttacttctggctagacacaggagccaggtgctgagagttgacctggtgccaagtttcaggactgtccagtcttcacatcagatcttcagctaggccttctgaatattctcacagttagaaaatctatccccctagactcgcagatgctgtttttcccccactggctctgcacagaacatcattatctttgccacgcttctgtctctatggcaataacagatggaaagtgctgtggaattattcatgttcaggaaaggaggcagtcaagaaggaagaaaaggtgggggggcggggtggagagggggcacgacctgggagctcggcggtggaggcctaaggaagggaacttgggtgggggtgcggggagtggtggggattgagaggcttgtgagcctttcggaggcctgttgtgaggaaaaaaaaaataaaaagtacgagcacaagagtatttccagccggccgactgcaaatgtgggcccccacaggaacaacccgaagcagtaaaactagaagaaattggacgaaaatgggggggaaaaaagggacaaagctcgagtctcctgaattttgtgcactgctactcggtggactatttcagttcctgatcttgtggtggggtggagaaaaggggatttcttggtgtttcgaaatgtgacggagcagctctgcagagttcaatatgctaatcggctaccctgggaaccaggaagaccaccctacacgcctcagagggtcacagccggaaagctcttgagtcctatcttccctacctcgtctcgtccctctccaaaaaaacacacacacaaaaaaacaccctcagtaaacactgtaaaaacctttaatttatagctcccttctggaaccgagagagcagcctggtggggtggaggcaggaggctggggagtagggacagaaatgtttgctctcggttttgccggaactttggccacccctcccgcccggcccgatggcggatggaggtcagccaggggaaggcgtctgggtggaggccgcccgggcgaggccggggccgccggggcggggcggagcgccggcagctggctgggcggccctcgggcaggaggccccgcgggggcgaggggcagcccaggagggaggtcccgcgggggcggggagcagagccggccccgggggccctgcagggcggccgccgcccggctgcctccggggcggggcggcccagctgcggccccgcagggggagggtcgcccgtgcctgacctcgggcggcggcactctgccgggcgggcactgcctccgccctgccggctgctggggtcgcgcacagtgcaccgcgcggctgccctgccccctcttccccgctgcgcggcgtccgagcggccagggcgcccccgcgtctggcccatcaccacagagcggcgggtggggcgggggcggggcggtggccccagacagccggctgggcgactagaggaaggaaggagggagggcggcggtgagggtggggtggggagggaacatcctgtctgcgccgggtgcaccgcagacagcgccgcgcgccagcttcccagacggcgcgcggggccagaagcgccgggcgcgcgcctggggggaggggcacgcgcgcgagacgacggggccaggggggcgctctgaggagccacaataggccagacggcacgcgcgtccacgagggggccgggagccgcgaagtggcggcggcggcgacgacgccggcgggcccgcgcgcgcggcgccgccgctggctccgttcccttcccctccccctccccgccgccctcgctctcccccgggcggccggagacggcggcggcgtctgcgggaagctgtgtgtctccgcagtgacgtgggcgggccgaggactcggtgacgtcagagggctgtgtgtagcgatgtgtgtggggttcggagccgcgccggcacagccgaagggagcgggcgagcggcgacggcggcggcggcgggcacaggtgcggctccggcttacggcggcgacgcggcggaggcggcgggaggccagaggcgctcaccctcctaggagcccgacggcggcgacaggggcggtggggaattcacaaagctcgtcgagcttacccgggcaccgaggcccgagtagggggtttggatgcgcgggtcccgggtggggtcggggccagagggggtcgctaggcgggtgttccacggctgatcacgcttcgttggccccaggcggtgggcgccggcagggcagggcgctgtagttgacgggagccgcggggaccccggagacccggacgcccgtcaccgcccccctcccccagtccagcagcgctccgcggggatgccctggtctcgacccggtccgtcagcccccggcggcgcagggatccgcgcccggcgcctaaactgccctggtgtcctcttcgttctggcccggggctggcgcggggaggtgcagcattaggggcgctgaggtgacacccgagaacttcccagggagagggtgcgcgggggggtggatttccacagtccttcccgcggcccccgcgggggggcggtgttgggagggcacttggggttatcccaggctcgccggtgggggtggggggactcctccctttacttccctccacccccttgcacacccacccccaggcttcccgtgtcccttgttctccctctctccgggttagagataggtgggtggctttgagtgggcggaggacttcagggttttaggggctcccccattctaggtcatgcctcttgctctcttccttggcctgtgttgagtaaggtgtgttcctgtggtggacgaaagtctgtacgatggttggtggcattggtccttaatcctttgggtctgttttaaggtaaagtgctgagagtttgggaagcaaaaatttctatttattggatttcttttggcttttctctcaagaaggaagtggaaaaagagtcttttctttttccctcttcctccatttgcattctttgtgaggtttgt

SEQ ID NO: 9945 - DNA, 6000 bp, Homo sapiens
accgtatcaacaatggcagcatcaccagacttcaagaatttagggccatcttccagtttcttaccagaacagcgatcaattttttccttctgcacaggaaacttgcatgcaatgtgagccatgtggcaattcagtacaggggcatagccagcgctgatttggcctgaatggttccggatagtcacctgagcagtcaagccagctgcttccattggtggttcgtttttgctgtcaccagcaacattgtcatgacgaacatccttgacaaacacattcttgacactgaagcccacattgtccccaggaagagcttcactcaaagcttcatggtgcgttttgacagactttacttcagttgtaacgttgactggagcaaaggtgaccaccataccaggtttgagaatgccagtctccactcagccaataggaacagtaccaataccaccaattttgtagacatcctggaggaacaggcacaagggcttgtcagttggaccagttggtggtaggacgcagtccagagcctcaagcagtgtggttccactggcattgccattgttaccggtgactttccatcccttgaaccaaggcgtgttagcacttggctccagcatgttgtcatcattccaaccagaaattggcacaaatgctactgtgtcggggttgtagccaattttcttaatgtagtgctgacttccttaacgatttccttgtatctcttctggctatagggtggctcagtgtaaccattttgttaacaccaacaattggttgtttcacacccagtgtgtaagccagaagggcatgctctcgggtctgcccattcttggagataccagcttcaaattcgccaacaccagcagcaacaatcaggacagcacggtcagcctgagatgtccctgtaatcatgtttttgatgacgtctctgtgtcctggggcatcaatgatagtcacgtagtacttgctagtctcaaatttccacaaaagagataccaatgatgataccacgttcatgctcagctttcagtttatccaagaccgaggcatacttgaaggaggcctttcccatctcagcagcctcattcttaaatttttcaatggttcttttgtcaatgacgccgcatttgtagatcagatggccagtagtggtggacttgcctgaatctacatgtccagtgacaataatgttgatatgcgtcttttcctttcccatttggcttgggagttttcatgacacctgtgttctagcggcaaacctgttgcgaaaaacagtactgtcactttttaaaaaaaagaaaaaaaaaacaacaacaaactttccaaaggggcagagattctccagtgataaagagtgatgctgaggacagcagaagggtgaatcctatcagtatccagctgagtgaggctaagagaaaagggccttatgcttacaggaactggggttgctgcagtgaacccagacattttaagttcagaatattccatttaggctgaagcaacctgggcgatcttaggctggacaggataaccgttactgccatttttactgttatttctgcttcaatttactgctattaattgcttaagatgggcaaggcactatacatatattatctcaaaccacataagactcctgcaagatagattttaccctcccaattttagagataaggaaactgaggctgagagggtgacgtgattcttgtagaaagaatttggtcttagacatttcttaatacattgtgctacctcaatctgtaaaccttcattgaggcgactgctctctctttgctctgtaagccacttattactttccctaaagccttccctgccagaaataattctagaataaaacaggttaaaccactgatgaccttggcccaattaatcttatcatgtctggcttccatcatgaaccaattaattacatacattaatctgataagacctatgattacctacacatggaatggtattttgaaattacttcccaaggctatttaagaatcactattataaagacacatgcatgcatgtgttcaccacagcactattcacaatagcaaagacatgaaattgacctaaatgcccatcaatgatagactggataaagaaaatgtggtacacacaccatggaatactatgcagccataaaaaggaatgagttcatgtcctttgcaggaccatggatggagctgggggccattatccttagcaaactaacacaggaacagaaaaccaagtactgcatgttctcacttataagtaccaactaaatgatgagaacacatggacacatagaggggaacaacacacactgaggcctatcagagggtggagggtgggaggagggagaggatcaggaaaaataactaatgggtactaggcttaatacctgggtgatgaaatcatctgtacaacaaacccccacgacacaagtttacctatataacaaatctgcacatgtacccctgaacttaaaagtcaaaaaaagaggctgggcgcggtggctcatgcctgtaatcccaacactttgggaggccaaggcgggtggatcatgaggtcaggagatcgagaccatcctggctaacatggtgaaaccccatctctactaaaaatactaaaaattagccatgcgtggtggtgggcgcctgtagtcccagctacttgggaggctgaggcaggagaatggcgtgaacccgggaggcggagcttgcagtgagcagagatctcgccactgcactccaccctgggcgacagagcaaggctccatctcaaaaaaaaaaaaaagttaaaaaaagaatcacaaaagaaattcttaacattgaaagccaaagtcaaacacctacagaggccaaccaggtaacataaatgaggagagctgctcaggaataagacaggaggggtgatggagactgtggtgatctagagtgagtatgaaccatccaaagggtttcactacttctgagctttggcagattgttgtcaagcagaaacgtgagcctcatgttgctagatcttatttttcaaatgaagccagaaacagtttttatgtgaaatctcaatgtttaagtgttacacaactaactttaaaaaaagaaaaaaaaaacactagcagggccaaaaataacataaactttcaggctaatagctcatgaccttttctttaaaatcataagtcagcagctgggcgtggtggctcatgcatgtaatcccagcactttgggaggccaaggcaggcagatcacctaagtttgggagtttgagaccagcctgaccaacatggagaaaccccatctctactaaaacaaaacacaaaaaatacaaaaaaattagctgggcgtcagccatcccattactgggtatatacccaaaggattataaatcatgctgctataaagacacatgcacatgtatgtttattgcagcattattcacaatagcaaagacttggaactaacccaaatgtccatcaatgatagactggattaagaaaatgtggcacatatatatcatggaatactatgcagccataaaaaaggatgagttcatgtcctttgtagggacatggatgaagctggaaaccatcattctgagaaaacgagcgaggacagaaaaccaaacactgcatgttcccactcataggtgggaattgaacaatgagaacacttggacacagggtggggaacattacacactggggcctgtcatggggtggggggagcggggagggatagcaataggagatatacctaatgtaaatgacgagttaatgggtgcagcacaccaacatggcacatgtatacatatgtaacaaacctgcacgttgtgcacatgtaccctagaacttaaagtataataaaaaaatgaaaaaaaaattatctgggctttgtggtgcatgcctgtaattccagctactcgggaggctgaggcaggataatcgcttgaacccgggaggcagaggttgtggtgggccaagatcgcgccattgcactccagcctgggcagcaagagagaaactccatttaaaaaaaaaaatcataagtcagcttttattttaaaaaagtattacctctgccaccaccccctactccactaatcactcccttcattgggtagacctgggtccagattgcttttgaaacactaaaaaggcatagcaaatcagctttgagaagaggaagcagaaatatgtcatcactggagcagtgctaatggcttcctcatactttaaagtcttaactatactgaagtcatgtttaaaacctcagtgtatgaagttgcttatattaatagggacccccctccccccaacacgctttcttttttgaaagatggcagtagggggccgggcatggtagctcacgcttgtaattccagcactttgggagccaaggtgggcagatcacctgaggtcaggagtttgaggccagccaaccaacatggtaaaacctcgtctctactaaaaatacaaaaacttagccaggcatggtggcaggcgcctgtaatcacagctacttgggaggctgaggcaggagaatcgattgaacccgggaggcggaggttgcagtgagccaagactgcaccattgcactccagcctgggagacagagggagactccgtcgcaaaaaaaaaaaaggaagggagggagggagggagaaagagagagagagggagggagggagagagagagagagagagagagaaggaaagaaagaaaaaagaaagaaaaagagaaagagaaagaaagagaaagaaagaaaaagaaagagaaaagaaagaaagaaagaagaaaggaaaagaaaagaaagaaagatgacagcagggtctaacaagttcacgtgccacctggaggcagtggtagtcatccatgccttctcggtgaggcactgtacgccagagtgactttaaagtatgaggaagccattagcactgctccagggaccacatatttttgcttcctcttctccaaactgatttgccatattacttttggaggctagattcaggcccagttaaagcacagggtgagttattcctctgtgacattcttttgtcaccaaggggtcttgttagagaggcggttaatgccagctgatatatatattattcaaaggtagggctcaaggtgtgatctgaggttttttaaaggttaacatcatcatcaagtacccagagaagtgccaaagagaggaagatggaaagaggctggttccatgggaaaggattcctccttggcttcatcctccacctgctgctgcaagtaccttaagataagagcaagagctgagcagacatgtaactcctgggaagcagagaaaacaggctaatattttttattctgagatagtcaatgattggatgttcgttatggtaaaaatgatgctcgtgacactgatggctttgtacctcttcctaggatcctaatatttagttaactcttttctcttctttttttttttttttttgagatggagtctcgctctgttacccaggctagagtgcagtggcaatatctcagcccattgcaaccttcacctcccaggttcaaacgatctcatgcctcagcctcccaagtagctgggattacaggcacctgccaccgtgcctggctaatttttgtatttttagtagagatggggtttcaccatgttggccaggctggtcttgaatgcctgtcctcaggtgatctgcccgcgtgggcctcccaaagtgttgggattacaggcgtgagcccctgagcccagcctgggaactctttaagataatcctagtgatgaagactactaaatgttagaacaatcacagcacatagtaaagacacagtaaatactcatcaaattgaaaaactgaaattgatttgtttccttaagatcccatatatctcacactacctatctgattactccccttatcattaatttattagcatctatgccatattaatacagcgaggcggagaactgtgagtgcaaaatttgtcactgacatcacccaca

SEQ ID NO: 9946 - DNA, 6000 bp, Homo sapiens
aatgtagaaaataccaaactaggagtgagaccactaaggaggtgaccaggtgtgaagctggagggttttgatggtaatgcacggttgccagagagattcttcgccttaactttctaccctcctgggaaggctggctatgctgcacaaggccattctccaacaaggggcacctaaaggatgggcagctctaggctgaaggaaatgcttttccagtcaactcaggcatagctattgcagacctgcaaccaaggtttagggaatcccaaggaaacacaaagttttctggaaacacccacacctgatttgatggtattctccaacagatctagggctgcacccccaaacatgaaggccttggaaacccagcccagcagtgtccttagcactgactcaaacaacctctggctctcctgagcctctgaaggcccacgtgctcctgtgtccagcctctagcctttctgcaatgtccgattctgactattcagccaccctgggtaccctcagccagagcaagctatgcatcccaggtcaggacaatactcacacggtgcctccacagggcttatgaaactgatgaaaggtgacacttgccctcatttcagagtagaacaagctctcgtgcctactcacgcaggccttactggctggcctggcgccggagcccagcactgtgctcctaaatccagtgtctgtgttccagcccttctgaagaagttccaccttgatgtcctaaagtcttagggaatctattgcccaacctccctatttccgatccccagagtacggcccagcagacacccggtaccaatactaaagtgcctggacaggagtctcaagtgtctgctgccagtccatactgggagttttatgagagaggccaggaattgtcttgtcagtcagaacagggggtgggaggagaggagaggacatgatgaccaccctattgtcgtttgggattttaaaaagcattaaatttctagaatcccaacttgccaagtgttctcaagtgcaggcaattttacccctaagaagacctttggcaatctctagagacattattaatggttgcagctagggcggggggatgctactggcacctgatgggccagagttgctgctaaacatcctacaatgcataggacaactctgcaaagaattacccggccccaaatgccaacagtgctaaggttaagaaaccctgctctaggtaaccccaggctcataagaatcccaactggacccagaattacccaaggagccagttaaagcctagattcagaggctgtatttctagatgttttcctggccgagtgcccaagaattctagagatatgtaaacccaagacataagctccaaagatgcgcagagaaagaagacagtgtggaggaagtccctgacccttccgcagtgacctctgagtcagagaagagcttctgagccaccatgaaagcccatagcttggcttaggaaggacatgtgctgggaattaaaataggagccctaaagactacccaggatattccagagaatgtaggaatgtagggaacaggtaatcctgatggccttagaaaaatgatatccgggccaggcatggaggctcatgcctataatcccaacactttgggaggccgaggcaggcggatcacctgaggtctggagttcaagaccagcctggccaacatggtgaaaccccatccctactaaaaatacaaaaattattcgggcgtggtggcacgcacctgtaatcccagcttattgggaggctgaggcaggagaatcgcttgaaccctggaggcagaggttgcagtgagccgagatcacgccattgtactccagtctgggtgacaagagcaaaactccatctcaaaaaaaaaaaaaaaaaaaaagatatctcagctactgaagctctgtctaaatatggctgacctcccctttctgagagcccactggagaagggacagaggaggcaggcactcccaggagacactctccaagtcacatggtgacattgtactttggtcctaaatggcatgatgggtcaaatctaaaggatagatttcacgctcaatttctaccaggttgttaagtcatcctcagccccaacgtccctccttttaagctgagaatcaccctgattatagcccatttttttccagggcgcctatcccccagattgatgccttgtatagtccaaaaccaagggtcctaggatctcatttgctgctctctcttcttccatccacttccagggccattcacacacctggctttccagatctgtcctagatcgcacctgtgtttgacttgctttaaaggtacattatgtatagaaccacctggcttcctggcttggaaaggcatctgtagcctggccagttgccccagccctcatgacaacaacttcctccttgtgtcagccagtaccttatgttgcagatgctaacatgtctcccagctgaaccctttcaagtcatgaaggagagctctaaaccatgagcagttttccttccttctttcctttatttctttctccttccttccttcctgccttcctgccttccttctctctctctctctcactccttccttccttccttcctaccttccttttttttgagacggagtcacgctcaagtgcagttgcgtgatctcggctcactgcaaccttcacctcccgggttcaagtcattctcctgcatcagcctcctgagtagctcgtgtctttctccctcccttccttctctttctctttctctttctttctctttccttccttctctctctctttctctttctttccctttctcccttccccttccccttccccttcccttcccttccctcccctcccctcccctcccctcccctcccctccccttcccttcccttcccttcccttcctttcccttcccttcccctttcttacagggtcttgctctgttgctcaggctagagcatagtggcaccattatggctcactgcagccttcacttcctgggctgaagcaattctctcacctcagcatcccaagtagtgagaactataagcacatgtcaccacacctggctccttttaaaaattactttttagccgggtgcggtgactcagacctgtaatcccagtaatttgggaggctgaggcgggtggatcacgacgtcaagagctcaagaccatcctggccaacatggtgaaaccccgtctctactaaatatacaaaaatcagctgggcgtggtagcgcgtgcctgtagtcccagctactcgggaggctgaggcagagaatcgcttaaacccaggaggcagaggttgcagtgagccgagattgcgccactgcactccagcctgggtgacagagtaagactctgtctcaaaaaaaaaaaaaattaccttttgtagagatggggtctcactgtgttgcctaggctggtctcaaactcctgggctcaagcggtcttcctgcctcggcctcccaaaatgttgggattacaggcatgagccaccgtgcctggcctggagcaggttttctagcaattcctctgttcccttctattcctccctttctcactccttccactccagtacttctagccacctttctgcctctctttctcccctctttgattctttctttcccttcaacctctggctcaagttggccaagtttccaagtcagggaagaaattacttgcagaggtggtaggtctgaaggactgcagctaccgcaaacctcaaatggaatccactgcagccctctcctgtgccttcctactttgggcctctaagtcattcctgcatttctcagcactttctacttagggctgtcatgatcactaattctgaacaaagttttttttgtattctacatctggcccttcaccctttctgcaaggaaaaactgtccaagtctttctggaaacgtagctaagatacttgaaataaaaatgctccaattcattcatttgagccaattttttttaataggaatgtggtgacataagacataatattaacacatgccaatgatattgatgttagctgagattactagtttacaataatgctatatattaacactattgacagcacaaagtgttactatcttaattttatgagttctattatcatgtaatcagtgcatagcctaaaaattatacggagaacattggtttggagagaataaatcagaaaggcagagacgctgtaaagaggaaatctagttaggggctactggaaaagcatagacactagatgatgaaggtatgaaccaagctttataatttggcatttggaataattccaatgtcaacaaaagctgtaagatactttggtaagggggccgggcgcggtggctcacgcctgtaatcccagcgttttgggaggctgaggtgggtggatcacgaggtcaggaaatcgaaaccatcctggctatcacagcgaaaccccgtctctactaaaaatacaaaaaattaggcgggtgtggtggcacacacctgtagtcccagctactcaggaggctgaggcaggcaggagaatcgcttgaaccaggcaggtggaggttgcagtgagccaagatcgtgccactgcactccagcctgggtgacagagagagactctgtctcaaaaaaaaaaaaaaagatactttggtattcataaccaaatcactaagtattgcacctggtcttggtgcacacagattccctggtcttggaagcacacaatcctaatttccccagcctacattctctcattaaggcacgttattttgttttggatctcagcacacagctgccaaatagaatgcttttcccctagtgtccgcccaatttcctgcctgcctggagcccggaaggtgcatctgggcagagccaatgcaggacacttggctgggacctctctggtcacaggctgtcacagggagtggtcacttgccatgagtagtattcaaaaccagcaaccagggtgtggtctgagctcctttaagctccagggtttgggagctcctggtgaatccccagagaagagtccagaaagaagaatggaaggagggtggcctgcaaggcagagtgccctcctctgcctcactgtcagtcttctgcttcaaggtaagatgggacgagaacagggaagaccagagtgtggttccgagggacacctggactcacctctagcacttggagggcattcagaattaatgtgttaaatatttcttccataatgtctgtgtcctgatttccttttggtgacagatagaaagacagttcactgatgagtgcacacagactttctctgttcctgcctgcacagggatctatcaaactgtctcatttcaccacttctccaattccaccttttcactgacttctgatgctccactaccacacccttcttccccctctccttgtctctgtttctcctgacatgatatctatgagaagagtagccactgattttaaacatgccctgagggaggggacaatctgaggtggaaatgagcagatattttgcttccatgaggtaatatttgttcccaatctggacacataccttaaatattatggaaagagatggagatagagagaaggaggcagagaaaaggaccatataatgatggcgatggagcaaagatgccactcaggtactacccagatgactccctggccatggccgagagacaatatctgcaccggcctcactttgtggttttgttgttgttgttgtttgttttttgacatgaagtgtcgctctgtcgcccaggctggagtgcagtggcacgatcttggctcactgcaacctccgcctctcgggtttgagcgattctcctgcctcagcttcctgagtagttgggattacaggcgagcgccactatgcccagctaatttttgtatttttagtagagatggggtttcaccatgtcggccaggatggtctcgatctctcgaccttgtgatccgcccacctcggcctcccaaagtgctgggattacaggcgtgagtcaccgcgc

SEQ ID NO: 9947 - DNA, 6000 bp, Homo sapiens
gattgcttgaggccaggagttcaacaccagcctgggcagcatagcaaggccctgtctctagaaacaataaaaaaaaattagccacacatggtggcatgcacctgtagtcccagctacttgggaggctgaggtggcaggattgcttgagccctggagttcaaggctacagtgagctatgatcataccactgtactccagcctgggagacagtgagaccctgtctctaaaaaaaacaaaacaaaacaaaaagcaaaactcagtggacagattagacacagctgagggccgggcacggtggctcacgtctgtaatcccagcatggtggctcacagttgagggccaggcatggtgggagacagtgaaaccctctctctaaaaaacaaaaaaacaaaaaaacaaaaccaaaactcagtgggcagattagatggacagattagacacagttgagggtcaagcacagtggctcactcctgtaatcccagcactttggaaggccgaggtgggcagatcagctgaggtgaggagttcaagaccagcctggacaacatggtgaaaccctgtctctaataaaaatacaaaaattagctgggtgtggtggcacaagcctgtagtcccaactactcaggaggctgagacaggagaatcgctcaaatcaaggaggtggaggctgtagtgagccaagatcacgccactgcactctagcctgggcaacagaatgagactccatctcaaaataaaataaaatatggaaggcatccatacttgcattttgcattcttcgtatgtaatcatattgtcaaagacaaattatgtcataatctattgtaaataacacttttccccagacctaccataaagtttctgcaatgtattgtcttccagttgcaataaaaattactgagtttcatcaaaaattaattaattaattaattaaaataaacacagttgaggagagaatttttttcctggaagctagatctgaagaaatcattagggacagagataaagaggtagaaaataggaaagagaggtgtgctaggcagaataacggcccccagaatttgtccacatcctaatctctggaaccttaggttatatggaaaaggggagttaaggttgcagatggaattaaggttgttaattatcggactttgagatggggagactatcctggattatccaaatggacacaatgcaatcacaaaggctcttataagtggaagaaggagagagaaacaaataagaaccagagagatgagatgccttgtgagaaacattggcctgatgttgctggttttgaagatggagaagtaaaaataatgaaccaagaaatacaggcagtttaaaagctggaaaaggccgggtacaatggctcatgtctataatcccagcactttgggagatcaaggttggaggatcacttgaggccaggagttggagacaagcctaggcaacaaagcgagacctcatttctactaaaaaaaaaaaaaatagccaagcttggtggctcacacctgtgaggtcccagctacttgggaggctgagacggaaagatcccttgagcccaggaggtcaaggctgcagtgagtcgcgattgcgccactgcactccagcctggtcaacagagtgaaaccctgtctcaaaaaaaaaaaaatctggaaaaggcaaggaaatggattctcctctagagcctccagagggaatgcggtcctgctgacacattcattttagcccagtgagacccatttcaaacttctggcccacagaacagtaaaataacaaattgtgtttatttaagccactgggtttgtgatttgttacaacagcaataaaaggcatgtaagatagaaggaaaccattcaacacatgtctaataagaaaaatagaggaagtgaaacatttataaatgtctgagaattttccaaaattgaagagatgagtcttcagaccaagggatctcaccaagatctgcaagttgatcacgtatgaactatctataaccatttacgttgcagtgaaatacctaagactaagataaagtcttaaaagcagactgaaccttaagcataggcaagaacaagacaaccagaacactctttgaaggaaggttacaaatgtcagtggtcaaccaatgctattagtattcaaagtcagactctaggtgtggcctgtgctgctttaatctgggcattcctgggtcccagtacatgttcagagaagaacttagacaaagaagatggaaggaagctggttccacaggaaaagattttccttctacctccttctcggttttctgcttcaaggtaagaaaggagcaatgatgggggaaggcggaagaaggaggacctctctctagtagaacatctaggaacttttttcaaatttccaactcctagagattgtctaagatggatagagttctttcatagctacattactaagatgcccacatagactttccttttctgaaagacggaaaatccccttccagttacatgccaaacaagagcactttcattttccttctcgaaaaatagagttcaacaccagcaaactttatcctttcacatatggatatccagttttcccaatactacttgaaaagtctgtcttttctccattggtaccctacatggaagacaaccatccacgatcgtcttctcttgtatttagcttctatatccatccatctttctatccacaggtgtaattctttctctctacaggtatgaaacccaaaccattgtagcaaagtgcccacctcctttagccataatttccctgtccatctgctggatccaagggctctaggttaggtaaggtgccagaaggcagcaggtcaagggtgaaagtagaatgtgcttctcttccagggggtcagcatggtagagagacaagaacatgggatttggagacaggtggacctgggtttgaatcttggtgtctcacgttgctagttttataaacttggatgcactgcttaacttatctgagctctggtttcctcatctgtaaaacagaacctaccttgcagggttgtgaggattcagtaagagaaggagggaagcacagtgtctggcacttggtaaaagtgccaataactgtcatctctcctcgttagattattccatgactttggataaggaggcacaggagaggactgaaccagaggtgactttaaaggccagcacagggaagagacacaaattgtacacctggtctaggcagtgtaaatggttatgaaagctcctctgggcacttgcacacaggggttgacaaatgaatattcactgttcttagagtggtttaagaatttgctggaaagcactgtgacgttgggaatggataaggctcaatgtccttggcacagaggttatcaaccatctctctcagtccaagttgttgctcctccaacacattttcatgactagaaaatttaaaaatttattagttagaagagggtgggacgggtcaggtgaggtggctcacacctgtaatcccagcacttgggacgctgaggcaggcggatcacctgaggtcaagagttcaagaccagcctggctaacatggtgaaaccccatctctactaaaaatacaaaaactagcctgatgtggtggtagtgcctgtaatcccagttacttgggaggctgaggcagaagaatcggttgaacctgggagccagagattgcagtgagtcaagatcgcaccactgcactccagcctgggtgacagagtgagactccctctaaaaaaaatttaaaaatttaaaaaagaaattaaaaaaaaatcccacccacacttctaaaaatagctatgtggctaggaatggtggctcacacctataattccagaactttgggaggcccaggtgggagaatcacttgagccccggggtttgagaccagcctgggcaatatagtgagatccccgtctctacaaaaattttttaaaaaaattagccaagtgtggtggggaacgcctgtagtcacagttacttgggaggctgaggtgggaagatcccctaagcccagaggctgaggccaagtgattgcgccactgcactccagcctgggcagtagagtgagtcgctgtctcaaaaaacccccaaaaaccccaaactaagaaatatgcacaattaggccgggcacggtggctcacgcctgtaatcccagcactttgggaggccgaggcgggtggatcatgaagtcaggagattgagaccatcctggctaacaaggtgaaaccccgtctctactaaaaatacaaaaaattagccgggcgcggtggcgggcgcctgtagtcccagctactcgggaggctgaggcaggagaatggcgtgaacccgggaagcggagcttgcagtgagccgagattgcgccactgcagtccgcagtccggcctgggcgacagagcgagactccgtctcaaaaaaaaaaaaaaaaaaaagaaagaaatatgcacaattattatatgtccattaaaaataaaataaaacttttttaaagcctcaaactagaacgctggtgatagagttgggtaaagtcaagtaagaaggaaggttggggcagtcggggtgaaaacaggtgtgttctctccggggccccgggactgtaatcctatcggatgactatcaacattccaggcacagtttgcatatagatttgggcatgctttgcatggagacagaaatattagaaaggaggctggagctctagctcagctttgctacattagcttccagaatttgcattccagctcaccccatcctcccgggcctcggaaggaagagcccagcgtctggacccctctcggtgatcccctccccattcttcatctcatccctggggacgtatagcacagcagcagcagacaaacctgggttcagaacaagtccggcttctgccttttattggctgtctgactgtaggaagttacttcctcttattgcaccttagttagctcgtttattacatgagggtaaagcagtatctacctgataggggattgggaggattaaatgaggtaatccatttttaaagggcttagaatatacctgacacacagccagtgctcaacaaatgttagctttcattttatcacgggcgaccccacgccctgccttggggcccctctcatatagggagcacagggttgctctccttcatctcacacattcgatgtccactacaggaaggggcgttactttcaccatcaattgctcagggtttggccagcacggggcggatcccactgctctgaattcagtgtttaatagaaagcccttccgtccggtcaccaacatcagcgtccccacccaagtcaacatctccttcgcgatgtctgccatcctagatgtggtgagtgctgacctctctagccctccttggtgtccttaacctttttccagcccctggcaaagtggccccccaaagcccttatccacatttctgcttcctccaccactgctggatggcatttgcctggcatggggatctcaaagaagctctgtccagggcagcagggtgaggtataacagcacatggaagagaatcttttcttctctctctggctgtataccagtgaccaggttctaatctcagaggttttgattggatgaaacccaagcctcgtttttgttttgtttttgtttttgtttttgtattttttgagatggagtctcactctgttgcccaggctggagtgcaatggcacggtcttggctcactgcaacctccacctcctgggctcaagcgattctcctgcctcagcctcccaagtagctgggatttcaggcatgcgtcacaacacctggctaatttttgtacttttagtagagacggagtttcaccatgttggccaagctggtctcaaactcctgacctcaagtgatctgcctgtctcggcctcccaggcattacaggcatgagccaccgcgcccggccacatcgatatttttaagcttctcgagttattctcatatacagcgagggttgagaagg

SEQ ID NO: 9948 - DNA, 6000 bp, Homo sapiens; identical to SEQ ID NO: 3392

SEQ ID NO: 9949 - DNA, 6000 bp, Homo sapiens
ccctgtctcaaaaaaataaataaaaaccaaattatgttctgtctcataacttttatcaattcaaaatgtgatttttataatttatttaacttttcatgtagttgcttccctagagggtaaactcccaaaggacactgatcctctcatccaccttatatcagatgcctagcaggtgtctcaaatataatacttactcactattgtctagttttactattttaacttatatgacaaaggattatcataaaaattttcgttggaaagctttgctgagaaatgtgaattttttttaagaattccattgtaattagaggcttctgagggacatgtgaatcatagtgaagaaataatataaatgttattttttgggccaattccccttaaaatcaaacacagaggtggggtacagtggcttacacctgtaatcccagctacttaggaggctgaggtgggaggactgcttgagcccagaagttcaaggccatagtgagctatgactgtgctactgcactccatcctggataacagtgagattaaaagataaataaaagtaaaaaaatagaaatttattataaaaatactaagcaaagacatttaaatattttcatttatatttaaatatgttattgacgagttattctaatttgtcttcctttccaatcttgatccaaatgtacttatattttacagattggaaatatggtagatatacaacctgaagttctatatttttcaattagtattgtttcctaaacatatttctgagttacttttggtggttgtatttatttttactggctgcctaatatggagttaatacagcatagtttactttactcctctattatcctgtgatattttcctttattttctcttggcccacatcttagacattacataatttcaaactatctcaaggtctccaaataccttgttaaacatttcagccattgcataaccttttctctttgcctggaatgttctttccttccttatccatctgtacaactgtacaactattctttgtctaaactagtggttcataaactttttttttttttttttttttgagacggagttttgctcttgttgccttggctggagtgcaatggtgcgatctcagctcactgcaacctccacctcctgggttcaagcaattatcctgcctcagcctcccaagtaactggtattatagacgcccgccaccacgcccagctaagttttaaagttttagtagagacggggtttcaccatgatgaccaggctagtcttgaactcctaacctcaggcgatccacctgcctcggcctcccaaattgctgggattacagtcataagccaccactcctggcttgtccataaactcttgatcttgagctaacatgatatgcacattataagatacacacagaaataaaaaaaggattaaaggtgcactattttaaagataaatttcaaccggcccggtgtggtggcttacgcctgtaatcctgacactctgtgaggctgaggcaggcagatcacctgaggtcgggagttcgagaccagcctgaccaacatgaagaaaccccgtctctactaaaaatacaaaagtagctggcatggtggcacatgcctgtgatcccaactacttgggaggctgaggcaggagaatcacttgaatcggggaggcggaggttgcggtgagccgagatcgcgccactgcactccagcctgggcaacaagagtgaaactccgtctcaaaaataaataaataaataaagatacatttcaattatttaaggtcccaaaccattttgttttcaccctcctactgctatcgggcccctaacaattattaacactttttccaatgcctcattggccaagggatgtttttaggttggcctgcagggtttgaaaatttggttaccaacatttaaaaatgcagagatttcacacaaaaatccaattttggggtttcttttgggaggaaaaaaattgaacatctgagaacactggacccacattcctgagggcaacaatctgctagagttgagcagctgttccttttagttatggcatggatattccaatttgccattttccctatcattccccattgtcttacacaaggccagtctcactcatttgctttacttgtctggcctctgtagccatttgaatctgcaaacactatctagacctttcctgtcttccatcaaagcttactttgttctgtcccaagtccttcatcagtgtttcaaagcaagagccaggtaatctgatcaaatataggtcctttaacatgtgctttctggagacagcatcttaacagaaagagatgactctgcaggtagaaattacaggcaccactggattacaatcaggatggcaactgtctgttctactttctctgttatcttgacgtagccatacctcactgttctaaagcagaccaaaggaactggttctatggtagaacaatggacgctggtcttatgtatgaaatcttctcaagctgcacttttatagatcaccctagttccaaaagatccaaagctaccacgggctcctctgacccccccatttcctcggaggcttcaggatatccggcctgacggcatttcccctcacctgctttcggggcccgttttgcgctgggcagttgcgcccaaggagcgcgcgcatccagcatgagctcatttctcatgggcgtttccagaggcccggccgggccgcgcacaccaagcgcagcaagcctctgtatcaatggcccccgcggctgggcggggcgcggccgcccaaaggcgctgcctttctggaagctttgttcccattttagcgtctgagagcttgcagccggctgggaaggcccccttggtccgtctggccctttcggggaagaggccaacactcggcacacgcgatccacggcagaggggagccttgggcgcgcagaattggctgcgccccgccgagagcctcctgtgggtggggagagcccctccacccctctgctcgcttgagcgctcagagcccagggccgccgaccgcagcactttccgatttgctgcaccgagggcccgcggtccctgtgtgcggtttccaccgttgttggaggcggccgcaggcgaaccgtcgggtcgtcagccacgacccgagtcaggcatctccccgctcctgggaccggggccgaaggccaatcacactgcagctaggtcttgcgattggacggcagtgagagccgattggccgccgccgcgagtttcgggctccctccctctcccttttgccccaactccagcgcctaagcttcaggccaatgagacagcgctttatagacgccctcccttcgctttcttctccccaccttggagagggaggggaagtcctgactggccagactgtcctcggaagcccccttctcttcaccaatcaccgaaggaggtacgctcccagcggagttttccagccaatcacaaagcggcggcggcgcccagccgtgcagtttcaccagcgtctctgggtttcaccgtcctcaactcttcaagcctcttcgtaagggccggcgactctgattggccactgttgccattgtcgaatgtctcctccagccagccaccgaacaaggcgaattcaccctttccgttcggctaccttcggcattttccgctctttgggcgtggcttcccagcgtcactttctaattggtttctcaggctgatcggctttttccgggaggagccgcaaacaaacgacgtccgtgattggctccgttcgggcttcggctcccagccgaagcgggcgagcgtggggctcggccggcgattcccagacgcctgttacgcgggcggcggggcgctgggcggtgtaaggctgggtgggggaggaaggaggtggaggacgagtaggaggggggaggaggagtggggaagtgcaaggcggctgcgcagacagcgctcctcacacagagcagctcctgacccgggcgaatgcgggcttgtgccgccgccgccgccgccgccgcccgggccaagtgacaaaggaaggaaggaagcgaggaggagccggccccgcagccgctgacagggctctgggctggggcaaagcgcggacacttcctgagcgggcaccgagcagagccgaggggcgggagggcggccgagctgttgccgcggacgggggagggggccccgagggacggaagcggttgccgggttcccatgtccccggcgaatggggaacagtcgaggagccgctgcctggggtctgaagggagctgcctccgccaccgccatggccgctggatccagccgccgcctgcagctgctcctggcgcaatgaggagaggagccgccgccaccgccaccgcccgcctctgactgactcgcgactccgccgccctctagttcgccgggcccctgccgtcagcccgccggatcccgcggcttgccggagctgcagcgtttcccgtcgcatctccgagccaccccctccctccctctccctccctcctacccatccccctttctcttcaagcgtgagactcgtgatccttccgccgcttcccttcttcattgactcggaaaaaaaatccccgaggaaaatataatattcgaagtactcattttcaatcaagtatttgcccccgtttcacgtgatacatatttttttaggatttgccctctcttttctctcctcccaggaaagggaggggaaagaattgtattttttcccaagtcctaaatcatctatatgttaaatatccgtgccgatctgtcttgaaggagaaatatatcgcttgttttgttttttatagtatacaaaaggagtgaaaagccaagaggacgaagtctttttctttttcttctgtgggagaacttaatgctgcatttatcgttaacctaacaccccaacataaagacaaaaggaagaaaaggaggaaggaaggaaaaggtgattcgcgaagagagtgatcatgtcagggcggcccagaaccacctcctttgcggagagctgcaagccggtgcagcagccttcagcttttggcagcatgaaagttagcagtgagtattggttttattttacaccccttttccacctcgcccttaaaataagaaacctcgaaataccaggatctgaaattattagacctcctgataaacaggcaatggaaaagggcaaaacctatcttcagtcaaggatgaagcagctccctttttactcctcccataccccctcccccggtctcattaaccttgaattgagataatatgatatttatttggatgattcgatttcaaactgctttcttgtacttttcttgctgttggtagtcagtttcatcaagtgctcgagtgtttccacgttaaagtagtgatgacagtgtttacttgcccatcctttagaataaagagaaggacaagatttgattactaaaccattatgcacatttgcagaatttttggaatttggaatgagagaatattttaggtctcaggggttatcatagtttgatatacttaatagagacgttaaatgtcccaccctcccaacatttttttcttgtttgtatgactacacataatatttgttcttaatctgtggatgaacttcctcagtaaccattcacatttggaggctgccattgatttctctctttagaagggactagtgggagccaataaatacctagcagcagtaacatctctgtatgcatttgtgttcaattggataagtggtttgatgtgttatctcttaaccttcctgttttgacattaccaacctgccaccgtataatttatgtttaatcaaaagttaacttggaagtattaataggtccaagttttgattgagatttgttttgtcatagtgccaaatactaagttaaatgttgtcactggctcattacatttaagttcaattttggagtgctactgcattcattacctgttaaatgttctggcgggttccttaaaaaggacgatttaaaacactctagcgttagtttccatcatat

SEQ ID NO: 9950 - DNA, 6000 bp, Homo sapiens
gcccaggctggagtgcaatggcaagatctcggctcactgcaacctccccctctcggtttcaagccattcttctgcctcagcctcctgagtagctaggattacaggcatgtgccaccacgctcagctaatttttgaatttttagtagagacggggtttcaccatgttggtcaggctggtctcgaactcccgacctcgtgatccgcccgcctcggcctcccaaagtgctgggattacaggtgtgagccactgcacccggcaaaacaagtcaggatttgtttagccattttacaatatatagtaacttctgataacagttactggtatgaggtttctcttcattgagtaattagctagaaaattcaagagagaactttttttttttgagacggagtctcactctgtcgcctaggctggagtgcagtggcactatctcggctcactgcaacctccgcctccagggttcaagcgattctcctgcctcagcctcccaagtagctgcgattacaggcacccgccaccacgcccgactaatattttgtatttttagtacagacgaggtttcaccatgttggccaggctggtcttgaactcccgacctcaagtgatctgcccacctcagcctcccaaaatgctaggattacaggcgtgaaccaccacacccagcggagaacttaatgtgttcctttgctttacaatttcttagtaatacagtaatatctcctttctagaaacacattaacatttaattcaaagtgtaatgggagtgttagattaggacaaagtactgaatattagtaacaatagttccttctttgtcctttcctcacccagtgagtctaatcattgcttgtattttggtgcagccctgatcctttatgctggatatgttgggacagctagagggcgaggcgacaatacatatgacctttgagtgatggtttatttctctgagtatttaacattgaagccacactgttgtttcagatagtttccagaatataaaaatcaaagggatcaaaatatgatctgatttaaaaccccctttgctggaagaatcaaggcctttccacatttgggtgcccctatttttgtttgtttgtttaaaaacactccaggctgccgggcacagtggctcacgcctgtaatcccaacactttgggaggctgaggcaggcagatgacttgaggtcgggagtttgagacgagcctgaccaacatggagaaaccccatctctactaaaaatacaaaattagccaggcgtggtggtgcatgcctgtaatcccaactactcgggaggctgagacaggagaatcgcttgaacctgggaggcagaggttgcagtgagccgacattccgccattgcactctagcctgggcgacaagagcgaaactccacctaaaaaaaaaaaatgtactcctgctctctcctctctcttcaattagtatgatccaacagtggtgagtaaagtacattttactgcaacggatttgtaagtccccagcctcgatgatcttcatatttaaatgcagtcatttacgcacagaaatgtcttgtaaactacagggatataaacaaatgcatggattattatcattgtgaggaggctcaactaacactgaacaactttaggaggcagcttggtgtagggtataagaacttcaggctggaagacctgatcctatgaacctgaaggagggtgtctcctcccttgtggaataagggatagaagtcatttaggggaaggagaaggggtggggtgggcagctttgaatatgacgctttaagaatggtatggttgagaagtcctcactcactgaaagtggggtttgattttacagtcactgctgtatggagaggacccgcccgtggtggcacaatatgaaacttaaaaaataatctaagccaatagatatgtttcattgagtggctccaccgagatagtttacttactgaagacagggtatgtttagtgatatctacgtcatttatcaactcaaaaaaaaaaaaaggaagatactatatactcttttcaattctgaaataaagtcttctgaaaggtgttagttctgaggtaaacaagcctcagctttagaatcctattgaaatgcaaaacttgctttgtgcggtttccctgtacactctgcatagtgttttggaaacctgcagttatctaaattcccatcgggtgacattgtttaatccaacattcccactttcatacatgaaaatagctctaaggacacaccactaatatgctttgaactctctggtggttggaagggagtttccaatcccactccctttcctctgatggttttcctgctccctgccccactaggtcattcaggaaaggcctctggcagctcccccaagcaagggctcaggggggaaagagacattgaccttggccaagaaagcacctgtctaattactgaacttattaggccaccaggagtccagactggtgcaagttacgagtagtgtgtgtgtgtgtgtgtgtgtgtgtgtgtgtgtgtgtgtgtcgcaaaacttcaggtttctgatattgagaggaaatgatggttgctttaaagtgatcactacatctattttcaaatattctgatgaaagtaggaaaacagaacccttcacctttaagaaagctgcaaacattattttgctttgaaggcagtaataagcgaaataacaaaaaggtttcaagtcgtatcttaatgtaaaagggtggctgcttctccagtcctgagcttatacaaagctctaaaaagcaccctaccccatctttctgaaagtcttagaaagattaccaccccatttgctttaaaacctgtgaggtgcctcccttctttaaaaacaaccctccctcaaccatactgccacattatcactcatctaagttatactttataaaccgccttgctgtgcttcacacatgcaaaaagtacacaaagtggataaacttctactgtggatgccactgtgcaggtatatatttagtaaacatttagttacattattttatttttgtgaaataagaactgatcgagcaaacctttcaaacagacccaccagatgataaataccaccatatgcttgattcacagtacatttgggcataaatacttcaattacagctttgtgtttagtatcaaaaaccttttcttgtgtgcgtgttttctctccagatcccgtgctctggatcacattttgaaagtcgcttattacagataaagcacctttccaggtacgcttcggagaaccatatgtatttacgcacacaaaggtgttcacagagattttcacaaacaaatgtccatatgatgccgcgccgcactcccccacatgcccgccgcgtgtgcgcccagcccccaacgccgccgggccgccccccggacacgcgggagcccgcggcgtccttggggaaacttcgccggcggctccaccccggccaccgcgcgggcctccccgcccccacccgtctcgggcccagcggcccacacccgagcacacccaggccggcccgcggcggtgggggcggggcgggcggcccggggccccgaggcgccttcgagtgcccgcggggctcgcctgatttttaaaagaatgcgccgcacagcccagcccccagtgccgccagagcgggccgggaaggagaggagcgcggccgctggagcccccccgccgcgccgccgccgcctcccggcgtccgcggcgcccctcccccgccggcccctcccccgcgcgcccgcccgcccgctcgcccgcccgcccggcgcaggccgctcgggtttgttttgctgcgcggccgccgccgccgccgccgccgcgggcctcgcgagctcatttgtgcctggctggtccccattcctctctccccagtgttgagtgtctgagccgttggctgctccgaaccgtttggctctttcccttagtaacagcttttaccttctgcctcaattcctctccccgctcgcgcccttcccccgcgcgccgcctccccccgccgccggccgcgtgcgcccccgcccctccccccgcggcgggagcacctccgctcgccacctggggacccgcgccgcgctccccgcccccgcccgcccggcgcccatcccccgcgccctccgctcgctggggttataattgcctctcaccccccggaggggttattttgggggtggttggaggcggtggcggcggcggcgaggaggggaatttccttgtgcctccattcccgggaggggggagcggcgttggaggccaccgtttccaggtaagcgctgggggccggaccctggagtgggggcggccgggggcctgggcggggggcgcgggccagaggcggccgggggcgctgggccgcggggggatgggcgcgagtggaacatgcatttttcaacttggcccttgggggaactgggcttgcgtgggggaagggaaggcagggagggcacttggggcgcccccatccccccgttttcctctctcaggtttctttgaaatgctcacgtgcctgcccacccccctaccctttcccggtctcgggggatcctcaccctaattatgttgtccccgaaaatgtgcacctcggccttctccccctcttcctcccttcgtgcatttacaccccctttttgtgcgtgtgtgtttggggggggaggctttcaggaaaggatttgcagcaaattgaatcaaggagccatcatgaggccgactcctttatagcctatttttagcagaggagaaggagcttttcggtgcatgctattttgtgaaacctcgggcggcaatggaaatctcccctccccgggcgcgtccccggcccgggcgcggcgaccccggccggcgtgctgggggctgcgggcggctgttggggccgcgcgtccggggcgggggcgccggccgggggaggggcgcgcggcagccgggccttgctccgggacgtgtttatttgtaacttagtgctttttatcgtcttaaggaggtatttggtggaggctctttgaagttgggttcaggagtgtagaattggcaaagttattgccagcttcctggtaagttttgggtggcacagagtcacgttattttctgacagtgtaaaggccacgttgtgagggtggtttctcggtaacttcctctttgcaaccgatttaattttttgaacagaagcagacttttatttaagtggaatattaatcttaaatggcagctcgagggaagccatgcatgtgttaacgtgttcagtatttttggaagttcttaatttgctgaaacaggcatcacttcgcagtggcaaccgggattaaatttaggttgtgaaaatggtgtatttcatgtaaaatttgggttgtggcttttaaaaaatgctctctttgttaggttatctaagtgtctctaagataatttggtgattacaaatgagaaatgttggaaactagttaaaaattaggtgttctcagtgtctggagtttacttgaaatcttggactgtgcaggcaccaggggtgaagagttttagtacctatgtgatttacagttgacttaggaaagtttactattcactttcttgttttccaaacaggaaccgtatgctgatctaaacaagcttgttaataaaatgtggggggtgaaaatgccaggttatttttagtttgaattttaagactgaatggttgctctaccccccacctcatataattaagtgatcttccccctccgtttttcctaaaggcttcttcaccagtttggataataaggccctcgtggtgtgttcatctacttacctgaaataacttggaataaataatttcgattacacgttgaagatacaatgagtgactgtttgggttttccagtgtgattcattttcatttttgttaaaataagacccatgctacattgatgtattttagtaatgccgacttcctgggattgtatgttctcaccattttaatagtttatagtctggggaagtagggcacctttgtctccccgaaaacatggtg

SEQ ID NO: 9951 - DNA, 6000 bp, Homo sapiens
tctgattatttctgtcctttttgcttgactaaaaaatactgattatgactgaataaattgatttcataacctactaaatcaagccttgcaatttgaaaaacagacatattatttcagtttacattacttaacctcttacatttatacacttcactacccataagtctccttaaaaaaaaaaatcacaaaatttttgatccagagggaatttagaaaatattcagctcaactctaaagttttgcaccacttacgaattcactgttgtggggttccccttagtcactgttgttgaattatgggaattttccgaccaaaaaaacagattggcccccatctcacatcatatacaaaatttaactcaacatgaatttaaaacctaaaggtaagaactaaacctataaaactcttaaaataaacattaggagcaaatttcatgactttgggttagtcactgacacgacaccaaaagaaaaaacaggtaaactggacttcatcaaaattaaaaactcaaatgacaacatcaagaaagtaaaaagaaccaagcatggtggcatctgcctgtaattccagctattcagaaggctgaggcaggaggatcacttgagccctaaagttcaagaccagcctaggcaacatagcaagacctcgtctttaaataaataaataaataataaataaataaataaataaataattattttaaaatgtaaaaagacaacttacagcctggaataatatattggcaaatcatgtatctgataagagactcggatatagactatataaataaataactctcacaactcaacaatagaaagaaaaataatccaatttaaaaacagggaaaggatttaagcagactttcttcaaaaaagataaatggccaatgaacacatgaaaagatgctcaacgggatagtcaccaaggcaatgcaaatcaaaaccatgagacaccggctcgggcaacatagtgagatcccatctctacaaaagaatacaaaaattagctggtgtggtggcatgcacctgttgtcccagccacttgggaggctgaggtgggaggattgctttagcccaggaattcgaggctgcagtgaactatgattgcaccactgcactccagcctgggtgagagagcaataccttgtctcaaaacaaacaaacaaacaaaaccccatgagatatcacttcataccctttaggttggctaaaataaaaaagactataacaagtgttgacaaggatgtggaaaaactggaaccctgacacattgctggtgggattgtaaaatggtgtgcccactttggaaaacagactggcagttcctcaaaaacaccgagttaccttatgatcctgcagttctgtccctaggtatatactcaagagaaataaaaatatatgtccacaagtaaccttgtacatgaatgctcacagcagcattattcataatagcccataaaagtagaaacaacctaaatattcatcaattcatgggatgaataaacaaaatgtggtatatgtgtataatggaatattgaccataaaaaggaatgaaatattaatataagctataacatggatgagcctcacaaatactatgctaagtgaaagaagaaagtcacaaaggacttcatattctatgattctatttatatgaattgtccagaataggtaaatctatagagaaagaatatctctatctagagttggtggaatgactgttaatggagagggggttcctttttggagtgatgaaaatgttctaagggtagatttggtgatgatggcacaactctgtcaataaactaaaactcattgaactgtacattttatttatttatttttgagatggagtcttgctctggggctgaagtgcagtggcgcaatctcggcttgtaacctctgcctcccagggtcaagcgattctactgcctcagccccccgagtagctgagattacaggcacgtgccaccacgcccagctaatttttgtatttcttagtagagatggagtttcaccatgttggccaggctggtcttgaactcccggcctcaagtgatccacctgcctcggcctcccaaagtgctgggattacaggcgtgagctgccatacccggcctgaattgtacattttacttctatggtatttacattttagattatattaattattcctcaataaagctgtgattttaaaaagcaggctaggcgcagtggctggtgcctataatcccagcactttggaaagctgaggcaggaggatcacttgagcccaggagtttcagactagtctaggcaacatgtcaagacacagtctctactaaacaattaaaattaaaaaaaaaaattagccaggcatggtggtgtgcacctgtagtcccagctacttgggagcctggggtgggaggattccttgagcccgggaagtcgaggctgaagtgagccgtgattgcgccacagcactccagcctgggcgacacagcaacaccctgtctcatggaagaaagaaagaaaagaaaggaagaaagaaaaaaaaaaagcagattggaactctggaattaacaagaagtaggacgcacggagcacttccgcctgagtggagactgtggatccgggtcaacctgactacctaaatcacaggccaataaatggtctttcagtggtcagtccctgtaagatccgtggctctcagcttcttatcttaggggctgtggaggaaggacatgattatgttgatttaagcgctgaatattttcccttgtgatacccatcctcgcaaaactttgcttcaaccacaaacgaggaccttctgtaccagaggggcaataaccacaatgaagctaggaagaaatgcagagcaccccagcatacagtccataagcttcctgaagtggggggcctcaggcatcgctgcctccccaaagaggatcaggcccagaacagtatgctccagaaataagactggaaaaagggaaagaggggcctcaagtccaggagaccagcggctttctgaacgcgcacctgccaacccactttggacaggtcacgatggacagcgtggcaggaaaagaaaaggtcactgtctacccaacacatgagaaactgtttctcgtgcctcacgtccccactccgtccccacccatgttgtctgagtccctcggtgtcagaaacactgctaagaaatttaagaaattctgttaatgagtttaagaaatgtttttaatgattaaaagtcagtgacttgtgaataaccatgtaacttacaaacgcaaggaactctgaaagtgtgcagcaccaccgatcagaagagaaaaccaagggacccgaaatatgctttaattaaattttcttttaaaatgtcactggaaagaacatcttgggaagacggcctggccgatcgccgtgtgaagggcaagccactctggccgagagggagccccacacctcggtctccccagaccggccctggccgggggcatccccctaaacttcggatccctcctcggaaatgggaccctctctgggccgcctcccagcggtggtggcgaggagcaaacgacaccaggtagcctgccgcggggcagagagtggacgcgggaaagccggtggctcccgccgtgggccctactgtgcgcgggcggcggccgagcccgggccgctccctcccagtcgcgcgccgccgcccccgcccccgcccccgcccccgcccccacccccacccccacccccacccccagccggcgcccgcgcccgcccccgcgccgggcccggctcggcccgacccggctccgccgcgggcaggcggggcccagcgcactcggagcccgagcccgagccgcagccgccgcctggggcgcttgggtcggcctcgaggacaccggagaggggcgccacgccgccgtggccgcaggtcagagtacgggtgcccgcggcgctcgggaaccggctgctggctgggcggggagtgctcagggagggggcgcggagggctggggccgagggtctgggggctagggccgaggaaacgggaactgacggggtcccagacggatgagagctggggagaagggggtctcggctgaggggtccggggctgaggcagggtcatggtccggcaggacccggactgacgggtcgcgggcgggcggctcacgggtgaccgggtgaaggggtcttgggctgagggcacccgggctgagggtcgcgtctaccggagcgcgcactaggggcggagggcgcgggcacagagagccgcggccggtgccgactcgagtggacgcgagccggtgcgtcccggcttccaggacagcccccctcgggagagcgccgggtgggcgcggagccggggacacggggacctccgcgtccccggcggaggtgcgcaagcgtcgggagccgctccgggggaactttggagcagggtgtctggacccggggaagcgaagatccgcgtgcgtccgtcctgaggccgcgcggcacccctgctgaggaggaggtcccgttcgctgtccagagcccaggggcgaccgccgcttggggaccgggggaccgttcagcgaggggcgcgcttgtagctggccaggccctgtgccctgacgcgttgtgctggccctacgcccggcggaggggctggggacggggactgggtgcctccgtgcctccgcggatggagcgcgcagccaggacccccagccgcaccccggggggctggaaaggcgaagtcgctgctttgtgggctcctgcaagtgccaggcgctgaccactcctcctgggagcctaactgaggggggtagaggcagcagaggttaacagaaatctcaggtcccttggtggaaggtgggtgtgtagtcgtggtactttacgcctcggtgtttagggaggagcctaaggtaaggagtcagaaacggggagtaaccgagctgcggcttttatataaggtcagtggtaggtaaggaaggggccttaacctctgctggtgaccagaagcctgcatttctgcattctgcttaattccctttccttaggtgagttggctcactctcattgcattttgttggaatgtgttggtgataggtccgaaatttgcaaaattattgtattatccttatatcatttttttttgcagtgctcttgttttataagaagaatccaattcacttgggtcataggctaacggttgtaaaaatagtgtcattgttataaaagaaatcaagtcaaaaatagtcgtctgccatgaagaaactaaaatttttcttcttttccttgcaagattagggacaaaatgtaaagtttatttgtgtaaattatcatttggatataaaaccagacaatgataaactgagttgtataatacctattcctggaaaacctctgattttgaagtacattattttaaccccaactgtttctgtcattcgtgagacaaattgttaactggatttattaagagaacaatgaataacttaactctttaaaaggacctgggcaaatcttcgacaggtttcaggtattttatggcagtctttctgtctattgctaagtgatcgattgctgactgagaacagaaccaactgatggtgctagatgatttagaaaacctttctggtatagggactggcatggacattcactgtggcttttctcttaaagaaatacctttcactcctaggggagtttgacagaagacactcatagatgctaccagttagcatttggagtaatatatcaaaacattctgttcaagttttaaagtaagttttgtgtagtatattttcaatcagattcactttggaatcaaatacactttatttgattccaaataaagtgtatttgaatattcactttaatatacgaaactttaaaggtaatgtctcagccaaaaagtgaagtgtattacaaaactgtccatttttgtcttcttgtgtacttcacataatttttctccctgatttaaattatatgatatttgatagttaacttgctaataattatgtcttaaga

SEQ ID NO: 9952 - DNA, 6000 bp, Homo sapiens
ctccatggcattttatatttggcttagcagagttagcacttaactgtatatattggtcaggcactgttgtataacaaaccatcctaaaactaaatggcttaagacaacaattctttatttagcctgcaattctgtgggtcagcagtttcagccaaactcatctgcatggttcacctggacttggctaggctccaccatgtatctctgggcagttgtaggttagctagttggctctgcttctaggggtgctgactgtgggctggggagactcagctctcctccatgtgatccctcattcccatcaggctggccctggcttgttcgcagaggcagggttccagaagacagaacaaaagcacataaggtctccagaggcttaggctaagaagcatctcattactacttctgccacactattggccaaagcaagttataaggtcagcctagactcagtaggtaggaacatcaactcaacttttgttcttcttttaaataaaataaaacgaatctgtcaacttgaaaaagcttttttgtagagatgggggtctcacgtatgttgcccaggctgacctcgaattcctgggctcaagtgatcctcccaccttggcctcccaaagtgctgggaatacaggtgtgagccaccacgcccagccccactcaatttcttaatgggcagagcttcaaagtaataagtgatatagatatggaggggccgggggaatgggtgtcatttttgtaattagaccactgtactgcatgtctgattgcctatgaacacaaagtggttggggaccctagctccactgcccagcatgtcatacatagtctggcatatagtgggtgcttaaagattgaacaaatttggccaggtgcagtggctcacacctgtaatcccagcactttgggaggtcaaggcaggcagatcacgaagtcaagagatcgagaccattctggccaaaatggtgaaaccccatctctactaaaagtacaaaaattagctgggtgtggtggcgcttgcctgtagtcccagctacttgggaggctgaggcaggagaattgcttgaacccgggaggcagaggttgcagtaagccgagatcgcgccactggactccagcctgacgacagagtgagactccatctcaaaaaaaaaaaaaagattgtacaaatgcgtaaatgtcactcagcccctcaaagtaattttgtgagtttttcccttcttttcaaaccatttaaataaacatatgtattatggtttatgaatataataaggccagttttgggaaattcattaaaggcttaggaacatctctctgcctctggaattgtgctattttatggcaattctcttttctccagtagattctgacatggtagtcaggaaagttatatgggcaaccagttggcagctgactaaaaaggaagacatttgttcattcaattattgctttattattagtaacccctagctgaacctacttaaatttatcctgagatttggaaaggtttcagtggaatagctagttcattttgtccacttgttgtgcaatatataaataaatgattttctaatgtttatttgaaaagtaaatgaaaagatacttctttatttctgaaaaatgttaagtcatctcatgtccagaaatctgagtgaggtatgctgtaactcagcgtacctgctctcatcattatccaacgtgtctctgtggcacatactaggagctgcatatgaagctgtttcatgatctgtatagcacaaactgctttaatcagctcatagtcagtgagttctctgagcttagtttgggattctgactcctttttaggaaaaaccccaataaaaacaaaacccataccggcacaaacaactttgataagctcagttaagtgatacagagtcatattatggtgtatctttttaacagagctataaacccaataaggtcaggtgagttcggcagccagttgaatttgataatatttttatattgtgggtggattgctcttctccctggtcattgggaaagacttggtctacatttaagcttgctgggaaaatacagtgacaaaattcacagaactgagaaacatgaggaggtaatggtaaaatacaacagccaaagaaaaagaaatataactttaaaaaaattaaatataattttattgtcatttaaaaaaattatcaatacagtatagaatttattgtataaaaatagaaaattaaaacaaccattattctaccctgggagggaacccctgtaaaactcagcttttctgtaagtatatgcatattgttattgtttcagaaaaatggaattttgtgttgtatactggttttaacttaatctttaataatattttatgacccaaatttaagcaactgcatagcttttatggttatacaattaatatagtagtttacggttatgtcataatttatttaactgattaaggtgcttacagtttttttcgattataaataacactttaaattatggcctttaagtatatctctgaaaatttccttaggataaaattttccttaggataaatcagtataagtggaatttttagatcactggctttgtatatttttaaggctttcgaatcagattgccagaataccccgtagaaaagattattgtctagtagtctgtaaaaagtaaatcctttcggaaagtatctattatctcccttgtgatataataaggtaatgaatccagaagcaacttttcttcttgaattctgcctgtatttaatttgatatttactatgggccctgtgtgtggtatcattttaggataccagcagatgcaccataggccccttgttgaccggtagaaactggcccaaccattggctggaaatcaaagtttactactgtaagctgagaacctctgctctaaagtaggactcccaaacagagcctggtatatcttcaagaagtaatgcctacggtggcttctgcctgtcataaccaggatgacctaattgactattatttggggaagagaactttccatcctcctagggactgggtgacagtctcagcctctgctgcagccatacgatggtggtcagaatttaacaaatgggtgtggtccatctctgggaatgaatggtcagcggctgctgtattgacacagcattaccatggcagtataaccactagacacactgtagggatgccctgtttagggggtttccaggtgagcgatggcagtttttgtgtaggggacaaagagtacacaaaaggaatgtgcagtgtggttagccaagaatgtttaacagtataaaataataaagcaatattaaaaaaataataggacaaaataaaataatgtctttggaaaacagtcttattgctcatagctaaaatttaatgcaaaattttggccttaatcatattttacatttcaacttttgtagcttttgaggaatgtgaagtctagagtgagaatgctgggatgtgaattctagctagactacttataagcttggtgcaactctctcttttctcatctggaaaaatgggggtgatattacctacctcatggtattgttgtgaggataaaatgtttttactatgtataaagcatatagaatagtacctagcacatagtaagtgataagtactaagtggcacatacatgcttagttattgttttgttttgttttgtttttgttgagacggagtttcactcttgttgcccaggctggagtgcagtggcgcgatctaggctcactgcaacctctgcctcccgggttcaagcaattctcctgcctcagcctcccgagtagctgggattacaggctttacaagcatgtgccaccacacccagctaattttgtatttttagtagagacggggttactccatgttggtcaggctggtctcaaacttccaacctcaggtgattcacccacctaggcctcccaaaatgctgggattacaggcgtgagccaccgctcccagcctatcgtttgttttatcattaagttattataatgacttttgcacacagtgatgtaacatcaattataatcttagtactgttcttgtagtgttctttctgcagttctccattcttttctatcaaaataacactgcctctttccttcaaggctcacattaagaccctactactccatggagcctccctggattaccctagtacagaggttgccaaattgcttctgcaaagagccacatagtaaatattttaggctttgagggctatgtggtctttgctgccattattcaactctgtcactgtagcatgaaaggtgctgtagataatatgtacaaaaatgggaatggctatgtttcaataaaactttgtttacaaaagcagtggaccagatttggcccttgatgatgttattcttcttacaacttctaaaactcagaagctggtgccccaaagctctcatgccaaaagtggcaagcccgctggttttgctgggctatgggcctgggtctgctgctccacttccacactgctaaaagaagttcatgtccacctgcccagggctctgtggcttagaagctttaagccatgtctggtcattcctccacccttccaatcacactcaaatcccactttcccatcatccaaaatcagagaaattagaagtatccaggtaattgagctacgtccagaaatacctgacgtcacaccttggagaggtttctggaacatagtctatgctgttgtatcagttagcttcttctgcttaacaaataactcaaatgcttaatgtcttaaaacaatagacatttattattcattataattctggataggtcttcttgtcttggctgacttggcttgggccaggtggtctaggacggtctcactcacatgtctggggccttggcaggatgaccagatcctctccccctgttgttgctcaccattagcctagcctaggcttcttcacgtggtggatgggttcccatcagtaagagaagacaatcaccatacaatcatagcaagccaacgccacttatccagtgaaccagctcaaacaaacacttctcaccctctgcttgtatcacatttgctaatatccccttggccaaacaaattgcgtgactaagcttggattctatggatgaagaaataaacttcacctcctaaggggagaagtgacaaagtcaccttgcaaaagggagagcctaccagaacttgcatttggttacataccgtcttctattattccctagtttgatgggcaagtctcttctgacaaccttattcaccaatcattcatccttaagcatatgtttgttgaacacctactaagtttcaggccctatgccgggtgctagagatacaacagtgaacatgacaaagttcctcatggaatttagtgtctcacacaagggacagatgataatttaaatttggaaaacaataaacagaatggtctaataaagaataatttaggggtattctatttcacaggggtcaagggggcctgatgtgatgggggtcaggtgggatctcatggctgaggaggaaccagcggtgtgagtcatagagagaaagcattttaggtcagaaaccaaacacttggattctcggagcatttctacttcttctggctatgtccattgacttctctgggccttagcctatctgtaaaatgaaagcaaatccacaagtttgaacccagtaccatgtcaaatacagacataaaagcagtgaacctaataatggcactgatttcttgttagggctggcttacgtggagtaagaggtctccagtgtttgtacgtccaagtgtggagtagagggaagaagaaaactacccttgttgggtgccttctgtacactaggcatttgggcttttttttttttttttttttttttaacccatagcgcttttatttctcacaacagctctgcaaggtaggctccgtgacccacattttatagatgaggtaacagagggtccgagtagttaaggaacgtggccaaggacacacagctagc

SEQ ID NO: 9953 - DNA, 6000 bp, Homo sapiens
ttttgtgtgaaggagaggcaaaaagatgggctaggaaaggagcacccgggaagatgtaggtgttggaaatgttctaggtcttgggttcaatagtgggttcatgtgtgttcatcatgttatgaataaatacatgaattaataagtcccatacttgggctaatgttgacaatgtgtcatgatcaaggattatgattaattcaattctgatcattcaatacctaaatggaagacagaaatagagagggagagagagaagccaatggagctggcctttcttccttttttcctccctcccttcctccctgcctgcctgtctttcttttcttttcctttacctttaattattccacaaacatctactgtttgtcgactgtataccatgccccaggctgagaactaggaacactgggatgaatcagacacagtcctgccctacagagtcaccatgtgatgcaagagtctgacaattccccaaatgttttcaaggtgctatgacagatgtaaagcaacaaggtgtggtagggcttacagaaggggcccttaatccagcctgggctatttgggaagactgtggagctttctgctttgagaaattagcaagaagaaaatgtggttgggggtgtaacagctataaaaatgaaaaagacagccttgcccttgaagtgctcatatcttggggtgagggacaagaaaggaggtcacaacagtgggacttggggttgtgagagaggcaagcacaggcttgagatgcacataggagggcaccgtgctgtgcctgcagtgttgggaaggcttcctggaggagatgacatgtatacaagcagagagacgaagtatgaattagagttacctggaaagtctgtaccaggaagaaaggtaagcacctacaatggcctgtggcagggagaaagagcatggaggagctcagggggccccagtgtggcctggcccagagcgcaaatgagaggaggtgaaactagatgagtaggcagggagccagattccatgaaaaagcatgaaaattatgctgtggaccatggggtacctctgaagggagtggcaagggtgatttttccttcatgaagagagcccagcagtagaggtgagggggccgctataactgctagggaaagagatggtgatgcttgggctgtaaagaggaacagaatttgagagctgagcacctgatggacaatgctgcatggcaggctgggctcaaacagggttgctcctgaggggtgggcagaggacattcaaacctcacacaacacagttctgtcttgccacagacctccttggagcaagctgcaagctccaaaatttctcagaactgaaagtttttcctccaacttctgtaaaaccatggttaatacttttacaagacagagaaggagtccgagatttcaatagctaaaaactgggaagtagaccgaataccattccttgtgggagcaaaggcaggaggagtgaggttcagagctttgctttatccaaggggttctggacccctgactgcagcagctccctactggaccttctgccccaggcattactttgccttagtccaagaatcccacgaatgctacagatcttggtctactcctgagaagtagaaggaaaaagatttattgtgcaccgactacacgacaagctacaacccacaactgtactctagggacattcttctgttcctgtttagaaatgagaaagctaggacccaaaggcttggaattgagatttaagcccagagctgtctgactatgcccatgcaatactgtacattctttagagcaatactgtggctagtttttcacggttgcatttttagactcactcttggacagttaagaacatcttgcattagttacctactgctgaataacaaattactccaacatttagctgattaaaacaacaaacatttattatcttacagtttccatgcatcagaaatctaagcacaggtagttggtttcggtgattcacgatctctcatgaggttgcagtcaaggcatcacacagggctgtattgtcctatgaagggctcagctcggcggggcagagatctgctcccaagttcactcatgtggttatcggtaggtctcagtcactcaccatatgggcctctctccacagtgccactgcaggatatagcagctggcttctccagagaggtgatcccaaaagagagcaagagtgtatgctcaaaacagaagccacagtcttcttataacctaatattggaaggaacatcccattacctctgctgtattctgttagtgagaagcaagtcagtaagtctagcccacactttaagggaaagggtttacacaagggagtatataccaggagtcagggatcactgggggccatttagaagctgctgatctcaatctaaagaattttagtagccaggctatcctggcttctccccaaatggcaagttgtttcccttgttatccagaggctggaggatttgggggtctacagggacacaagggggccctgttttggcccactcctttgtgcctggggcataatctcattgggaaaggccagtgtggtgaacctaactggagcccccaagggagggggggagttgttttctcaaattgtggccactgctccctccctcccttatccttgaagctactgtgatgcttcccagcaccgagtggaagcaacgggcatcctccacacacacacccagcctgtcagccagatgggtagagaaaccatcagcatgaacgtctgctttaaactttcctttgcttctgagcttctttccacaaattttcttttcttgctccccaaccacatccataacccccacagtagctcacagtagaggtgctccaggagcttgtcaataggaggtaggaaggaaagacaccaagtgtgaatgtaggtcagcactgccacttagggcagttcaaatcacattcactgtcctcagcatctatcctatgctggtgcagggcatccagagatgtgtgaggtacctatacttgccctccagggggggctcacagttttaggaggggcagacatgcaaacagacagtgatgaaacgttagaataagtacaataaatacgtgtcaatacacacttttgtcacctcatcatggttatcttggttcataaagcatcatcttatgcttagactattacagtagctgccaacctggtttcctccatccatccatccagttggctgctaagaggtctttctggaatgcaaatccgacaaggtcactaccctggttaaaggcctcccaaagtgatggggaaggtcaagctcttgatacagtctccacccaagaccctagacaccgtccatccctccagttccgtcataccccctctgctcatagcacaggctctgtgctgtgataggtagctctccaggtgaccatgttgtacccctgcctccaggagctaattcatgtagacacatttactaggaaacattcccagttgccctttccagtctgacaaattcgccccagaacctctctcaaaacgtttccttcatagagttggattgtctttacttgttttccatgtccttgatgaaatgcgcactctgcatctagactctgtctgcatctagactctgtctgcatctagactctgcctggtacctggcacagagagggattgggttagcaaatgactgcgtaatggacctaaagtcaattctgggagcacagacgagggccaccaaaccaagaactttcaatttccccaaggaagcgcagataccagaagcaccctcgaggcttctgttttggccacgccctttaccccatcgctcagttcaggctcccaatgaggcggcccaccatcagcgctggtagagcaaagagaccgacttcctgcgcctcgggtgggcggggaacgctccttgagcaggtgcggtatgaaattggactttaagagatgagttggagcctgatctcaaaaataaagtgtggacgtgtgtgtctgaggaagggggataataaaccacccttttttcctcctggctgctatttcccacgtgcgttgagtaaaggcaccaaagctgcctagtgactgggtgtctcctccccgtcaggggcacccaccctggcgctccaggagcgcttgaatgaatccgggaggacccgcgcgcaggaatgaatgcgagagctagggagtgagcgggcgagtgggcgggtgagtgaatggcgaccgcgccgccgccttggcacaggggcgcgggcgcgggctccacttccctctcccgccagctggtggcctcgagaaggtggcggcgccggcagcggcccgagctgggacggccggggcgcgggatggtgggggaaggggcgttcccggcgaccgcgccttccgcggctattggattagtggccttcagggatgagctcagccagatcggctttcagctgcagcctccgggccggccgggaaggcggggagcgggcggcggcggcggaggagggggaggcggcggcggctgcagcatccagagctggccgtggcggccggcgcgccccgcgcacaaaagcacccagccccaggggagggcgatgaacacaccacatcccgggcccgggccccagctgctgctaccgctgcgtgcgctcagggcgctggggaagacgcccggcgcgccgggggccagcggccgaggcgcggcccgtgcgccctgagcgcgggactcgtcgccctccgggtcaggcgccaagcttccaagcggctagagcgcgggccttggagcgcccccaggatcgcttcagtaaggcgcttccccactccaggcccgacccccggcgcctgagcgccaacttcgccaagaacgctcctaactccaggccatcctgcagcgcagagggggcgctgctgccgggcatcagccgtgaggacgcgcccctggccgtgcggagagagccggcatttgcgggtcactcgggcgcccctgagtgggcggcggcggcagcagacccctctccagggagtccaggacctgccagcgctggggattcttcccgaacaggcgcttgccctctcttttatggtaagtactctccagctcctggtgaggggcgcgcgggggccgggagccgagatccggctgcacggactttgtgcgggccagcactcgacacagctggcgctcctgacgtcccagtccctgagaattcctctctgcaggttgtggcagttcgagatggttgatttgcgcgcagccctggggcgtttggggcccggcctttggtatcatgggttctaagccctttgcttctctgcgtagcggacaacgcacaaaaaactgccatccgattcacccgctttggtttggatccaggatccgtcactcactggctgagtgaccttggacagggcgccaaacctgtttcctcatccgtaggatgggaatgataattgtgcacattttataggggtattggaaagatctatgggatggtgttcgtaggtagacatgtgctgggcacacaggaaacactcaatcatatgttagctagtattattattagctttgcgagcccaagcttgttatccaactttccgaagctgcagcagttccgtcgtccgtgtaatggggacaataattcctgggggtctgttcgtccggggtattcggagaggtggaagtaaagcacgggtcacgcaataggcaccggtggctgttgttaccgtttattcctgactctggggcagtgaggctggtcgcctggcccgagagcgactcagggaccagtcctggccttgcttgaatacaaacttgtctatgctcgggaagggagggggttgggagctcaggaaaccctaggcgcagggctctgggaaggagggagggggtcagagacttgagcgcggcaaatgtgtccgccctggtcgctctgtacgcgccaggggctccaagccagaaggggacgccgagcccccgacctctgactggcgggagaaccgggggagtggctgctcccgccg

SEQ ID NO: 9954 - DNA, 6000 bp, Homo sapiens
taattttttgtttgctatgttggccaggctggtcttgaactcctggcctcaagtgatccacccacctgggccctcccaaagtgctgggattacatgtgtgagccaccatgcccagccaggaccacagtttctgatgggtaaacatcctgcctctgctcctagccattcttcactctcatttaaaaaatctgctctgctgccaggtgcggtggctcatgcctgtaatcccagcactttgggaggccaagatgggtggatcgcttgaggccaggagtttgagactagcctggccaacatggcaaaactccatctctactaaaaatacaaaaattagccaggtgtgggggcatgcacctgtgatcccagctactcaggaggctgaggcaggagaatcgcctgaatccgggaggtggagattgcagtgagcagagatggcgccactgcactccagcctgggtgacagagcaaaactctgtctcaaacaaaacaaaacaaacaaacaaaacaaaacaaaaaacaacttctctgcaaatgattgtgtctctgcctttcaccaaagaaattttattcctcacttcaaactttttgagagggtcactgacctgagcatttgacattcatcctctgcagtttggatgaacctgaggaactggtctccgatttagactattgaactttcaaggtggagaattgtggcttgcagagtgtgttcatggtgggcaaggacagaaggctggttagaaaatgcctgcactagcgtatgtacaggcaaaggacatttgtgtatttctggcagaccaaatgtagggagagaaagccagccatgagctatattgaagggatttgcccaaaagcacaaatggataccaactgtgagggactccttgcagaatgctgaaaatcagggctttcagagggaacataagcagttagggaatctttgagaaacccttgaatgtgacccaagaaaaagggtcaacttttaaatacctggtaaccctcaaaagcagcagtgaagactcagctttatacttggaggatatagcaccatatgcttaaaatggtttgtaattcattcacctttctccagccacatttcaaccccatttccctggatagctatacaaaacttccttaggaacctgaactcatcccttcttgctaggctgaggttcaaggctgggacctatttggggagcctctggtcttctctaatttctgttccatgcaaatttttcctggtcccagggaatcattagctaggtaaagataaaataccccttaggaacagtatcagctagaacccacattattcaacgagaatgtttgcctgctatattaaccagcaccacgtgggaaattcaagcactgtatagaacacagtgggttacaggttaagcccatcatgatgagctgatcttagtctgcttaaagacctggaatggaagaaggggaccaggaggaaaaggtgagaatgaggcaacaagactattctgtgtgacacattcaaatgcatgccaataaataagtgttaagataataaaaattaagtgctaagggcactaaaaagccaaaagatcaccttttgccaggggaatttgaaggggctttgtacaggaatccgtactctgaggactgtagaggtgagtatttgaagatgaagagcctgggaattccatattaggaaaggaagctaactagggcaagaggttaaggagaaaaagctgaattgctaggtagggggtagattacaaagatttcccagggtaaggagccaaatgcccatgggaaatccatgcagtaaaataatgattcctaggggaagcttctaagcatattaaagttttcaatatttatttattttgtgttgagagggtcaaggaattcatgccagactgtttcaggagagggagttaagaagggacaacaacagggagagggctattattttcccttcttcccaaacaccaggggcacactactgacacattttgattttaagataaaattcttatgggcagataagattttaagtgcttcaaagtgtttcagttggaggcgcttgcttaggcatcccaagggaagaactgagattacatttctcccccaaactaggggtgtttgattcagtagcagcgcaggctgttattcccaaagtaccactaatgatgcaatcatcagtccatccacacatcgcctacctatcatccattccataagccaacatttttgaatgctcaccatgtgtcaggtcccatacagtgtttctgagttgcaacaatgagtaaaactgtccttactagtgtatgtcagtgagttgggaatgggggagaaagatgaaacaaaaatagtaactttaatttttatagctgagagatgaatatttgagggctccttatatgatttcttcagctttttgtatgtttaataatttccctaataaagttagataataaaaaaaaccctttcggccgggcgcggtggctcacgcctgtaatcccagcactttgggaggccgaggtgggcggattgcgaggtcaggagatcgagaccatcctagctaacactgtgaaaccccgtctctactaaaaaaaagaaatacaaaaaaaattagccgggcgtggtggcgggcgcctgtagccccagctacgcgggaggctgaggcaggagaatggcgtgaacccaggaggcggagcttgcagtgagccgagatctcgccactgcactccagcctgggcgacagagcgaggctctgtctcaaaaaacaaccaaccaaccaaacaaagaaaacaacaacaacaaaaaactgtcctttctttcaaacaagggagctacatttgatagatgcctgtatcacaagggcaagtccagccatgaaattaatcccaggatattagtggaagagaagaccctggggcaagatggggaaggtggtcaggaaatgccctccagtgaagttaggtaaatgctctctagaagtaattgttcagattaaggaagccaaaagctaaacacctgactcagcctcaaactgggtttggaggtgctcacaggtcaggatcaggagtgaggaactagcctctaccacattaccttcactttatttatctccttcttccccctttgcttaaatgtcaacgaacatcaaagttgatgttcagattcaaccagcatttccagagcacctactatgtatcaaaggcttccggttagaatctgcctttaccaccttacagagagggaaggccgagaatgcctcaagccgtggagaacgtgagtccatcaggcaaggacaggttaggaacccagtccctccaagtccaagtcagggaaaacaggtcagaaacttagaatcagtcgtgggttcaaattccgactcgtttcgtggctttcggcaagtgagtggtcctctctgagctggctcaatttctccatccataaaaagggtacagtaagaccgtggaaggttgtaaggaccagagattctgactatcaagatcctggcacgtagcgaaggctccataaatggcagccatcattcttggccaagtgcgggcgcattctcccgggcacgcctcccgcggggtccctcaggacaggccgagcccgcctccgcggctccggtctcgcagagctcgcgccaggtggcccagcatcttggtgcccgcgccccgaagcgaggagcgagggcgggttggatgaccaaggtctgccctggaggatcaccccccccgccccttccacgctcccggcgcaggtgaggttttcggcccaggccacggggaccgcgacctctggggaggtcgaggcggagggtgcagcggggggcttggagcagggctccagagggcgctccctccctcgcccaggttcaccccagggccagcctcggcgccggggcccgcgggctgcgcgctctgcggctgcgaaaacccggagaggcggattggagcgcgctcaccgcgctctcagccaactcctccgcggtccggccgccgagctgggcatgctcagtgcggacgccgcgccgccgtccgccaactcggaagctcgcgctcccgggccgtgggggcgagaacgccggcggcgagccggcgtcgctcgccgcccccagacagtggcaaacttcgcggcgttcccggagctcgtccgggcgaggcagataccgcacaaataaaatcaaatccaagtcccccatcccaacccgaatgatggaggctgcggcggccggagtgaccccgccgccgccagccccagcccgctagccgcggaccaacaggtaaagtgttgggggttgggggcggaagggaagaggagctggggccgtggggaggcggcgggctggaggagcccgagacgcctgcgggctggctgcccccgtcggcgctcacagccatcgctcctcacccccttccccagcccctggagggactgtaaagggttaagtcggccccacgccaccgtgagcacggccccctccagccgccgcgaccgccagcagcgcgcctcggcgcctgcccggagccgccgaggggaccgtagctgcggatgcgccactggaacctggcgggcgtctaggaggcaccggccgcttcccaccggccgcatccctgcgtctcgcgccccctccagacctgcctctgcctgcactggcccggtccgtgtccaggtggcggggtctgcggggcgcgtggcggcgggggaagggtccctgccggggaagagaggcgggggcggtccgctccacagcttcttcccgggaggggagggccaccctcgccttgggcgagcacttcagccaccagcctaggcgccaagaaaagtttttttttttttttttccagtgccccacccccacccccatcctgcgcccagctggggtgggtttgggtccattggtgaaaaaagtcacacgttcccatcagctgctcctccccctggagacaaggtaggggggagcagaggaggcaggcgccgcggaggaccctggccgacctctagtccctccgccgccgccaccggagcggtgcgtcccggggctcgagcgcagccgagtacccgccgaaggctgtccccatcagtgcgtgtctgctgccgggcagcggcagcatccaacctgctttattcctcctgcctgcagcgccacagcgagcgagcgagcgaggagggggagagagggagtctgtctgcaaagtgctgctccctggtgctcagaggcggctgctccagctccaactctcattcatttcgccggttaacatgagagatcatggccgccttcgggcttctcagctatgagcagagaccgctgaagcgcccccggctcgggccgcccgacgtctacccacaggaccccaagcagaaggaggtaagggcgccggcggcctccccggcaaccggggccgcgctctgcagcactgacccggggccaagttggcccagcgggcatcgccggcgctgcggtggaagaggtcggggagggggattagaggcgggggccaggctgggggtgctgggcgaccccccggcggcggagaccgagcggctgtcagtccccgcgctccactggggcgctcgctttccatgtgccggtcgctttcccgttgccgggccttgcacggcgccgccgggcgcttctcgggcttcttccctgccgaaaccttgctcgctctcacccgtttctgcctgctttatttttcttcttgccgcttcggtaaatcgtcgtaaactttttgaaaaatgttggaatgcagtgcatcctacactgaggtcttgcgttttgcttttgctggccagggacgaaggtgagggggaagcttttcaaattttccagtttggaatggaagtcgtttttatcgaagtgataaatatttagctctctgaatatacctctgtaacccttctgccctttaaaaattaaaattaaggagaaacactgattttcgtctctagaggcaatgggcttaattgctagaggctgttttgtatacgtaaaagcag

SEQ ID NO: 9955 - DNA, 6000 bp, Homo sapiens
ttgttttttttgagacgagagtctcgctctgttgaccaggctggagtgcagtggcgcgatgtcagctcactgcaaactccacctcccaggttcacgccattctcctgcctcagccccctgagtagctgggactacaggtacccatcaccacgcctggctaattttttctatttttttagtagagacggggtttcaccgtgttagccaggatggtctcgatctcctgacgtcgtcatcctcccaaagtgctaggattacaggcgtgagccactgcgcctggccgattcttccctattgtagcatgtggctgacagtctccactttactaagttaagaactatatataccctttttttttttttttaaattgagatggagtttcgcccttgttgcccaggctggagtgcaatggcgcaatcttggctcactgcaacttccgcctcccaggttcaagcaattctcctgcctcagtgtccctagtagctgggattacaggtgcctgccaccacacccagctaattttttgtatttttagtagagatgggggtttcactatgttggccaggctggtctcgaactcctgatctcaggcaatccaccagcctcagtctcccaaagtgctgggattacaggcgtgagccaccgtgcctggctaaaatttaaacttttaacatttagactggactactcttaggtaagtaaaatattttagtttttaatctacttaggggggaaaaatctctatagattacttatgatacaaacagatgacctaaagatagcaacttaaaaaattttttttccctgaaagcgtattagccgtttgagagtttaattttgcattttcgtttcacttcttcatttctgtagagatcattggagtaataatagtacaaaatatttctcccctcttgcaagcttttaattatacttgtattaggcagcgtatttgtcagtataaacctaattgagataaggaacagtagaatgggcaactacaaagagttgtgttgggacagaatgtgatctagtaataattgtggtggatttgatggtgatttgctaccccagtgatacagattatattttgcaattagcaaaatttttgatcaagtggggataagttgagagtcagatgaagtatttgtgctcatatgagggaccattatgaatacttttgtctaactttctaaaattagtaactgttcccactagtttacagagtattttttctatttttttggaaccgagttcaaagcctggcatgtcaaaggcactcaattaaatttttctttttttaactgaatagatttttgaaaaataacactaaactatattttagaatatttggattttcttttaaagatggcttaacctttaaacagatacaatttgcacataaactgttaatataattcatcaaacaagagaatgagcattttggaagttaagagcctttactgcagaaatgtaggatggtatttcaaactactattgaaatattatgtatttgaggagtcctcctttcctcattttcttatctagaattatatttctgagacaaacaagataactgaatgttgggttcaaatgtatctcatttatagttttttttacacagtaattacagtagttggatatttgcttactaaaatgaagtgtgcaagaagaaagtgtgaaacagtttttttattatagaagcattttctgaattatttcattattttcgacttgttacccaaaaagatacattgattggagatagtgcccattccatttattcggttgataccacattggggttttgaatgatggagaccaatacagacctgcttagattggataaggttttgtttagtgcctttctcattttttacaaaacgacttttataataacttcagagtaatcaagtttttggagctcattctgttaataacaggatatgtggaccctccctatccctggcattttttttttttttttttttttttgaaatctgtagagtggctttgcaaatagtgccccctgtggtttaggaaatagagcctctttatttttattattaaaaaatagaattgttagcatatgatttttgaaagttagaaatttatcctttttgtttgagaaatgggaaaaaacttagaaactttaaagaagaaaaacaaaaaagagatggccgtgttttcagagtaggcctggatcatcatagtcagccagtagttttctcgtagcagtgcatatgttatcaattatgccactgggaaaccaaagaagtaatcaagaattgggctaattttttttttgataaggagttttgctcttgtagctcaggctggagtgcaataaggcaatctcggctcactgcaacctccgcctcctgggttcaagtgattctcatgcctcagcctccctagtagctggaattacagtcatgtgccaccatagctggctaatttttgtattttttgtagagatgtggtttcaccatattggtcaggctgatctcgaactccgtacctcaggtgatctgcctgtctcagcctcccaaagtgctgggattacaggcgtgagccaccgcacccagcgaattgggctaattttaatccctttagaattctgggagtggaaagtgattgtcgagctagaattcagtttgttcctagtaaaggggtagaacttgtttgagaatagctttggtaatagcttgaatctgtattttgttcacatatagaattttattctactgggattcatattacataaaataaggattttattagactctagaaagcaaaagaatatataaacaatgcatcttgttgtaagatgtgatttgcttccggctgcgcgcggtggctcacgcctgtagtcccagcacttttgggaggctgagacgggcggatcatgaggtcaggagatcgagaccatcctggctaacatggtgaaaccccgtctctactaaaaatacaaaaaattagccgggcgcggtggcaggcgcctgtagtcccagctactcgggaggctgaggcaggagaatggcgtaaacccgggaggcggagcttgcagtgagccgagatcgcgccactgcactccagcctgggagacagagtgagactccgtctcaaaaaaataaaataaaataaaatgtggtttgcttcaatcactaactcattatattaggcagaaagaatgaataggaaagatataaaattagtttgagtccttttgatttcatgacttctagacttaagagtggatcatagaaatatgtaatatttctatatatacatatatatgtatatatacagagagagagagagagagccccccccccccccccgagcaggagttcatcttatagtcttacagtcttcttatatcttacagtcttcgaatctagaatgtggtagatgcctaataaaggtttggataacagtgaagtctaagtggccctataaagttaccagtgattctcgaagagggaaacaggtttagttttaaaacaaaccagcatttcgtttttatttgtgatgttgaatttattctgagatttcaaatggcattaaaagtacatattttgcattttttatgggaacaaggaattaaaaagcttaagaaacttactaaaagtttgggtaacatagtttgaccctgtctttacaaaagattgaaaaaaacaattagctgggcttggtggggcatgcctgtagtcccaactacttgtggggctgagatgggagtatcgcttgagttggggaggttgagaccgcagtgagctgtgatggcacctctgcactccaagcttgggcaacagagcaagaccctgtttttctcaaaaaaaacaagacaaaacaaaacttaataaaaatgatttaagacttctatgctttttatagtctatgttaaatttttttgtgtgattatgaaaacaatataggcccattgtagtaaatactaaaaaagtacaaagaagaaaacacaatttcctcataattgcaccatgtgataactgcctctggaatttattcatttgcgtatgtaattgtaactgtgtttgtgcaaaagcatttctagagtgcataagtattaataaaggagtagtaggcctggtgcggtggctaacgcctgtaatcccagcactttgggaggccaaggcagacagatgatttgaggtcaggagttcgagaccagcctggccaacatggtgaaaccccatctctactaaaaataataataaaaaaaatagctgggcatggtggcacacgcctgtaattagagctacttgggaggctgaggcaggagaattgcttgaatccaggaatcggaggttgcaatgagcggagatcgtgctactgcactccagcctgggcaacagagtgagactctgtctcaaaaaaagaaaaagaaaaacaaaaggagtagttactggaataatacttttggaccaattttaagacagttcatttagagcagtgtttttctaactgcaatttgtcattcatgtagccatctcaagcagggttccataaggggagatttaagcactacagaaaatgaattgagtgctggttttgtcatttctcccagtgatcgtactggtaccattctaaatgcactggagagaaggtaattcattacatacaatggatgccttggggcattttaaattctcctgagaacctcaattgaaaaccgccaggagggtcatgaaatcaatttagtgggtcaccagcattaaaaaacataaaaacctgaagtagaataaaatggaaaatagaggacattgcacataggaagattaatcaatctctgttttgaaattgccagtttacattatttgaaggccagaataatccaggactgtaaattgttaagcatatatgctaaaatgagatagaaaagtaaagccttagaattatacagattaaaatttttgacaaatagtggaaaataatgtgtatgacactgagatttccatgtagttgcagtattaagtttattgggcatcacagaccttcagtataaaatgtcacaggattaacaggatttttatcagtgtatttttcttcaagttctaaaggggatgttatattaccaactttacatggctttgtttccattaaggactcaaaataatagttgcaaaatattacaagaactcgagcctttgcattttctgtgagcatttttaagtatctcaaacctaaaattggctttgtgaggtaggtggtatgatctttcagcctgtggaaacagctgccattgctgtgactcctgacgatctgtttttgatcagttagtgcagatgcttagatcatactgtcccagttttgcattaatttgatcaattctattgattacagagaagtgaggcccaagactaagccttgaaatctctaagtagctatttgctaccttgtaacactgttctgtttcatttattgaaacactaactcacaacatgttggaaatattaaggaaacctgatagtgtactgagggattctgtttcttttggtaagagttgttggcagctatctggtagggtgtctttatacttctgaaatcatttattgaccacttgaatgtcttagtattatacacagcaaaaagaccctgatgagatatattcacttcctgtgtatccagtcatatgtttagtaaggttgctaatgatttattttgggtcagaacaaagtaatgtgcatttcatatgcattatattttatttcttgtgtaaataggccattagggagatagactattaaatttaccaacctacactactgcttctgtcttatgaacacaaatttaaaaattaatctttatcacttatagcactttaaaaattctgtttttagaaataattttcaatttttttttttttttttgagacggagtctcactctgtcgcccaggctggagttcagtggcgtgatctcggctcacagcaacctcgacaacctccacatcccaggttcaagcgattctcttgttgca

SEQ ID NO: 9956 - DNA, 6000 bp, Homo sapiens
aatagtgtacatatctgtctgggcactgtggtgcatgcttataatcccaacattttgggaggccagggtgggtggattgcttgaggccaggagttcaagaccagcctgggcaacacggtgagaccttgtctctacaaataattttttaaaaatcagctgggcatggtggcatgcacttgtaatcctagctacttaggaggtggaggcgggaggatcactctagcccaggagttagaaggtgcagtgagctatgattgcacagctgcatccatcctgggtaacaacaagaccctgtctaaagaaaaaaaaggaacatacatacattattttagcttcttttataatcccctagcttaggaactggtcagtaaatatagagtgaataacagatttatactggaattatctttactagtttgttatacttcctctttaagatgttttgtcaaagaaattctgaatttattttgtttctctacatgttagctagactcatgtatcatttagcaacaacaaaaacttatttcatgtgatagactgactgtttacttctagctattgttggctatgtcagagagaccagataccttagccaagaatggttatcaagactggagaaactgaatatgtgtgtgagtaatcttttgagaacaggctggtattatctttttgtaaagggatcatattacatttctagaatttcagaacttatttttatagttgaagctaagtccctcctctgattgctagaaataaagctatgtaatatttttatttcagcatttggatttattataatatgtattacgatttttaagattttgtttttcattcttttagacaggtgctctagttcacagctataggggaacaggtggaatatttgaagtttgctggaatgcagcaggagacaaagttggagccagtgcatcagatggttcagtaagtatagtaaagtgtttccaaagagggtgtgggtgggtattcacatcagaatgcagcttattgttagtgataccaaagtgtttttttcaaaataaattttaaggtatgatactgatttttttttttcctgaggctgtaaacttttcatgtgcgttggattcaaataatgtaaacaaaatttaggctgtccttaccaaataccttataatctagaaatggacagttatttttaatatgaaccttcatttatgaaattaggtataccagaggaacattctgagaaggattgaaatgtttaatgtgtatttctaccttctcctcttcacagaagaatttttttggcccagggaaggcagaactagaggcagttggttcctgtgttgaggaatgtgtgatactgaaagattttcaggatgaggttagccaactctttacaacaatgcaaatatggcttccaaagctgtagaagcaccagaaggtgggaaaagggtagctatttactgatgctgtagctgaatataatctgtgatatctttcattagggtccaatagataggaaatggtctgttttgagcattttccccctcctttttaatcaacagagagtataaaaatcctagccgtggttcttcccccacagtttgagctcatggttgttctcttgatctgcttaaatgatctgtctgatttctgtcagttaagtgctcatttccatgattattatgctttaccaattttataaacttggaactaagaaacatttcaaattgtactatagaaaagttaaacataaaatgtacaataaaattctgaatacactggttgattattttaatttcttacaggtttgtgtattagaccttcggaaatagcgctactagttggaagccatggaccgactatgaatgtgtacatagccaaaatgactgtccctgacccatgtactgctatagtcccacttgaaccatggccagtccactacagccaaatctaaaagaaatatatacatacagtgtatataaacaaaattgcaccctgaagatgacagagttttgtcacagcttgtgaattctgttcaccaagtgctggaatctaatctgctgtgcccctaaaatagcatttagaagttttggatatgaaaaacagaagagagaaaaatatacattataaaagcagaacatacatgtaccagtttttggatactaaatgacagccttgtttctcccctttgaatcagcagacaccatggattatattctttttttcccttcagtagtgagcagtttgtatgtacagagaaaatggacttacaaaaacttgcagcagtagtttgttcttgctttaaaatttcgtttttggtttagattatggatgcatgaagtaagggagtgaatcagtttcttgtttatatttttttcaccttttaaacaaaaaattctttaaaatattttaatgcattcttttgaagaggtagatgtttggtacattttatggctcccagagcatatattcagttggtgcatgttgtggaagggggaattggaaattaaatgaaaacctatgactttggtcatgtcaatctgtaagacacatcagtaaaagggtattatgctctgttggttttgtttttttgttttgctttttttttttttttttcttttttgttttttggtgatgtggcttaaatgcaatagtttcttttttgggacatatttctgccaattaaagactagaagggcacaactttttttttaattaccatagagaagatacattaaaaaaaatcttctgatgttttgtagccataactaaattatggtaaaaatgtgcactattgtgaaaaggagcaacgtagttttgggttttttgttgtttgtttgttttgctttgttttttaagagattaaaatgtttctggataaggattagcttctcgaagtgtccatcattctgtgtagaagcttaaatatgtaatgtaaccaaactccagtattaaaaatctctcatgttgttttctttatacaaagcaagataacggcatataacactgccattacatggcaaaatgtttgctaccttagtttaaaaaacaatctcaaacaaaagacttgcttcaaggtgtttttaaatagcagtgattcagaattttttttaatgaaagtataattgcactaaccttcttcctgctgctctgattctgcatttgtggtacttgtgactacgttttttcaaatatagatagatttaagctgctaatttttttttttttagtaatcactactatatcatgtcttttactctgtttataatatcaagtattttcttaaagatatagatattaaaccttgtgctcatgcaacttagagtaacatatacagacaaatgattgcatgaggccatgtttatatgtgtgactaataaggcttgtcatgattaacataatccaggtatgtcatttctgaagagaatagtcatcaaatttatatctcgaagattttaattaaggaattgcttattgttgagcttagcaaattaataacactatttctgtcactaattattttgaggccttttagtactaaaattttaacctgtgttctaagtagaaactgatttaacccaagtaatgcagctttgattgatttcagcattcgttgctttgctatttttacaaaacagcattgattgaagcaagtcttggttttactaaggtagggtagcatttgctattggtaaagagaataaatacacttaatttcacaatacattgttatatgtaccccagttgttgttagtggggactatgatactgtaataatatttttaaaaatttacatcaagagaggcagtcattcacgatggttttgtgccagctctttttagggttttggatcacattagagatatttagaacatattaccctgtgacttacgtaggaaacctaatatgctgagtatctggcacttgaattcctgcttttattgctggaggtccacatctgtggttgacctctgttattgtttaaaaaaaataaataaaaattaaaaaaatctgtgcaataattttaaaatgtgctcccaggaatagacacaaatgttttgagtatcttttaagctgcattttcctttagtgatgcatttgtcaattgcactgaatttaaatctgaaagtcagaggtgattattgatagtacttttgtattttgatatggacagtttattcatttgcatacagttattgactttttcccagctgattaaaagatagtcaagaaattctgcaatatagctgccaaaatagacagctacatttttatgatattgtcatcttttctgttttttttttcttttttttctttagctattttacttaagcataatagccacaataggacatataaaagattataaatacagagctttattatcctgacgtcttgggtcttttaagtatatacttttctgaaaggtatccattttgtaggcttgggttcttcatgagcatacgattgtttatttttgctgctgttctcaacatcatcattgcctgctgatgtgccacgatgctgctccaatagacagcaataagattgtctctaatttgagcagtaacatgattgcaagagaccaagtttcacagcttgtaaagttctgtatttgggattcttgcttatttttccgcctgtgtttttctgagaacttattcctgatgatcaattgaatccagtagtttttctatgctatttgttgttgtataagctactgtaagaaacttatcataaggaaaaatagaaaggaaaacttgaatcaatactcattgattaaaatggaataaagaaagagcagctgccacttttaaacaacataaaggaatatctttttttgtctccgtgtaggaaatcccataagttcttatatttgttccagttcccatttcctgccattgaccagataacatcattgactttcaaatgacttttagaagtgataactcttaatttcctaatagatactagattgtattgaattctgttttaattattctctaggtaagtatgttttaggattaaataccttttacagatactgaaagtgcctccttttgtggtgtaaaaaacaaattatggtgcaaaaagtaatcactagattgaaatacatgaaggttttttgctttttgacatacgaaaatgtcaagagaaaggccaaagatttgtactttttcacttacaaagcactcctttttcccttaaacttctttctgtcaaattagatttaatgagagagtactatttttaaggagctatctgtttatgtagaatgattttgttaagagtaatgtaaactattattgagtagaggcctaaagaggactgtgcatttttgctatttaaaggaatcacaaatgatcatacttaagtgagcaaaaatgacaagttttactagctaagtagagaaataaatctcaaatgcagcgctacaattttcattatcttaagtacattgtacatttctacagaacctgtgattattctcgcatgataaggatggtacttgcatatggtgaattactactgttgacagtttccgcagaaatcctatttcagtggaccaacattgtggcatggcagcaaatgccaacattttgtggaatagcagcaaatctacaagagaccctggttggtttttcgttttgttttctttgttttttcccccttctcctgaatcagcagggatggaaggagggtagggaagttatgaattactccttccagtagtagctctgaagtgtcacatttaatatcagttttttttaaacatgattctagttaaatgtagaagagagaagaaagaggaagtgttcacttttttaatacactgatttagaaatttgatgtcttatatcagtagttctgaggtattgatagcttgctttatttctgcctttacgttgacagtgttgaagcagggtgaataactagggcatatattttttttttttttgtaagctgtttcatgatgttttctttggaatttccggataagttcaggaaaacatt

SEQ ID NO: 9957 - DNA, 6000 bp, Homo sapiens
ttttttttgataccaaagatacatttactggagttattggcttctttttttttaagacagggtctcactctgtcacccaggctagagtgcagtgatgcgattacagctcactgcagcctcggtctcctgggctcaagcatccctcctgcctcagcctctcaagtagctgacactacaggtacatgccaccatgcctggccaattattttatttttttatagaggcagggtctcactctgttgcccaggctggtctccaactcctgggctcaagggatcctcttgccttagccacccaaagtgctgggattgcaggtgtgagccattgcacctagcagcattattttcctttaaatcaaaataatataattgtttaatataattatgtccataaaatatattacttttgaaaatctgaacaaaattacagtttttggttaaagaagaatggatttgcctttcaaaaaaatgatacacgagagactgaggcaggagaatttcttgaatctgggaggtggaggtaggttgcaatgagcctagattgtgccactgcactccagcctgagggacagagtgagaccctgtctcaaaaaaaaaaagacacagctgagtgtggtggcgagcaactgaaatcctagctgctctggaggctgaggcaggggggtcacttgagcccaggagttggagactagcctgggcaacatagcaagaccccggtcaaaaatttttttaatttaaaaaattttccaaaaggggcacagatacattgaacattgaccttcctttgtctgcttttatgggactatccggcttgttgtgatggttgtggtgaaatttacatccaggatacaggattatttgttcttctcaaaggagtgtcccattggcccagcatttctctcatgttgtctctcccctgggactatgaagaaaccctgaactgatgcaaccaccacttgaaaataaagttccaagccaatctgaattgcactaggaaaaggcagccattcttttgggtagggggagaagtgagcttggctggtcattctggttgttagcaattatctggcttccgtgggagcatcatccagaaatttacatcttattgaaacaagaagaaaatggatgctattatcagttcgttaggtctctaaactccttcttgaatgatacatgtgatatggatgtgctgttctttcattactctcatcatcaacaaaaacaatatgtgtgttttaatgccaaccagggactctgctaggttctagggatgcaatgagatctaaatgcttaaccttttagaagctagcataaatgttagtagcacttacagcattaaatgaagcagatttttaaatgaggttatagcaaaagaaaaaaatactgtacatacaattttataccaatactaacatagcttatttcacacaaaagaaaaagctatttaagcaattttaaaaattcatattcattctagagaataaattccaaatttatagcaaaaaaagagtgaagttttcattagctttcaagaataatgcaggctccaaagtatttaatattctatattatgggaatattttatgtaagtcatcccaacaccaagtaatgctaaaaataactttatataggttcaataccatgattttattaactatagatttttagaccttttcttactttttgttattgaatcattcacagcttttattggttgaattgccttctcctaaaagtaccaaagtgtgaagagtttttatggctgagtaatattcagattcttgtagccaaagacaggttctgtgaagtaatattgaagactaaatgttgaagagtagctttctctaataccaagcggtcaattttttcaaatatcatgaactggggtagagttaagttttcatcctcctcattatagaatcattcctcattatccccattctttctcctgctgaggatgtggtggtgtactcaaagtcacatccatacccttctgtctccaaagtcctaggagagatggccctcttctcaacctctacattgcacagaaccttacatccctcaacagaaggagtacatagtgcataaggaaagtggtcttttaccactcctcctcactctgtaacattaccaaggactatcctgcaaggggaccatccataggatgaatagcaatagactgctgcattgacgtgcaaagtgctgacaacccattggtgtacaaagcaccctaagcaagatctaaagttctaagatcttatcatgtaaatcaccagcatgctgttttatgtatcttattgtaatatccttccaatcagtattataaagggcaggacactgggggaatcttaaggctttgaagatagggatagtcacgtgcatgtcttataaattctctgatgatcatatactgtttactggtagtaatgactgtacttaaacaaatatattgtttctcatatcattgcatgccaattgaccttcaagtttaagccaatgaaaagatcactcttttaagtatatttggataattttgatatagttacatgtgaactcattaagtatagaaaccttggcttattatttaccacctaagcctaggtcagtacctggtgcttagtaggtatttgatgaatgatgggatgaataaatgtggaaataagtcttttcagtatctaaagacaaaacagatacataataagatacaaatgagattggctcatctatctttattttcattcatttgaatgtccatgtaagcaagttatttcttaagtgacccagcactgcagtgcaactatcattaacataaaatatgattaaataatccacattgtataactgttttgttagtaatgtagggatgctttgcgtgttgcttggtttgtgtatgctgccaaaagtgtaagcaacatttactgagctgctatgtggcaggccctgtgtttattaaaattgtagtttttgctaattgactgttttttgacacatccgtcttgttcatcattgtctacctagcacctagctttaggcttgccacatattatattggcaatgaatatttgttgaacaaacaaatgcatgaaatgtaatgagtaagacaggttttcgctttcaagtaaaacatagtctgggggaagacggaatgtcagaatgtggtgggtgctataggagtaggtgttatcagattctgatgctatggaataataaattgttaaaatatgtaatcttatgtttcagaagctaaagcacagtatgggaactattagaggcttagaaggcctcactacccactagactcagaagttgaatagtgtctgagaaaaaagagaatagaagtaacagtagatgaagagtccagaagtgagaccctttgaggacatgaggacaggtggaaggactgcatctgtgtgttgccaaagagtaacagagactggtataggacttgagttcaattcagtcatatccttaagtattgtgccatcgtgtctggattactttgtagtataagtaaatttccaagcatggggaggaaaggagaagctcctttattgagaattcaactgaatatagagaaaactaattttacacaactgtaatcactgtagtcatttggacaaattagcaaacccaagttttgctttaacttggattgccttaataaagatgttttggggcttaatggcacagttgctcaactcccccactttattccgtgatgttcagacccagccagcatttccccatcaggctcttgcaccatgattgacagggacacttttactagtccccttgaagaatgaatagttactcaatggagattaaccagatatatatttattttactcagaatatcacgataagtataattcagagaattattgccttctaatatactgccctgtgtgggggcgtctttgaaagtccgcaaagtcactgcaattctaataggccactcatgtgacaagacctgctcccacatcggtaatttggcacagctagtatttctccttgccaaaaagggcaaaggccttgagcaagaagccagctttttcctgattacaaaactgaccacaattcctcgccaacctaacagcgtaagtctatttttttctggtggtgtgttattcttctcatagagaactccattttttcattatgacatagcacttatcgtttaaacatcaattgatgttcaaacatcagctggtgtaacattgctgcagttgctattgatggataagctgaagtttttaagaaagcaaacccgatgtataaaattgaaaccatatcaaacccttcttcattctctcagctatttaattttacagaatttagatagcagtcagtatcattttgggcttcacaaatcagtagagtaagtaccttaggaatataacatttcagtagcatgctgataccaacgtttaaactatggatacatatttgaattccaaatttttcttcaaataatgtgattagagattcaaccaggaatagacaccgaaagaaaactttgcccaaataagctttctggtatttcataagcaagagatttaagttttccatttaagaagcaattgtgaattttacaacaataaaaaatgcaagtggatattgaacagtctctgctctgataattctaaatacagtacagttcacgcccctcacaagacactgaacatgtgggtcaccggcgagacagtgtggcaatattttccctgtaatgtaccaagtcttgccaaagcagtgaacattatgacacaactttttgtcacagctggctcctaataggacagtgccagccaattcaagcccagtcctttctgtgtttattcccatctctcccaaatatttggaaactgatgtcttgactcatgggtgtattcacaaattctgttacttcaagtctttttcttttaacggattgatcttttgctagatagagacaaaatatcagtgtgaattacagcaaacccctattccatgctgttatgggtgaaactctgggagattctcctattgacccagaaagcgattccttcactgatacactgtctgcaaacatatcacaaggtaaagttccttccagatacggctattggggacgtgggggcatttatgtaagggtaaaattgctcttgtagtttgtcttccaggttgtgtttgttttaatactatcatgtgtacactccagtattttaatgcttagctcgttgctatcgcgttcatttaaaaacatgttcagaaccttaaaaaaggaaacctaacctaatctattttatctctgtgcatggctcccatttcctgaattttaagcattaaaggtatagttatatccaaaaacaatcctgttcatttttatttcctgagtttgcatagatttcccaagaatacataagggctttttagacttgaagggtcactttttcctcttttcatctcatatgttagagatctctcataactgtttttatccctcttgcagcacttttattcctcttgaagtactctcagctcttttctgttctattttgaaatctaggtattgtgtgtgcacttcagctctcccaaagaattgtaaattcccagagtgtaggaccaagtggtgctctttattagatttcttaggatacttcctagcatagtgcctaatgcattgcagaatagattgtcggaaccttgaaaaatatctgttccaagcatcacattttatgcataaagaaaatgaggtccctaaaacagtaaatgcctattgcaagtgactacctattaacttctcttcagatgtgtcagaatcagatacctccttttcaatatttctttcttggccattgcaaaatataagttctccatttctatagctccttctactggagtttcttagcacagccttttctgttttgtattgtctcgtattgatgtctatatttctattcattttatttttctcttctcagattctgtgtaaaaatagattgttagctagtgtgattcatgt

SEQ ID NO: 9958 - DNA, 6000 bp, Homo sapiens
atctcagcaaactagattttgttggttctacttttttctctcctcattaactatagatactcaaagcctactatacttgaacttaatctcataaattatgagaaattttaagtaaacaaaacagttgagccttcccagcctgataatcagtagcaatgtgtcagtaccaatgcatctgtgatttgtgccacattactgggctaaatttgaagaggaaagctcggtcaaacattcttccagcttgtcatcttggataggctgaatgggaggtattttcaaggtgcatggtttgttgccatgtgcttttaagtagatctgccacctctagcttgactttaggttaccataaagctgcagaggtcacttttctgatttgtcagggccgaacacctgaagcatatatttcagttttcataacaggacctctgatctttgtcctgttatattgactggtttcataggagaatatatttttggattgagttttaattcttcagtagcagctgaataataaaataacgttgttacatttatgattcagcttaatgaatgattacattattagtattcctgcctgtgttttttgtttaaacatataacgtctttcaagaatagtgtacatatctgtctgggcactgtggtgcatgcttataatcccaacattttgggaggccagggtgggtggattgcttgaggccaggagttcaagaccagcctgggcaacacggtgagaccttgtctctacaaataattttttaaaaatcagctgggcatggtggcatgcacttgtaatcctagctacttaggaggtggaggcgggaggatcactctagcccaggagttagaaggtgcagtgagctatgattgcacagctgcatccatcctgggtaacaacaagaccctgtctaaagaaaaaaaaggaacatacatacattattttagcttcttttataatcccctagcttaggaactggtcagtaaatatagagtgaataacagatttatactggaattatctttactagtttgttatacttcctctttaagatgttttgtcaaagaaattctgaatttattttgtttctctacatgttagctagactcatgtatcatttagcaacaacaaaaacttatttcatgtgatagactgactgtttacttctagctattgttggctatgtcagagagaccagataccttagccaagaatggttatcaagactggagaaactgaatatgtgtgtgagtaatcttttgagaacaggctggtattatctttttgtaaagggatcatattacatttctagaatttcagaacttatttttatagttgaagctaagtccctcctctgattgctagaaataaagctatgtaatatttttatttcagcatttggatttattataatatgtattacgatttttaagattttgtttttcattcttttagacaggtgctctagttcacagctataggggaacaggtggaatatttgaagtttgctggaatgcagcaggagacaaagttggagccagtgcatcagatggttcagtaagtatagtaaagtgtttccaaagagggtgtgggtgggtattcacatcagaatgcagcttattgttagtgataccaaagtgtttttttcaaaataaattttaaggtatgatactgatttttttttttcctgaggctgtaaacttttcatgtgcgttggattcaaataatgtaaacaaaatttaggctgtccttaccaaataccttataatctagaaatggacagttatttttaatatgaaccttcatttatgaaattaggtataccagaggaacattctgagaaggattgaaatgtttaatgtgtatttctaccttctcctcttcacagaagaatttttttggcccagggaaggcagaactagaggcagttggttcctgtgttgaggaatgtgtgatactgaaagattttcaggatgaggttagccaactctttacaacaatgcaaatatggcttccaaagctgtagaagcaccagaaggtgggaaaagggtagctatttactgatgctgtagctgaatataatctgtgatatctttcattagggtccaatagataggaaatggtctgttttgagcattttccccctcctttttaatcaacagagagtataaaaatcctagccgtggttcttcccccacagtttgagctcatggttgttctcttgatctgcttaaatgatctgtctgatttctgtcagttaagtgctcatttccatgattattatgctttaccaattttataaacttggaactaagaaacatttcaaattgtactatagaaaagttaaacataaaatgtacaataaaattctgaatacactggttgattattttaatttcttacaggtttgtgtattagaccttcggaaatagcgctactagttggaagccatggaccgactatgaatgtgtacatagccaaaatgactgtccctgacccatgtactgctatagtcccacttgaaccatggccagtccactacagccaaatctaaaagaaatatatacatacagtgtatataaacaaaattgcaccctgaagatgacagagttttgtcacagcttgtgaattctgttcaccaagtgctggaatctaatctgctgtgcccctaaaatagcatttagaagttttggatatgaaaaacagaagagagaaaaatatacattataaaagcagaacatacatgtaccagtttttggatactaaatgacagccttgtttctcccctttgaatcagcagacaccatggattatattctttttttcccttcagtagtgagcagtttgtatgtacagagaaaatggacttacaaaaacttgcagcagtagtttgttcttgctttaaaatttcgtttttggtttagattatggatgcatgaagtaagggagtgaatcagtttcttgtttatatttttttcaccttttaaacaaaaaattctttaaaatattttaatgcattcttttgaagaggtagatgtttggtacattttatggctcccagagcatatattcagttggtgcatgttgtggaagggggaattggaaattaaatgaaaacctatgactttggtcatgtcaatctgtaagacacatcagtaaaagggtattatgctctgttggttttgtttttttgttttgctttttttttttttttttcttttttgttttttggtgatgtggcttaaatgcaatagtttcttttttgggacatatttctgccaattaaagactagaagggcacaactttttttttaattaccatagagaagatacattaaaaaaaatcttctgatgttttgtagccataactaaattatggtaaaaatgtgcactattgtgaaaaggagcaacgtagttttgggttttttgttgtttgtttgttttgctttgttttttaagagattaaaatgtttctggataaggattagcttctcgaagtgtccatcattctgtgtagaagcttaaatatgtaatgtaaccaaactccagtattaaaaatctctcatgttgttttctttatacaaagcaagataacggcatataacactgccattacatggcaaaatgtttgctaccttagtttaaaaaacaatctcaaacaaaagacttgcttcaaggtgtttttaaatagcagtgattcagaattttttttaatgaaagtataattgcactaaccttcttcctgctgctctgattctgcatttgtggtacttgtgactacgttttttcaaatatagatagatttaagctgctaatttttttttttttagtaatcactactatatcatgtcttttactctgtttataatatcaagtattttcttaaagatatagatattaaaccttgtgctcatgcaacttagagtaacatatacagacaaatgattgcatgaggccatgtttatatgtgtgactaataaggcttgtcatgattaacataatccaggtatgtcatttctgaagagaatagtcatcaaatttatatctcgaagattttaattaaggaattgcttattgttgagcttagcaaattaataacactatttctgtcactaattattttgaggccttttagtactaaaattttaacctgtgttctaagtagaaactgatttaacccaagtaatgcagctttgattgatttcagcattcgttgctttgctatttttacaaaacagcattgattgaagcaagtcttggttttactaaggtagggtagcatttgctattggtaaagagaataaatacacttaatttcacaatacattgttatatgtaccccagttgttgttagtggggactatgatactgtaataatatttttaaaaatttacatcaagagaggcagtcattcacgatggttttgtgccagctctttttagggttttggatcacattagagatatttagaacatattaccctgtgacttacgtaggaaacctaatatgctgagtatctggcacttgaattcctgcttttattgctggaggtccacatctgtggttgacctctgttattgtttaaaaaaaataaataaaaattaaaaaaatctgtgcaataattttaaaatgtgctcccaggaatagacacaaatgttttgagtatcttttaagctgcattttcctttagtgatgcatttgtcaattgcactgaatttaaatctgaaagtcagaggtgattattgatagtacttttgtattttgatatggacagtttattcatttgcatacagttattgactttttcccagctgattaaaagatagtcaagaaattctgcaatatagctgccaaaatagacagctacatttttatgatattgtcatcttttctgttttttttttcttttttttctttagctattttacttaagcataatagccacaataggacatataaaagattataaatacagagctttattatcctgacgtcttgggtcttttaagtatatacttttctgaaaggtatccattttgtaggcttgggttcttcatgagcatacgattgtttatttttgctgctgttctcaacatcatcattgcctgctgatgtgccacgatgctgctccaatagacagcaataagattgtctctaatttgagcagtaacatgattgcaagagaccaagtttcacagcttgtaaagttctgtatttgggattcttgcttatttttccgcctgtgtttttctgagaacttattcctgatgatcaattgaatccagtagtttttctatgctatttgttgttgtataagctactgtaagaaacttatcataaggaaaaatagaaaggaaaacttgaatcaatactcattgattaaaatggaataaagaaagagcagctgccacttttaaacaacataaaggaatatctttttttgtctccgtgtaggaaatcccataagttcttatatttgttccagttcccatttcctgccattgaccagataacatcattgactttcaaatgacttttagaagtgataactcttaatttcctaatagatactagattgtattgaattctgttttaattattctctaggtaagtatgttttaggattaaataccttttacagatactgaaagtgcctccttttgtggtgtaaaaaacaaattatggtgcaaaaagtaatcactagattgaaatacatgaaggttttttgctttttgacatacgaaaatgtcaagagaaaggccaaagatttgtactttttcacttacaaagcactcctttttcccttaaacttctttctgtcaaattagatttaatgagagagtactatttttaaggagctatctgtttatgtagaatgattttgttaagagtaatgtaaactattattgagtagaggcctaaagaggactgtgcatttttgctatttaaaggaatcacaaatgatcatacttaagtgagcaaaaatgacaagttttactagctaa

SEQ ID NO: 9959 - DNA, 6000 bp, Homo sapiens
cttcatagaaattactacttaatgataaatggtgattaatatttcagtaaagaaaataaccacccttggtttatcagcttcttagaattttacctttgaattttgactagatattaataaaaagcaaggccaacataaagagatttttattaagtaagtgctttggttttaagtatttcaagttaagagtaagtaattgctgatggagacctataaaccaggtaatcatttgctagctgttcatttcttaaatatttcatatagatgagttattactaagtggcaaagaattggtatttttaaagcacttaattcatacataaaatgagatttaaccgttatgattttttaatatttgaatttatttttattattttagttttcctaagtagttccaaagagctccaaaatactgaatttatcagatgtttgacaatttatatgtagaaatttaaatacttcagattttacctgagtgctagattgctttacagacattattgaattataactacgtagtagataacaattacatgaagtaaatgaagatcattcagaatgaatgaattcctatttaaagcatattatgtgtaccacttttgagagatgctgaatacttgaactgggctgggatgaaagaaaatttgaaataaagttccttaattctagatgtaaaaaatattaaaatataatacagaaatattaaatgtcccttaatctgtcttggcctgatttaaatgaagcaatttaattatatgatttccaaagacttgttttaccttttacatttgatgctttttgttaagaaaagttgtgtaccatgacattttagaaaatttgaagctatataatcaagtatttactagaaattttaaagagtacattaagagaaaaagaaagtatgtaaaggctgacatgtttacatgcacacacacgcgcgcgcacacacacacacacacacacacacacacgaccttcgtctgggattttaaatgggtaggatgggatttgaaaagatgatggtgatctttctttctgtgtcatttagcatgttgccactaggaaaataaattctcatgccttttcttttgtttttaggattttctcattcagcatttacctttggtatagaaagccatatcagtcagtccaatataaatggtgccctcgtcccacccgctgcattgatttctatcatccagaaaggtctacagtatgtagaagcagaagttagtattaatgaggtaaggaagacttatttcaaatactgatttttttcatcttaaatatgccgttaagtcagctgtcttgcttgcttattcagtattctgactttagcttcacagggttaacaaaagtgcaggcagttcatccctaatgtggtagtcaggttgcaccggcaaggtgttggcgcctagttgtaaggaccattatctgtagtttgtttgccttaatctgtttgtgtaagtaaacactaataaagaatttttattaacacaacagcattgtgctgtggaatgctaagatcataattattggcctgaaaattgtaaattctcacgttatttgaatatacccaaatttaaaccagtttgtaattgaagccaactctggatggtactgcctatctaaggactacatgtgagtagtttgtttggcttaggggtcagcatactgtggcccattagccaaatgctcctccctgtttttctcaataaagtttgattggaacatagccacatgcatttacatattgtccatggctacttatggcataatagtagttgagacagagaccttatggcctgcagagcctaaattaatatttactgtctactcttttacagaaaaaggttgtaaaccccggtctagtttaaaatgttgtttttgttttttgttttgttttgttttgtgtgtgacggaatctcgctctgttgcccaggctggagtgtggtggcacaatctcagctcactgcaacctccgcctcctgggttcaagcgattgtcctgcctctgcctccttagcagctgggattataggcacccaccaccatgcccagctaatttttgaatttttgtagagacagggtttccccatgttggccaggctggtcttgactcctgacctcaggtaatctgcccacctcggcctcccaaagtgctggaattacaggcatgagccaccacgcccagcctagtttaaaatttttatctatagtgaggagcttttcccattacttctatttcagagattaacatgttccccttttgcgagtatttttaaactgaagtatctatgatttctgtatcaatgattattactagaattagaaattacataatatactaaaatggatttgtttgtttcctcagctctttgagtgaccatccagtaacgcaaaactaaattttttcttaaaatgtgtgtaaatttgacatggcgcttattccacagtgtatctgtgttgggtttagtatcttaaaaattatttataagttaaaatactttctcctgttcctgaaatattacattacaatggacagtttagaaagacaggctgtgtttttgcagctcacagtaccctgcaataacactgtagattgtcactggtacatgtttaccagtttaagtgaaccagacttcacatatgcatgttcccagctaatttgtactgtttgtatttctgacttgttctgtgtttgtgtctcttcttgtgcttacttggagaactctttattaggaacttcctaatatcaataagtagagctttggaaattttaataactccctaatattcaagagcactatagccccatgaagtctgtttctgctttaatatttgaatcaaatcacaagaaactcttcagctcaaagtttttagttttttaaaagatgtatttactataatggggcaccaggcctctgatcattatatgaactatattccatattgtttgttgctttgactaacagaatttcagaatctaattaataagcctttttatcagctcggcctacatcttattatctctttcatttcagctctatctgtacagctctatactgtaataatagtatgaattaaatgaaaaggaaaatgtaagcagtcatttccagttgctgcttgtagtttctttattccctccggacttcttatatgaattcagaaagttcctaaaaatgtttttttaggaacgaagattttcatttcatttctgattttgtataaatacaaataactttaaatattgcctttgatttttcttctctcacaattttccaaatccaggatggtaccttgtttgatggtcgaccaatagagtctctgtccctgatagatgccgtaatgcctgatgtagtacaaacaagacaacaagcttatagagataagcttgcacagcaacaggcagcagctgctgcagctgccgcagctgcagccagccaacaaggatctgcaaaaaatggagaaaacacagcaaatggggaggagaatggagcacatactatagcaagtgagctcagacaagaatttttttttaattacatggtttatttatttatttttttaaacttttaattcggggtacatgtgcaggtttgttatatagatgaactcatatcacaggggtttgttgtacagactatttcatcacccaggtactaagcctagtgcccaatagttattttttctgatcctcctcttcctcccaccctccaccccccaggaaggtcccaggagacaagaatttttaaaaattttttctcagaagaaatgccccatcttctatgctgaaataatttcatctgttaacttgcaccaacttgtttccctaacttgtatcacacagttcaattcagatttttattcctaaagctccaaaaagctagatttacttttattttctttttaaaatatctagaaacccttttcccattgttaaatgaatttttacatctacatttgatttctaaataaaatttgtaatactagttatcaacaaataaccatagagctctgacatcgagataaaaggcaactcatgttatatgaatgatatcagcaacccctactggcagaaactcagaatagtactgatagacattatatttaattcaaaccattttatcgttttatccatgtttaggtctaatcatttaaagtctcccatcccactcccacccccacccctctaaaaaaaaagtatgtggtcaatacttaattaaagataagaatttattttctgtgtgactaagactgtgtagtcatgttcagcttaactggatataattgaaaaatgttacactgtgtgcgataaaggaaggtatttgctagttaagaaatcacccatccaccatgttgtaatactgcctaactggaaatgcttacttgtgtttcacgatgcagataatcatactgatatgatggaagtggatggggatgttgaaatccctcctaataaagctgttgtgttgcggggccatgaatctgaagtttttatctgtgcctggaaccctgttagtgatctcctagcatcagggtatgtttctcaaagtgatactaaaatgacttaaaaatatcttattgaacattttataaacatatgcattattcaggttttctgttgttgcttagttgtggccattttgtctctgtaaattttttattccttcatgaagtaattgtagaatttttaattaaacttactatttcgagaatgcttgggggtcccaacgtgtagaatgggaaaaatactggaaatgaaaattcgtgatagtcgtttttatttgccttattaatattcagatgtaaatatgttgccttgttctgatacgtgagaatgtcatgaggatctaaaatatattgcatacttttataggtctggagactcaacagcaagaatatggaatcttagtgagaacagcaccagtggctctacacagttagtacttagacattgtatacgagaaggagggcaagatgttccaagcaacaaggatgtcacatctctagattggaatgtgagtatcactatatccatgatggatataattactagtatacctaaccctcagagcctcatactcacggcagggtttgtctatttgttcagaatttggggttttattaactagtaacaacaaaccgggagtcgtcccctgccagccctctcccccactgtgggacacagacttgccttagtcagaccaaggttcaacatccagctcttcagtgtatcccacagcatatccttggttaaattgttactttttactctgtacttcattttctttaaatgtcaagtagaagtgtgaaaatggtacctaaatatttgagataataggtgaaaattcttaccataataacaaacaacatactaaatctataacaaccgagtccttaggggataaaagaattctgtgtagcaaaaaacatgttcttgtttttctctgtattctgtgaactggtagaactttattaccaatttccttttagggatcattagtctagacaacgtctgaattttattcccactgtaggaatcttgtaattctctgattctgtgtatgattcaacatctttcaggacaacttgactactgtgacttacaaaaaactttgacttcgttgttgataaattctcaccattatagttttaaatacatctcttacctcgctccgctaccccctgcccctcccccaaaactcttagattatttcagcattgcaaagaatatcaagatagttgttctttgctcagcaaatgaatgttcttttctcttctgtttaacaaccctttgtggactttctaaaggatcttccaattcttttccccgggaatgagatctatctttaaaatgattatccccactaaagttctcagtttctgtgaaatgttttttcagaaatcatagctaggtatttttagcattttcttccaaaattgccagcagcatatttactcttcccctccatatgacaattctaaaaattccaaaggg

SEQ ID NO: 9960 - DNA, 6000 bp, Homo sapiens
ctgaggtctgatattttttcatgaagtatctaagttttattcctttacatttatttttttagcccctttggaactgatttttatatatggtgtgaggtatagatatttccatttgggtagtcagttgtcttagcaccattcattgtcccctttctgttttcataatgccggtttcatatacctagttcatgtatatgcagtttgtttattaccttctcttttattccatttacgtatttgccttatctgaatcaatagcatagttttaataattctaactttataaatccctcttgttgttattcttcaaaactgtttttctgttcttgccactttagtcatccatatttccaaaacagagcacacaattttggattttgtttatgagtgccttgaatttataggtgaaattagggaaaatcgttattgagttttatcacccataaatacgttatacctccatttatttgtcttttattcctttggtaaagttttatagtttctctaaggatcttttttcctaatgtgttttgaggtgccttatggtttttatgttactatgaatgacctcttttaaaaaatacattccttttatatactagttgttgctcacatttagaacattttcagtgaactcatttagtccattgtgacaaaatcaattttaatgaaatttgggcatagaactgtagagtgctaatggaagatactacaagacattgaagggcatttgaccaactgttcatattattttgttttcactattgtgtaccaaaagtcttactttttcaaactttgaaaatagtaaaacagtgaattttcagtgcaggagaaaatcattatcctattgttgtatatacatccaggttttttgttttcccctttcttgtatgatgagttgcctaagcatttgatgagtaaattgtagaagtcttgtgccagcatacatacaaatttgaggtagatgccgatgatctgagccattggcctttttaaatgtcttagctctgccttgttgcccataatgttttggttcgttatagcccagttcaagcttagagattggtaagtgctttttaaaagaaagttgttttgtttttttaacccccaagttggctgtagattgaatgtctgtaggttgactgtagattttattttttatatctcagcaaactagattttgttggttctacttttttctctcctcattaactatagatactcaaagcctactatacttgaacttaatctcataaattatgagaaattttaagtaaacaaaacagttgagccttcccagcctgataatcagtagcaatgtgtcagtaccaatgcatctgtgatttgtgccacattactgggctaaatttgaagaggaaagctcggtcaaacattcttccagcttgtcatcttggataggctgaatgggaggtattttcaaggtgcatggtttgttgccatgtgcttttaagtagatctgccacctctagcttgactttaggttaccataaagctgcagaggtcacttttctgatttgtcagggccgaacacctgaagcatatatttcagttttcataacaggacctctgatctttgtcctgttatattgactggtttcataggagaatatatttttggattgagttttaattcttcagtagcagctgaataataaaataacgttgttacatttatgattcagcttaatgaatgattacattattagtattcctgcctgtgttttttgtttaaacatataacgtctttcaagaatagtgtacatatctgtctgggcactgtggtgcatgcttataatcccaacattttgggaggccagggtgggtggattgcttgaggccaggagttcaagaccagcctgggcaacacggtgagaccttgtctctacaaataattttttaaaaatcagctgggcatggtggcatgcacttgtaatcctagctacttaggaggtggaggcgggaggatcactctagcccaggagttagaaggtgcagtgagctatgattgcacagctgcatccatcctgggtaacaacaagaccctgtctaaagaaaaaaaaggaacatacatacattattttagcttcttttataatcccctagcttaggaactggtcagtaaatatagagtgaataacagatttatactggaattatctttactagtttgttatacttcctctttaagatgttttgtcaaagaaattctgaatttattttgtttctctacatgttagctagactcatgtatcatttagcaacaacaaaaacttatttcatgtgatagactgactgtttacttctagctattgttggctatgtcagagagaccagataccttagccaagaatggttatcaagactggagaaactgaatatgtgtgtgagtaatcttttgagaacaggctggtattatctttttgtaaagggatcatattacatttctagaatttcagaacttatttttatagttgaagctaagtccctcctctgattgctagaaataaagctatgtaatatttttatttcagcatttggatttattataatatgtattacgatttttaagattttgtttttcattcttttagacaggtgctctagttcacagctataggggaacaggtggaatatttgaagtttgctggaatgcagcaggagacaaagttggagccagtgcatcagatggttcagtaagtatagtaaagtgtttccaaagagggtgtgggtgggtattcacatcagaatgcagcttattgttagtgataccaaagtgtttttttcaaaataaattttaaggtatgatactgatttttttttttcctgaggctgtaaacttttcatgtgcgttggattcaaataatgtaaacaaaatttaggctgtccttaccaaataccttataatctagaaatggacagttatttttaatatgaaccttcatttatgaaattaggtataccagaggaacattctgagaaggattgaaatgtttaatgtgtatttctaccttctcctcttcacagaagaatttttttggcccagggaaggcagaactagaggcagttggttcctgtgttgaggaatgtgtgatactgaaagattttcaggatgaggttagccaactctttacaacaatgcaaatatggcttccaaagctgtagaagcaccagaaggtgggaaaagggtagctatttactgatgctgtagctgaatataatctgtgatatctttcattagggtccaatagataggaaatggtctgttttgagcattttccccctcctttttaatcaacagagagtataaaaatcctagccgtggttcttcccccacagtttgagctcatggttgttctcttgatctgcttaaatgatctgtctgatttctgtcagttaagtgctcatttccatgattattatgctttaccaattttataaacttggaactaagaaacatttcaaattgtactatagaaaagttaaacataaaatgtacaataaaattctgaatacactggttgattattttaatttcttacaggtttgtgtattagaccttcggaaatagcgctactagttggaagccatggaccgactatgaatgtgtacatagccaaaatgactgtccctgacccatgtactgctatagtcccacttgaaccatggccagtccactacagccaaatctaaaagaaatatatacatacagtgtatataaacaaaattgcaccctgaagatgacagagttttgtcacagcttgtgaattctgttcaccaagtgctggaatctaatctgctgtgcccctaaaatagcatttagaagttttggatatgaaaaacagaagagagaaaaatatacattataaaagcagaacatacatgtaccagtttttggatactaaatgacagccttgtttctcccctttgaatcagcagacaccatggattatattctttttttcccttcagtagtgagcagtttgtatgtacagagaaaatggacttacaaaaacttgcagcagtagtttgttcttgctttaaaatttcgtttttggtttagattatggatgcatgaagtaagggagtgaatcagtttcttgtttatatttttttcaccttttaaacaaaaaattctttaaaatattttaatgcattcttttgaagaggtagatgtttggtacattttatggctcccagagcatatattcagttggtgcatgttgtggaagggggaattggaaattaaatgaaaacctatgactttggtcatgtcaatctgtaagacacatcagtaaaagggtattatgctctgttggttttgtttttttgttttgctttttttttttttttttcttttttgttttttggtgatgtggcttaaatgcaatagtttcttttttgggacatatttctgccaattaaagactagaagggcacaactttttttttaattaccatagagaagatacattaaaaaaaatcttctgatgttttgtagccataactaaattatggtaaaaatgtgcactattgtgaaaaggagcaacgtagttttgggttttttgttgtttgtttgttttgctttgttttttaagagattaaaatgtttctggataaggattagcttctcgaagtgtccatcattctgtgtagaagcttaaatatgtaatgtaaccaaactccagtattaaaaatctctcatgttgttttctttatacaaagcaagataacggcatataacactgccattacatggcaaaatgtttgctaccttagtttaaaaaacaatctcaaacaaaagacttgcttcaaggtgtttttaaatagcagtgattcagaattttttttaatgaaagtataattgcactaaccttcttcctgctgctctgattctgcatttgtggtacttgtgactacgttttttcaaatatagatagatttaagctgctaatttttttttttttagtaatcactactatatcatgtcttttactctgtttataatatcaagtattttcttaaagatatagatattaaaccttgtgctcatgcaacttagagtaacatatacagacaaatgattgcatgaggccatgtttatatgtgtgactaataaggcttgtcatgattaacataatccaggtatgtcatttctgaagagaatagtcatcaaatttatatctcgaagattttaattaaggaattgcttattgttgagcttagcaaattaataacactatttctgtcactaattattttgaggccttttagtactaaaattttaacctgtgttctaagtagaaactgatttaacccaagtaatgcagctttgattgatttcagcattcgttgctttgctatttttacaaaacagcattgattgaagcaagtcttggttttactaaggtagggtagcatttgctattggtaaagagaataaatacacttaatttcacaatacattgttatatgtaccccagttgttgttagtggggactatgatactgtaataatatttttaaaaatttacatcaagagaggcagtcattcacgatggttttgtgccagctctttttagggttttggatcacattagagatatttagaacatattaccctgtgacttacgtaggaaacctaatatgctgagtatctggcacttgaattcctgcttttattgctggaggtccacatctgtggttgacctctgttattgtttaaaaaaaataaataaaaattaaaaaaatctgtgcaataattttaaaatgtgctcccaggaatagacacaaatgttttgagtatcttttaagctgcattttcctttagtgatgcatttgtcaattgcactgaatttaaatctgaaagtcagaggtgattattgatagtacttttgtattttgatatggacagtttattcatttgcatacagttattgactttttcccagctgattaaaagatagtcaagaaattctgcaat

SEQ ID NO: 9961 - DNA, 6000 bp, Homo sapiens
ggcagtccccttctcagggcaaccagacattatggtggcatttatctggtccactagactaactgttctctcaggaatgacctcttctgcatttggatcatatatactcattagtgattgttcaatagtgagctgtggggtgctgcatcaacccaaacaagctcttaatttctgtagcatttaaaattaaggattttgtccttaaagtggttatttttacaatccgctatacatttttttaagaagctgatgatacaaatctacaaaatgaaacaatttctttatattataccctctggttttaaatagttttgcccttcccccacattgactatctttttgatagccacaggtctgagttaacttttgttgctctggcttaattgttctatttagttttatctgtatatatttttttcttcattctaaagcaactcttaagtagttttttaactagcgaagaaaaacctactttccttttctggcaaaatcaacatccttgtgttttataaacttcaccaaaaacatattttatgctcctattttaacttttagtaattcaaaatttccagtgataaaaactgaggttttaacatgactttaagattttaaattactagagagttttgagattaaatttgccaaattacttttaccaaagattaccaagatcatgtgaattaaaagtcatctgagctagcatctaccaatctgataagcacttacatttttaaagttactaggttagagctctttcatgtagtttggtagtgaaatatcacttccacatgacacagataaagatataacaggcatgcagaattaaaaggtctacaagatctaattttattggcctgttttcaaaaaaaaattatctcccttcagataattttgttaattatcctataactattattaagttacaggaaccaacaaaaggtgaaggagagatctattatctaaggccatttcaaaagagaaagagctgagcttgtgagatatcaatctgcagaatgtcaaagagacagattatagagtttataaatttaaaacttattacattaaaaataagtcaatatttgtaataaaatactgttttagccaattatttagttttgtattagtgtattttttaaatatcaaagacccatctctagaaagactactataatttcttcttaatcatagccaactgcattatacaatctttttttttttaaacaaattccttttactaaccttattacaacttacatagaccattcacaacatgcttaaattttctgttctgtcctaaatatctttcttgaacaacctagtcattttattttaggacaaaaattcgctacacaagattctttcttatatagtatcactttcctttttaccttctttaccaaaaattacctctttatgtcttatgtttctctacatctcttatttcctagttccttttaccttgttttatacataacctttaaataagctttgaattagaaaaagatatttaccatttaaaaaaaagtttttctataatttttaaattggaaattacccagatacttaatacttattaataacctgaggtcctaaattatatgacgtttgtttacaaacacttattccattacctttacctgattaatttatttgtttacctggattattaacaaaaactgtgacagtcattattgaagttatttccctgttaaccatttttatagctgtgaatttcaggtgtttacttcaataatgaacttatgattaaatataagagtattttttccagtaactcatgatttagctgttttcattaaaccaaccatattccatgtcttatttatcaaaaattatacaagcaaagatcattctgtcttgggctgggttttatagttttataaccctatggctaatcttatagtattctgaaggaataagcatgaagctacttgatcaataaatgcaaacaaaaatactaacaattcttagaacattttaattttttttaccaatgattttaaagacagtttatttattaaatattttacttgtcacgtgaacttgaaaagcattgattagtattttttgatcaagtatttaagtgcttttatttttacttaagctaattagagctcttttacatatttttagtagtgacacattgtgtacacaacacataaatgcatagcgtattaggcatggcaatagaagtacatcttatgtatttgtaagacctctttttcccttagacttttaaattcatgatagcctgtttcatcaccctgggcagttgtcagctaaatagtcctacatttgcatattaaaggaaacaactcttaggtgaaaaatcagatagcaaaatttacatctcaaagtaccaagagacagtctggtttgctagagggaaattaaaatggatttaatttgccatttaaacaaaattatagaagtctattataaaatccttttaaatacacacacacacacacacacacacacacacacacacacacagatcctatagcttttacttcagaactttagccatgagataaatacaaattccccagcttgcaaaaaaaaaaaaaaaaaaaaaaaaaaaaacaagaaaacaaagaaaaagaaaaataggttagatccaaacagtggtttttaatttcagtacaaaagtaaaagcagatttaaagcaggcagaaaatatagagaagaagagaacttaggaactctatagtgtacaggttgaccttagggctcttttccttaatgtaaatgtgcacaaggatcattatatttccattttacataagctctggcaagtagacgcaccataaaaccaacagagtgcccgaaatgaggtcattctccttgttttctcctcattcttagatcatttgtttcccacctttttttttcttagaagtaggaactgagctgtggcctagggtttttgtgtggtggatcaatgtgtgctgcttgtgggcaggaccccaccatgtgtcaccactgagttgtttccaccctgttacatgtctcagtttctctctccagaggtctattacctttgagagggctcaaaatgatgggtgatcagtccttatatgcattcctggacaagccatttttaaaattaatttttgttggggatttccccatagggctgctgcatgtcacaggatgtcaacccccccccagacactcccacaaggcccccagtcacccaggagcacgttttggctgggaggagcaaatgcctttctctttggagttgagaaaactcagtctctcatttacctatgaaaacaacagttcaattcctcacacaaatgcgcagacaagccgaatcaagattaattttgggagaaaaagcaataaagaaaaccctttagaatgtgtctctgaactagaattagaatccttaaacaacaacttcctaggagaaaaaccagctcacactaaacgaaggactgtcaaccaaagggcgatctggggctcaggagaacttaaccagttccatcgggggagaagctagaagtctgggaggcttcaatgggccccactggtatcttcgctccgagttcaggcaactcctttggggtcctgagtcttctctgaggccccacgctgggtgccaaattattgtggaagagtcaaactctgtaaaatatttgaagagatttattgtgagccaaatatgagtgaccacagccagtgacacagccttcaggaggtcttgagaacatgtgcccaaggaggtcggggtgcagcttggtttaatacattctgaggaggcatgagacttcaagttaagttcatttaagaaataaatttgtttgatccagaaaggcaggaaaactcaaagagggggagggtggttctagggtataggtcaacttaaacattttctggttgacaattggttgagtttgtccaaagacctgggattaaagaaaggaatgtctgggttaagaggttgtggagaccaatgtgttttatcacgcagatgaagtattcggatagggtagcaggcttcagagagaagaggctgtaaaatgtttcttatcagacttaaagtctgtgttgatgttaatgcaggagagggataatgaggcatgttcggcctccacttccccttatggcctgaaccagtttttcaggttaaattctaaaagtcctggctgaggaagaagtccattcggatgatttggtggttgggaacggggaggtgccttatcatttattttttggtttaaaatataatgatatattttaccaagtcttgtgaaccatcaggcctccctcaggcccggactgggaattgccaatttcgttaggtgtgaccgtaatactatgagaatgtttaaaaaaataggccttactgattaaacatactcgagtatttaaaggagaatttatccactgggatgctttaaaattactctgggaaaaaagggaaaacgaaaggcatgtgtggggtgaagcacagacttgtcgttgttgtttttaaagcaaaaggcgggtcccaagggaagttggctgtcggtgggttcccgttctccgtacctttctaccttgacagctccataataaaacctgcagccgcataggcgcctctcccgtagcgctcccgcgggggcgccagtggggccccagctgcgaggagggcccgggctcgcgagactcggtcccccacttccgtccccgcgatccccggctcccagccccccgggcccccggcggggctctgcgctgccggagcttgggcgtctgctgctgtcccggagcgccaagtcgtccgaggtccggccgcccggccggggcggggccagggaggcccggccttcccgcttcctgcctgagccgcaggcccgcccctgcgtcctccgcccgcctctttcccgccgccgcctgggaggggacccggtaagcgcggccctgttccgggcggggttggggcggaaggtggggtcagctggggcccaaggggggtcggggaggcgcgcgggagagggcgcccgggagtgggtgcgcgggaggcgagtgagccgggcgccgggccctgggggctcggcgggagggggagtcaggtggggaccgggatttgggggactcggtgggggaaaggcgcgcgggagatgaggtaaacacgaggggtcggaggggcggcctggggcggggtggggccatgcctggggtaggccacgcctcggggaggccgggagagaacccaggcgctgggggtcgcgggggagccggccggtcctacccttaggtgtctgaggccgctccccacaccgctgcggtgtgcattcagcggccctgtctcctccttcctggcctgctcagggcacggctcctggttggatgtcacacgcgtgactcctgcagcgcccgcgcgcagggacccctcgctgcctcagccagacctcccgccagcctctaccacaggctcagcccactgtcctgggtgggctcggtgcaaacctctggtgaagaaaacctcctgggggtgcccagccgggagtctgtctcagagtcccacactctctccatccaggagagccggtgggataggtctctttaaaatcccgttatttatttgtttattttttcctctttcttccagttttttccatatgactttagtgatcaaatcccacttttttttagaaggctttttttacaccagtggttttcaaactgtggtcccaggaccagcagcactgcctttcctgagatctgctagaaatgcgggttccccagccccaccctgaccttctaaatcctaaaccttgggggtgggtccccatacttgtctttagcaggtcctcctcgtggttctgaccattgatctgaaaccttagggctttgaggagtctgaactggggttgaggatgggccaggtgccctgtgatgataatgcatgactccatttaatcttcacagccctacacagtaggtagtattaccccatttcacagattaggcaacagaggtacagaa

SEQ ID NO: 9962 - DNA, 6000 bp, Homo sapiens
atacataaaaaagcatttttgttatatagtctgttagttatgtactaaatgtttgtgttcccccaaaatttatgttgaaatcttaagccccaatgtgatggcgttaagggtgaggtttgagggaagtaattagatcatgatggtgaagccctcatgagtgggatcagtgcccgtataacagaaatgagagcttgctccctggctactatccaatatacaaggatacagtaagtagatagccatctccaaaccaggaagtgagttctcaccagataccagatcggccttaataatggacttcacgtcctccctaactgtgagaaataaatgtttgtttaagccactcagtttgtggtaattaattatcacatcccaaattaagataatattgaaatggttaataattctgcattttacttccttagttcagcaagttaaattgaaaccttctaatcagttagatctaccatatcttgctaattcaattaccaatcagcatgtagagctattaccaactccctgaaggacttctttgcccatttgataaattatgtatcttctatctgggaagaactgtaagtatagacactaaacatgtaaacttggcaaacgagtagtgacaatttcaagtaataaatttaagccaatagactaagaattataattaaggataattgtttaacgaagtgtgtcacaactacttttaaatacatagggggttttgccctgaaatgtatgtctgatttattccctaaactttcaccccagaatgagcttgatatcaaatcaagaatttatataaatagaaggaactcagtaaactagaagcaataacgactcaatccacaatttttttttttttttttgtggtggagctagctgaggttttattttggaccaaaaaaaaaaccacaattgttttctagctggaagcatgggcaaggggggtccccagacagtaaactcccccacgggtgggttgagcctcaggtggggggtctcctgttgtctgtgcttccccacacagcagcctccctcctggagtctgtggcagccacgggaggggcagactaggaggagctgccacagttgttcacttgggcaggaagtcagaggactcagacaccagcttcccatcgcgggtctcgatcttcttcacaaccacggccctggtggagctggtgcacctgaaggagctgaagcctgtgccagagccaaagctggagcccaggccatagctgaggtcacgagttgtgaggcccacataggccgagctcagatcacctgcatagccgctggtggtcttcgtatggatactcatgttctgcatcccagactccagctggctctcctagctctcccgcagctttctgtaggtggcgacctccatttccaggccagcttgactttcatcagctcctggtactcacacgttgcagagtggcctccagcttggagagcttggcattggcatccttaacggccagctccccacgatgctcagcatctgggatggtggcctccagggaagccccctggccttggaggccctcaatctcagcctggagctggctgatgttccggttcatcttggagatctgagtctttgtatgccgcaggtcatccctgtgcttcctagccagcgtctgcagctccacatacttgatctggtacgtgctctcagcctcagcccggctgcagttggcaacctccttgtactgcctctttacctcagtgatgatgctgtccatgtccaggagtggctgctgtccatggacagcaccacagacatgttggagatctgggactgcagctcccggatctccacttcatacagtcggcccttccaggtgagactccagctctacgttgttcatgtaagtttcatccacatccttcttgatgaggacaaattaattctccatctctgtaggcttattgatctcatcctcatacttgttcctgaagtcctccaccagcccctgcatgttgccaagctccgcttccagcctcagcttctcctggctccagcagccgcctaaggttgttgatatagctcccgaacatgttgtccatgttgctcccagccatcttgtgctgctgcagaaggctccacttggtctccagcaccttgttctgctgctccaggaaccatacctggtctgtgaaggaggcaaacttgttgttgagggtcttgatctgctccttctcctgggtgtatacagcctggatgttggagtccacctccaggttaagggggctcagcaggctctggtttaccgtgatggtggtgatgcctcgcatactgctggccccaccatagcctccgcccaggccaccccagaagctgcacagtgaagctccccactagggagaagctcaaggagctggtgcaggcactgggcccactagtgtaggggtggctgctgaaagcctgggggccaaaggtggacaccttgtaggacttctggatcaccctgatggacatggtggaggcaggagtggaggcagcaggctaaaccaggtggagattccagaaggagcagagaagctgcttcttgatctcaatccacatttttatcaagaggggttagcttgcttttcaatttaagtggaggcctgtggcatttctgtaatacttaaaggcattttttctggttttcctgacttctgctttaggggcatatgttcttgcatttgacaaatagtccctgagtacttatgtgccaagtactattaggtgctgagtatacagtagtgaacaaaacaactatggttcttgacttcagagagcttactgtctagggaggaagacagattttagataaataaaattataaattgcggttatttcctatttgtattgcatctttctcagctggtaactaattacaactcttttttaggagtcttctgcagagagaaaactcgggttgttgtttaatcatcagagacactcagttgtagctggagacatgaagacatataacagacacgtctataaacttcatcatgaaagctaccatgaaatgtattccaagaagtacaaaatgttcatctattgatatgttgacaagataacttttactcatagggtgggaattcgctggtaatttgttttcttgaacactgcttatgataaaatccatgatggcgcaaaatacatacatactccagcttttcaagtgaattttcttatcctaaactcattttgaaaaacaccagtgctctggtatgcaaatacaatgttacttcagttaaatgagtctttgaagaataacagtttataatgaacatcatcatttgtatttaagatctgttctaaatttatattcaagttaaccttcagtgtgagttatttccaggcacagcttctgttgtccatagcccagttgatggtatataaagtactgacgactttaaaggtactactctgcttcctaagtttttaccttcctttcccccactacaatatcctctccaaagtgatccctaaagtactccggctcttttcattgcctctcccccaaaggaaactcagttgttcatatctgttaaacccactaacttcttccattttaacttaaaaaaaaattcccctctgttgcctttaaaagtgtttccttaggaagatctgcattttaaacacttatctgcacgttgttctactaaaaaaatatactagaaaggaccgagagtcaacgattctgaaggagtttgtatcagggtctcttctccctacctcgtcaagtttaaacacacccaacgcctcgattccttgcttccgacccgagttgctgctttacatatccctgtacatttgaggtgttattcgttgatatttcaatatattttaaaataattttccatttctgttttgttaaatttttgaatacgttcttttgtatctcgtgtcatttctgcctctggtaacgttgtccttggtatccttggaactcatttcctttctcaacacacaatattccctgtcagctgccacgggccccgccctccagaagttcatactttgtggtcaagcagcttctttaactttttaagacgaattacctaggaagtgctattgtcccaggatcaccagctctgcctaaattcctaactgttgcgggtgcttagtcacagaagatgaatcagattcgtctaatgggccctttccttttccacccacctttcctgtcgctttccgctgagcctcctcaactcacgtcatcccagcaggtcctggcccccagacccggccctggacggcacggagccccagcccgggaacgcagctgcgagcgtccgaccgggagacagcgaagctcagatctctctgcaaagcgaacggagagcgcaaggaatgcccaggaagacagggcgcgcccggggagaaaagaacgttactttaacgcagcctcgaccctgaacccccggcatctagggcttcctggacgagtggagcaaaacaactcgccctgctgcgttcccgggcctctccttccccttgctggtttccccttaagtctacttctctattgcttccaacccctctctccgaaggcacgtggtccttccccgcctgcccccgccgcacccctccgggcccggagccggctcctcccagcgtcgttcgcttcccctttccgttcgctctttccgccccggctctccatcgccccttctgattggtcgaacgcaccggagcctggttagccaatgggcgagccgggctggaggcgatgggcgtggccgcagcgccggggccctcagatcgaggctgcctccccctctcagccggcagcacattccgtcgccttgccgccgcccggccccacagttgtctttgccggagctgcagtcgcgctggggttagggcgggggggcgggcggggagaggagaaggccgcggcggaggcaggtgagaggaggaaggaagcggcggcgcggcgggcacagcagctcaggcggcggcccggttcctgggagtgtcggtgcggcgcgttggttggggcggatcccgcggggcccgggcgggggaaggagtcaccggcccggccatggcggacaacgagaaactggacaaccaacggctcaagaatttcaagaacaaaggccgcgacttggaggtaaactcggggacgacgccggaggggtgggggctgtgggcctggggccggtctccgccgggaccccgagtgtggggattaggggcgggagccgcctccaggcctcggggaatggcgctaggggccggcccgtctgtgacgcctctgctagcgcgccgggaagtttatgtcgggcctgctccgcctccgccggggagcgaggtgcccgggtacggccggcgcggcctaggcctgcccggcggagccggcccggcgcgggtgcgaggggccgggccgcgcggcggggaggccgggcgcggcgcgtgcggaggaggcgtgcgtgtgcggccggtgctgccccggccgggccgcggccccttccccggcagtggcggagattccggctctcgctcgggcaccgacgtctggcgccgcgggaaggagggcggtgggaatgggagggtgagcgtgtggcgaccgagtggggctctgaacttcctcagcgaggcccgaggcgtctccacttaaaggcattttttctggtcttcccgactcccgctttacccctgcctccccccaatatccaaactacaggacaacttctccgttgaaaaaaacacccccggcgtgagaggccatcctggtgatcctaacagtgccttccagcggcctgtgttttactctggatatagctgattcaagatgtggctcacggtgtgccctcttccaggcaaaggataccccttatttcagcttgtccacaaatctctttaccccctcctgagaggagaccaccagctgcattcttacatataaagtctaaagggttatacaaagctgtcatcctctagtctacagtatcctttccctccacctgctggtggtggtagtgggg

SEQ ID NO: 9963 - DNA, 6000 bp, Homo sapiens
accacagactaacatattgaatacaacagtccaagtattggcttttattttgtatttacacagaataacctatagaatatagcagtctaagccttggccttcatgttgtggccccttgaaaaggggtgggtttttggccctagtaagcaagatattttacagatcttttgggaaggagcacccagacttggagacagatctgtgaaatgtaagttttagctctggctcacctaccaactaaatagttctaatacaaagctatttctgtattgttcatggctgtatcccaagtgtctagaatatgttgaataaataatcaacacttccacattccacttgttagaacaagaaaactaaccgaggttagtcaaaccctctgagtcctaacttttctcatctttaaaataagagctagtatctcccaaaatatggaaaatacagcatcaaaggcacttgctattcaaagatccttgctactcaaagagtagtccaagaatcaggagcatcagtgtcactgggattgtgctggaaatgcgagctcttgagtcccaccccagtcctactgaatctaattatgcatttttaacaaggttccctagatgatttctatgcacgttagagttagagaaatattgatttagatggtactaggactcaacattaaatggcctgtaatcacctagtgggaaggttatcccttttccacttatcattcaatctttttggttactttatggagaaagacagtttgatgtcaatgtctttaacacctcactaacagctgctaatttcctttttaacaaggagaaagcaagccttcggttcctgggaaggcaaaggtatttatcttgactataatagcattgttttattctcattgtgtttgtttaaatagttgccttgtatttatggcaactgatatcagttttctatttaaggtagtgatgaaaacctctttaaaataaattaatttaggaaagtgaatgtaattaaaggaaggaaacacataataaatgggaagaactgtttgctttaacgattccttccatgtcaaggaactccattggtttgacagtcctgacctctgtcttgactccatagtttcactgattaggcaactttatttactctgcatggggtaggagtggggaaagtgctatattctattgtaaatttaggaataaaatgagcatgcttaggtcagcatcctccttcttccttttgaaatttaaatacctagaggataatttactcatagataatttgcttataaatttccagtccaattggtaggatcctagcagcaggttgtttgtttaatagatctttatggtgtgcctatggtaatgctaggttctggttgtgtgtcttattttctgtcttcctgctgctcaaaggtactgctccctttggaaagttccagacgagcctctagccaggctatcacagtgtctttggtttctcaggttttgaatctgctcagaggcaagagtcaggggcactgatgagcttggggtccttctagaagaaagcatcaggtactcattttcatgaatcatgagacaaaaatggagaattgtttttaaggcatctggccaattccctcatggcttaaccaccatccattcaagcaggtcagtcatgagggattttagtcgttacccttttaatgaccctattttggcaaaaggccctagataagagtgctctgctgcttccctggagagtaatcgcttttgtctctgagccccacatttgcttatgttagttctctatcacttaagtggtgcccctttactcttcattatattgttctgttgtatttccatcatgatacttatctccactgctttgtttacttgtttgtggtctgaccccctgctctagactgtaagctcaaggagagcagaaccatttctgtattgttcatggctgtatcctaagtgtctagaatatgttgaatacatgaatcaacacttccacatttcaactgtaggaacaagaaaacaaggatgtgtactttaaagatctagttagtagtcactttgtaagatcattgttgaactctggaacttcaccaattgttgcggctgtgcatggctctaaataattaaatttttgtctgctgcatttatatttctttgttcattaatgctctacttacagctggaaagtgtttgcagtggcttatgataaagtcaacaatcatcatgcaaaagacaagagcttataagtaagggaggacccaagggaaacctttacaagaaatcattgctaaggtataactttctactgcaatctatgcaagatcggttctctaagtttccttttctgctcttcactgggtaaagttgccttggacatttaaaactgctttgaaaaaatatatattcagagtccttgagcaatttctggtgaaactgttcaaaattttctgaaatttatgcttgtccaggtaactgctcataaaggcatcatggccaaattaaatgatttcatgcttatttttccctttctcatgtttcttgatgtcagtggagaggtaggcaggagtcagaagcagcattttacctagcccagacaattttttcagtggtatatatagaagcatggttgacactttctggtcttttagtctccctaaatacaaagaggtccagattagcaatttccaaagaatattaaggggaagtacaccaggagataggattggaatctgcttaaggttggagggttccaggagttcctggtttgtgtgaggatttcattgagtttattggcagtggactagaaacacatatcatcattcaagctgctgatgaatgtctagagtttgttcctagaatccaaattttttttctttgaaatcgaagccattttgaattaccaacccaagtcaattttacctagcaaaggcagaaaagtctaaaccctgctgtcttgaaatataggcacaaacttttctcagatagtaaatattcataactattgtgattgtggctggtgttccagaaataaaaggccagggaaatatggagatttaaatcagaaatttatccagaaaaaggtgaaacaaagaatgcagttctccaataatcacatcccctgagctacaggcatacatgcagacttagagcaacacaccaacattttagtagctgcatattccatgacaaatcccatcttcccatcttatcaccctcataattcatttggactagaatagactcagggttttcttcagcccatagtattcatactctttaccttttacagtgacttctcatgtgctatcccatctaaacatcacaaccatcttatatagaaggcaggtagacattcctttcccattctgaagatgagagtctgacaatttaagtgatttgtgaaaaatcatatgataagtagctggcagaacctgcactgagattccaaatttctgattttttaactttgcacttttcctacaatgtctcacagcttcttggtgatcccaggaggtctaacatatcctgcagaactactcaaagcttaaaatatggggatattgtcaggcttagatgctcatcgaaggcagtaacaagcttgaggtaggtggactaaccaagactgtcctggcaatgatcaagcaactttctgggaagagcccagggcagacccacaaagtagagctagatttgaactgctccaccctagaggagtatcagtcagccagtattctccccaaacacaagcccagtgaattcatttccaaggataggagagttacattttgttgcctcccatgtgttttgagggcttgggccaaagtgcaagaatttatgtagataactttcatccaaatcagtctactcaatgcttgttaaataattcattcggtgatgtggccaagcatgcctgggttggtcccatctagtcccaatccttttgggacataacctggctctaggacactcatcttaaaggagctaatacaaaacagaaaccttatctcactcttgtctccgtttagactggtacttgtctagcctgacctcacagatgcctccttccatgtttaaaagatgctttcactgtattagcacacatcacatccttcttgccttgtgaaatttattttaacaaaggtgggggaaaaagaactctcctttattgagctccaaatacctgtccaactctaggctaggcaattctaagaacatgatgatttctcaatctcatgacaatactgcaaggtggttatttcacagacgagagaagaaaagctagaaagttaaatgctccaaggtcatacagattggaatcctaatggctcttcaaatctcaagtccatgatctttgcacccataagatgttgtgaacccaacgataaacttaagctttgaagacagaggtgggtcttgtcttctttaggaggagaggagaaatcaacctctctcattttttctttcctgtagggctcagggatgtggaagtttaagagcaacgaaggctccgcagaggatgagggaagcttccagagggcaggaaggaggtctggacagcccagtctagcaggggcagagctgcggcagatgccttcccaacgcacagacattgcagagtcctgctggtccctgctttcccagggcaaagaactgcccccatccacggccccctcaacctccctgcagcctgacataagacactggaggtcacaactggaggctcagaaggccagcgaggagttgtgagcggcagacagaggggaaggcaggggggccaggtgggaggtggtctggtgccaggcttgggcccagtatgtaaggggttgggcaggccatgtgactccaaggaggcggagacaggcgagctggagggaggacgagcaggcacggggaggggttcggggggtgggggcccaatctgaataattgaggagctgttcagcagcagcggctgcctcctgccttcctttgccgccaccaccacttcccatcccagctagagagacagctccgcgcagtaagtgcggactgccagccaccagccttggcagccagctcgtcgcctccagccccgaccccggtaagtgaacggcccccttcgctgccgtttgtccccctccgcgccccccgcgccccagcgggacccctgcaactgggatggccgcctctcccggaatgacccagggagccggagtcaccgggagcgggggaccaggaatatggcgcggaggcccagggcgccctccgagaaggggttccctggaagaaccgaggaggtgggtcgggctctttcctgctctggcccggaatgaggccccgactgcccgcggtctgggggcaccgggctctgactcgcgggagctgccgggcggggcgggggccagcgcggctccggcgccgctagagcgggaggcagaaggggagccgcgagcggaatgcgggcagcctaggtctcggcagacgccgggcccgtcctgtcccccgccttggcgcgcaccccgcacgggcagctccgttctccgcctcggaccgagaccatgaaacggagacgcttttccggccgcagactccggggaggtcgggagcaacgtctgcccttttacctgggagcaaactcctcaaagggactcccgccgagcccagcaccccgaccaggatggtggcgccccgaggggcgtctgtccccggagagtggtgactctcccgggagcggcgaagaggacgtgacgggagcggtgtccagggaagctccctgcccagagccggcagccccagcaaggggagctctcctgcactgcttcaaccctcagtctcctctcttctcccattccaaagcacatcagctcccctctaatccaagagggccaggttagggctgcgtggccacgcgggatgcagcccccaccctccttctctctcctgtgtcaccctgccccctccccaaatgagtattttatattgcgattgaagagtgagcaaagcaaaggcgagaagagatgcaggaaggctagag

SEQ ID NO: 9964 - DNA, 6000 bp, Homo sapiens
cattctagccagaaactaccacggtctctctcatccagagcccacctgacctaggctagggacctctctccggaaagacctagctccatccggccctccccttcacagacatggccaacctgtctctccacgatcacgatggctccagtggcgcctctgaccaggacacactggcccctttgccgcacccgggggccgccccttggcccatggctttcccgtaccagtacccgccacccccgcacccatacaacccgcacccgggcttcccggagctgggctacagctacggcgggggcagcgccagcagtcagcacagcgaaggtaaggtagaggggccgtggaggaaggctataggtgggccccaggcttcccccgcccgctcagcctgccccaccccggccctgtttgcctcctacaggcagtcggagcagtggctccaaccgtagcggcagcgatcggaggaaggagaaggacccgaaggccggggactccaagtccgggggcagcggcagcgaatcggaccacaccacacgcagcagcctgcgggggccgcgggagcgggcgcccagcgagcgctcagggccggcggccagcgagcacagccaccgcagccaccattccctggccagcagccttcgcagccaccacacacacccgagctacggtcctcccggagtgccccctctctacggcccccccatgctgatgatgcccccgccgcccgcggccatggggcccccaggagcccctccgggccgcgacctggcctcagtgcccccggaactgaccgccagcagacagtccttccgcatggccatgggaaaccccagtgagttctttgtggatgtgatgtgagcagggcccctcccccagctccattccgctcccaccccagccggctgcgttcctctctccatccgtccgtcttttttactttgtctggtacctgaaagggaaataaaaggaactaaatccaggtgcgctaactgctcgcagggtgctgcgagggtggggtgcacctaccgattggctctgcagccccctaacctgcctctggccccagttcgtttcctctgcccactaatccctgcgcaggacttcccaggaccccttttgtctctgggaccagacttgttggtgctaccccttactcccctctgcaacccccattttgggagttgaccccagcaatgaccttggtggcacgctcactccctcattctctcgtttcccctttagctccctttcaccatttattcagctacatcatccctctattaaccccaccccatcaggcacgtgtgcaaacctcttgactttaccccacattactgaaaccaaaatatatttgcttcatctgcccctactaaccatccccctgcctgctgcctcagtcctgcaacctaaagctgtagtcgcctccaatagccatccatgccatccctgcctgtgcctagatcagaggcccagagggccccctcagttgcctgagcagctggtggcttccagggagcatctctgctctacccctgccccatgcctgccctgcgtgctggttccttcagacccctaaccctactaaccagcaggctcatctcacctccaggcctgaaacatttcttttctttcttttttcctcccccaatttaccctgggcctggagcagccaagaatttcgggctgtttgactttctgtgagcccccagcgaggggaggcccagcctccgaggagaccaggaaccctgcttcagcagcccctcagggcttcccaaggatgtccagcccccacacccacacgttaacataatgagtcactaggcttctggggagggcccaacttcacccatgcatgagagactctcctcctttccagagagaatcggatcgcaccacgtgtggcagcctgcggcggggggaggggggcctctttagctctctttatctttctctctcactcatgtatgcatacatgcacagagatgcatacacaggtgcctatgcaagttcatttaagcctcagggctggtccctgcccaaagggctggaccctcctaatcctctcctaggttgtggggctggtcccctgacacccttctccccttcctggtagaccttaaacctcgcacacatgtccccagcattttctcacctggataaagcccataagctgggtctcaggctgggctcagcaaaggactcgccttgcaaccgacaggccattcccacccccacacacaacctcccctgttttcacattcaccatggcatcccagagcaaggacacaggagcccacaggccagttgaggttgggcaaggagacttccaggacttccagacagagtaccaggttttatttttcaccttattctctactttaaacaaatcataactttctctttaagcctctgctataaattctcctggctctcctgggcttccatattttgggggctggggtgtcaaaagtgagatgaagttcttagctccaggttttggggtaaaccaaggtaggaacattttggcatttatttcaattaacaatacttccttggacgggtgcggtggctcacgtctgtaatcccagcactttgggaggctgagacaggtggatcacttgaggtcgggagttcgagaccagcctggccaacatagcaaaaccctgtctctactaaaaatacaaaaattagatgggtgttttggcacctgcctgtaatctcagctactcaggaggctgaggcacaagaatcgcttgaatccaggaagcaagcggaggttgcagtgagttgagatcgcactccagcctgggtgacagagtgagattctgtctcaaaagcaaactaacaaagaaaaacaatacttcctggggttttggtgtgcagagggctttgttggaagtgtgactcaatcttgcctgccttctgggagctctagaattgttcccaacccagtccatggcttctagccaccactacagggctgtttcatgtacttctctctctgactctgtcttgtccgactctcttgagaatttctcaacgattgctcatgcctgtcagtatcagtgcttccatcgttccatctttgattcacttctctttcctttctatttactcccaaaatggagtcattcatcctgatgtcctcaattgctgctgatatgctggtgattcccaaatacatagctccaacccccaacttcccccagactttagatctgtattggtattacctactggacatctctatggacagttccgtatagactcaactcatctgcccaaccaagtatgttcctcctgaattcctctcctggttacttcatcacaatctacataggctcaccagctagaaacatttatgagcttacattccttcttcccatatcttatcagcatatcatatccatttcactccaacactctgtcttgaatttggccctccctctcccctctctactttaattcattggagcatgggatttggagttaggtggttttgggtttgaattccagctctactatttttggttgtgtgatagagttatttaacctctctgagcctcagttccctcgtatgtaaaatgatgataataatacctacctcacagggttgttgtgaggatttaaattagatattgtacgaaaagtgcctagcacagtgcctggcacacagtagagtaggtgctcaataaatggtagctattattattattattttatcattattattatttactctaaattggtagcagtttagggtatttttggaagataaagcttttgcaaaggtagaagtgaagccttgagtgctggttcaaaaattagaagtgcctgtattcagtcacttaatgacttcaggccgtgactatgatgtgagagaggtcagatcttcatcctgccacatcgtggcttctggctggaggctgggaaggactgtaacatttgcaaccagatctgtcctttcttgcccttccttcctcccatgacaggcgtagtcctgcccaaggaaggcagcagtttatctctgcctacagaaagagaagagccaacagattttcttaagactctgcaagaaccaagcaggcctttcatgtgtgagggttgggtctgtctcctcagcttggatgtaaagattctgtttatcaaagaggggatttcaaatcccatgtcaaactaaattcaactcttcgaacgtcttctaagcaacatatatgcctgtcactagaaggcatacacagtcgcataggtatagctaaggagaacatcggctcgttcatgaaaagctgtagctgacctccgggaagagtgtacagtcatggacttatttgtgaaaaggtttagtttcttccaagtagtcgcctccttcctccccgctcctctccttgggtcttgatcccttggaaaaagctcatgtccggaacaaatatatgagaaaagcttgagagaatcagaggtagtgttagaaagcagtaaattcagcacaaacacttctactgcccagttgtatttatttgtgtgtaaagtgaggacagccagtcctgggactctggagacagaaaaggcctacagcaatccaaggcttaacagatgtgcttccacaaatggcattaatatcccaaagctctccagaacacaaataggaacaggaggaagtgcagggactacaattcccagagcgctcagtgaaaaaaaaaaaaaaaaaaaaaaaaaaaaaaaaaatgaggcgggtggagcggtgtatgctggaatgtgtatttctggtagggccgactaaggccacgcctaccccttcctgaggcgggggcggtttctcgaaggcagtcggtagttgtagttttgctaaacctagagcgcttcaaattgcaagcaaggaggccgcgaggcctgacgggatttgtagtcggcgctagacgccggcgcgcacgcgcagccggggccggggcggggcggcggcactgcggtgaaagccgaggcagcgggcagacgagcagggggcgggcggacatcttgggatccggagagtggccgggccggcagagcagggggccgaggacaccaggtgagccggggatctggccttatggcgtggaggaggacgctgcgggtcgtctgcctcgccgcgcagctttgtcctgccctgcactgagctggcggaaagctgcccacacccgggagtggcttcagccttcggacccgggagctagctgacggtggggcgggggcgcccggggcgcgattgcagggctggcggggagcggtgccctccacctgacccgcctggcgcctcccatgagagggataccgcttggaatcctcccagagcaggaacgctgcgcagcgccccctccctaggatcgtgccaaccccctacccctccgcgcaaggacaatttccccgtctcgtaggacagtgacacccctttgtgccgccgccttgcaccgtgacaggtctcacgccatgcggcaccccctcctcttagttcagtggcaccccgcggctcttcttccttagacctgtgacagcccccgcacccccatggcaccatcttttcccacaatgtcctccccaaggcgaaaagcctaccaccctctcattactctgcacctgaaccccaagcaggctctgtctccccagctttcccttattcaccactgtcagttcccccggccggtttttccttcttaaagccttgaccttttccatactggaaacccttacctttacgttcactccaccagcccagtttgctgctgtgggctcacctgaggacgctgcctggctttcactgaaggtctttccccttaactaaatgttccattcttgcccaaggcccccctctggttctcgggtgcccttcgctacctaccactcgatacctgtggacttggtgctttgccccaggctctacctccattttgcatctcctctcccagcctgtttgggactgagggatgggatgagtccaccaccttgagagaccgctcacccctctggaag

SEQ ID NO: 9965 - DNA, 6000 bp, Homo sapiens
cagtcacggtgggcccatctgtttgtgagcctgttgttatggtcacctcctcttcacctcatcaatgagggagggggtctcacccttgggttaagggtatggtggacccttgacacccagccctggacaggtgagggccacagcagttcgttcattcattcattcattcactcattcaggcagcatatactgtgtacctgtgccaggcagacacccctgccctcatgccgctcacacagcaggttctggggtcaacgttgatagcaatgagggctgtgtgctccagcaagtggtgggagcggccctgcggagggaggccaagaagatcccccttccccaggaggaggtgttgcaggggaggcaagagaggctgcttggagacagtgtgggagcaggccagcctggcagggggtggacaagtctttcatcttcacctgtgggtgggttctgccagtcgagatcagaagcagaaaataaagaagaaccttaacagttatttaaaatttaattggcctgatctgtgagacctgaacaagatgggggaagaattcatgcctgtaagaatgaccatctggcccagaacctgccgagggtcaaggtgaccctgagaaatgaattggatgctgcgttggaaactgctcctggtaaacaagcagttcccactgcagtgtcagaaatgtactccagagcccctgcccacactctgtggaccctcccctaaaaacacaccccagtaagaacgaggtggtgggcagagatcagtggtcctcaacgttctgatcctgtggtctttgtggagcctgggcggcctgttgcagaagctcctcaggtggtcctggtgcccctgatgggtgagcaccactgatcttgtgccacttgctcatgctgtgggctgtggggtgggttggaggcccagagaaggtcacacagaaaccgctggacccggcttccacctgctgctccgtgcagctggaatctagttcaagctctttgagattcttctgctgtgctactgagctatttttaaaaccacacttttgattttctggattataacccagtgagctgtgttgacatgttttcttctcaggttttcacaggaaagtcatttttcttatatagttacattatttgcttttgatagttttttatttataaaagcaaatagtcacaattgtcagaatagacaaaaaattataaagattacttatgaacccaccacccaaaggcaactactgttaacattttggtatatatccttctgaacgtttcactgtgcatgcacgtgtgtgtgtgtgtgtgtgtgtatccttctcactttttttttgagacagagttttgctcttgttttccaggctggagtgcaatggcatgatctcagctcaccgcaacctccgcctcccaggttcaagtgattctggtgcctcagcctcccgagtagctgggattacaggcatgcgccaccacgcccagctaatttttgtattattagtagagacggggtttctccatactggtcaggctggtctcgaactcccgacctcaggtgatctgcccgcctcagcctcccaaagtgctgggattacaggcattagccaccgcacccggtctctcactcaatttttaaacagatttgagaaacatttttgtaatgatttgtaactacttggtcagacacctctttctatatgagagtctgcaaatggttgtttatttctgcgtctcctgtgctgatgagggtggttccaggattcactgtgtatgattatacgttgtgtgatgatgtttgaccacgtccgaaactatgatgacactgtgagaggtggtgacacctgaaggaagtgatcacctgtttgggggctgctcagctgtatgccttgggaatgtgcatcccacaacaggccttgagcagccagggaaactaggccagccttaaagacagaggactctgtctttaaccaggtgatgcctttaaaccagtaaccttctgcaacacttctctcagaatcaggccatttctctctgcctcctgccggttcaatctcctgtttgaacaaactgatcctaaccatggatgacgggcagtgatggggttggcaggcagcccagaagctgagggtctcggcctgcctttgacactaacttgctgtgtgatcttgggaaactgttcattttcttcatttgcaaaacagaatgctatagttcctgtgaacatcccagggctgttgtgaaaatgatagaatgtgagagagctctgagaaatacagagtgctgcacaagggaacaaatgggcactccttcatccaattgcagtgactgagtgttacgggcattccttcattcatttgcagtgactgtttgcgtgtggccgagtctgctctgtgcccttgttatgccctgggtttgcttcagagcacttatcacagatcatccttcctttctttctttctttctttctttctttctttctttctttctttcttctttctttctttctttctttctttctttctctttctttcttttttgactgataacctgtgtttgttctgctcgcagtgtaccctggcatttagggcggaggctggcaattactaggccctaagtactgatctgtggaatggagccatggagaagccccaagattgcagcagtgagaagggctctgttctcaggaggggtgcgtgccagggagggagagcagatacacctgcattttatgcttctgttatgcaaaagtgggacctgtcttcaggaaggttcagagagtacgttgggaattctggggaaagagctgttaggctctggctgagaggaggtgcctcagctggccatgaggcctggcagacgtttggcctgggtgatgtgttggcctgcagcagaggggaggagcacgggcatggcccccgtgagggtcatgagaagttctgtctgcagctgcagcatatgaccatgtacttgcaagaaggaggctcacgtggatgtgtctttccagattgcaaggggtccggatgctcctttctcaggcagtgtgttgaccacacactgtgtgagcaagggccatcctcacagtgcacctgtgggttgtgcctgtgaagagcacacagtggttttgtgaggagacagattagagggacaaagggccgtggtgaaggcagcgtctgtgggcaggagtgggggacagctgtgggagaggtgtggggacaggcagagtggatgtgggactgagatggtaggggctccgagtgaggcttgcatttctggctgcacctttccttgaggcaggccacttgggagaggcaggcttggaagtggcagtcctgagagactggtggagtgagatacatgctcatccctaccagagcctgggtatatgatctgaaagctcagaggagaggtctgggctgtgagaggtttgggagttgctacatctgaaatagcgagatcacggatgaggaagagattccccaaatgcagttaactacggctatgtaacgaaggacacccaagcttagcagtttgtttaaagccaattattgtttgatgcggaatctacaggttgggcagggcccggtgagaagaaccgcctgctctgcgtgcgtggtggctgttgggccagcccaagacggcccactcatgtgcaaggctgggctgtgagcaggaccctggcatacggcctctatgtgtgaccacgtggtcttcctcacagcagagtggctgggagcatgagcagcccaagagataggacatagaagttgtcagtttcttaagatccatgcctagaaactgactaccacagcgtctcttccactttgttctctcggttaagctgtggggacagagggaagagggggtcagaaactctagctctcagtgggaattgtgctggagtttagggccagttatgcattgctcctatgaggggcttaaaaatatctgttgaatgaatgagtaaatgaagggtgtgcacaaagacgcagtgcaagaaatattgggggcacgaggggaacaggtgctggagaaattcgtctggagttcggttgcagggacagccttggggaggccggtaggatccacactggggagggcagtggactccaggctggggtctgcacttaagcctgggatagtccgacgggagaaccaggtaacgtgcccactagggcgacagtttagggatgggagtggaagtgaggcctagacccgaccacagtgctgggttcagctggtgtgagtctgacccccagcttcgggcttctgcctgccccagcctgccctcaggcctgaacattctgttcctggtgcctgtggaatgcgcagaggacacacccaacaacagaaccccaggagtcagaggtggcttcccagccccttctccttctctgggtgaggaggggtcagcagggccagtctgacatttgtagctgaagaaagcgaggccactttggaagcatgtttatgagtcttccaggccatggagggagaacaggcctgcgtttttttctgtgaacacagcttcctgtggccatgaaccccctggctggacacaacttgagatgacccagggcgtggcttcctgcttggggacccatagactgcttgaccttgaggaataaaactcgaggtctgtagagctggcctgaggaggcagtccctctgtgctgatctctccccaggccctcctctgccaggaggggaacagcccagcacacttgtacagggcgaggtggcagcagacctccgtgtgggcactcaccaaggccaggcaccacgtgggcttcagctctgtccagcccaagccagtatggaccagcctgctgggctgctgattgctgtcaaggccggtgcagagggaccatgagcctccatggcagactggcagagggaggtcccggcggacacacagccactgtctgaggagagcctgaccttcagggagggacagcagggcctggcagagtctctgtaatgaggccgtgagtcacactggcctttgttcctcactcatctgtgctggccctcagccgaggggctgttggggaactctctgcaggcacagggcacctggtgactgggaagcttctgtttgtgtggacttcttgggaacagcgtcctggtgtgggccaggaggagaggactggagcaccccaggctctgacttcgtgctcctgggatcgtggtgcattgcctggccatggtggtcacccagctgaatctggagttttgctttcagggcaagaagctgcgaggcttcagctgtgagcttacccggtccccacatggggtcttgcctgaatctttcttcaccatcatgtgccaggtcgtggtgcccattctgctgtccggcttgtgcatgatgacagccggcctggtgatgaacaccattcaagtgcgtactgggtgtttgggggatcaggggtgggagacacacagactgggtctcctggcaccacagacagggcaggctggagacatgaggggcctctacagtgggagggcagccctcaacctgcccttgctgcttgggcgtcccgggtgtcagcgaggctggcaggagggacctccaacgctgagacctcagcattagagattcgcagaatgatggaggtttgtcagaaccttagcctgcatgtgcctcctcagcccaaggagctcaaaccgccttcctcccagtgtatgtgggctcaggaggcagagtctgccactcaccagtggaggggatttttagtcacactgttctgccttgatttccccatctgtaaaatggggataatgaaagccctcacctcacagaattgtgaggaccagatgactgagtctgtatgctgtggtccctgtgggcagagctgcagtgtgcccagcccgcagcatcctggcgtggcccctggtaaaaaaggacaaggtttgcagccctgggggtgcaggtgggagggccatggcggtctccctgcagtggaggcgtgtgctgagggagatttgcttatcacagtctgtttctcc

SEQ ID NO: 9966 - DNA, 6000 bp, Homo sapiens
gagaccagttaagaaagtatttatggccgggcacagtggctcacacctgtaatcccagcactttgggaggcccgaggcgggcagatcacctgaggccagaagttcaagaccagcctggtcagcatgatgaaaccccgtctctactaaaaatatgaaacattagctgggtgtggtagcgcacacctgtaatcctagctgcttgggaggctgaggcacgagaatcatttgaacccaggaggcagaggctgcagtgagccaagatcacgccactgcactccagcctgggcaacagagtgagactctgtctcaaaaaaaataaaataaaataaagtatatagtggccaagccacaataaatgaaggcagtaataatagagacaaaggggagatgaggagatttaaagtccagtggatggactttcaagtttttgaggtttgattgtgggatattgagggaaaggggaacttgggctttctcttaaatttcaagctattgttgattatcaccaaataagaatacaactgtaggatgaaccgtttaaatgaggaaggcaaataacaaattgtgttttggacagtttgagttttaggtagctatgaaatttcctggtagaattacacaagcattttagttttatgcatgtgaagctcagaaaagaaatgaagctatagatttgcaagtcctcagcctatgtgtagtagccagattttttaatgggaagatcaccagaatgagtgtgtaggtgagaagtgagcctaagataactttctccatttaagaaatggatagaggaagtacactcatgaaggggcaatttcacttttttcaaagactttaaaattatttttcctctaaagtaaaacaggatccaatttgtgtatcaacaagttaagtatatactttttaatgtttctgcctataatttaaactcattaatgtttacagggaaaattctcttttcccctgaaatactgtgttagatcttcatcattttccagtaaacttaacaggtatcttaagcatcatatttattaatcaccagtattttaaatttattttcatacgtgctcactagaaaaacttggcaggtgctggaaagtaggaagattccgctttttacttaaatggaattttacatgttattgctggttataaacattggttatgtattctgatgaataggcagatgtctcattacttatttatacacttatttgtacatttacaagcagttagacactcaggttgttgattttaagataaatatgctgtatctttgtgcataaaatttttttatatttaagattcacctttaaattcccaaaaattataattcaaaaaatttgcgattcagaaattggattatgtgttccaaagattattctaacttgtcactgctctttaaatattactattgtttcacattgcaaaatttcttgcagggctggagaaaattgaacaacttcaaaatcatgaaaatgaagacatctacaaattggcctatgagatcattgatcagttcttctcttcagatgatgtatttaataattttgtagttttcttaattttatatataaacatagatctggataaagtaatatatatagtaagctgggggacatacatgtgtatttgtttggaatggaattaaaatagatgtatgacagtaatgtcacctgctttgaaaacaaatatttcaatattttaagatcccttcagggcatattagctctaatggcaagaaataaggacttttttgaccaaacgagatgagtcagactttattttcacttggtgtctttatagttctcattttttaaaattgttaatagcataccatatttataaacaaaacagtgatactagtatatcctgtaataagttctttatgacagtagttaatccacacttgatgggttgtcactgtttttatttcatggccaaaaacaaatacgaaaataaataagatggaaataaaaaggtaaggcactatataatgtaaggtatagtatacaaaaatatcttcagattgttagtaatagtagtggaaattaaagtattaacttatttttagtatttcctctttggaaaagtaaatctaaaattaaaccaattgctccttagaaaattttatagtggttcagtgcagccaccagaggatttctttaatgatttctcagcttttcaaagaataagtcttttactgcatgcctttccatattatcaaaaagaatagaatgttattaaacattttgttaagtatgtatagtttgaacattaacttgacaaggacaatattagaaaagaaaattatagactatttacttacagttgtttaagcttagtcctatttagaatataatgccagttaaataaaccagaaataaaattaagaaaagttttttttctttctttctttttttaaagacggggcccaggctggagtgcattggcgcagtcacagctcactgcaacctccccctccctggctcaggtgatcctcccacctcagcctcccaaatagctgggattacaagtgcttgccactatgcccggataactttttaagtcttttgtagagacaaggtctccctatgttgccctggctgagcttgaactcctggactcaaacaattctcccatcttggcctcccaaagtgctgggattacaggcatgagccaccacgcccagcctggcatattcttttaagagtaactttgatcgtatgtcttgaagttggatttttgaaaatcataatttgcaatttggtgactaattgtaatagcctcataatttctaatacctcaacatgtagttttcgttcttgacttagattgtgaaaagaataattcagatgatatacatagttataggaagtacactacaggtttgtaatattgtggaatttccaaaaggagcctttagatgcaaagcatatagaataatgtatataataataataataaccattattagcagaactattataggtggagtatcccttacctgaaatgcatgggaccagaacagttttggattttggatttttttgaattttagaatatttgaattatttctaccacttgagcatctgaaattcaaaatgttccaatgagcatttcctttgagcatcatattggtgcccagaaagtttcagattttggaatattttttgttttgtactttcagattagggatactcaatctgtattttactattttaagcccaaataccatttgtctctaattgctattgaaagatataccaaagattcactttccaaaagtggtggcattagatttttttttaatgtgattgtctttatgtacttgcccggggtttttttgttttgtgatttgttttgttttgttttgttttgtttgagacagagttttgctctgtcacccaggctggagtacagtggcacaatcttggctcactgcaacctctgcctcccaggttcaaggaattctccaccctcaacctcccaagtagctgggattataggcgcatgccaccatgcccagctaatttttgtatttttagtagagatggggtttcgccacgttggccaggctggtcttgaactcctgacctcaggtgatccacccgtctcagcctcccaaagtgctgggattacaggcatgagccaccgcgcctagctgtacttgcccaggtttaagggaaattgtaatgagaccaaattttgcatcctctctttgagacttagggccatcattactgttccttcattcttttggaaaatgcccgtcttacatattctcttttttctcattttggcatcccttaagaaaaagtcttgggtaggcactgtggctcacacctgtaatctcaatactttgggaggtcaagacaggcagattgcttgagcttaggagtttgagaccagcctgggcagtatggtgaaactccgtctctacaaaaaatacaaaaattagccaggcgtggtggtgcacacctgtagtcccagctactcgggaggctgaggtgggaggatcacttgagcccaagaggttgaggctgcaatgagctatgtttgtgctactcatctccagcctgggtgacagagtgagaccccatctcaaaaaagaaagaaagaaaaaaaaaaccttctataaactgtttcaattttctaaaggatggtaagacagtgttggcattcatcatctctccagacctttttttaagggtaatgggattagtactataatactgtttatatatattttaaaactaattatcacattctttttcttttttttcacctagattgatgaagaccctagccttgttccagaggcaattcaaggcggaacatttggtttcaattcatctgccaatgtaccaacagaagggttccagttttagaaagatgttgtggaagttaggtacaatgcagcactgagatatatatatatatatgtgtgtgtgtatatatatatatatatacatatatataaaaaggtttgatccatcaagcttggctcatgggatctgctgctgcattaaatcgggaaagaaaatgtgaagatttcatttggaatcacagaaaatgcccaaatgaggtcaagatggcgagtgggtgcgagtgagaatgagtggcaaaatgtaatgaaaactttacatgaatgcttatttaggttgttcaaagtaaaaagggctacaggtcacagatcgtcagtgcctgagaaagaacattgacttactctatatcaattgaggggaaagtgcagtaccgtcatcttcaagccttgtaagcataaaagagaataggctgcccatataagtcaaaggaaaatgagcccaggccttgctatgaagcagtgtgtgaatggacaatgttgaatgaatgtctggctcagtgatggagagccaggttcatctttgaaatctagggctcttcactcatgaagcagactcctagtcctggagtgactgtgtacgagagcgtggttgtggtgctgtatgtgaacgcatgcaagcttgattcaccttcagggggctgataacctagtaaatcatcaaaatgagatcataagtgttaatgtacactggacatgaaaacaaagactggtttagcagcagacattggtttactctgcagcctgtgttttctgtttccccctttcccacctccttccccccacccaatccttttttttttcttttttgcttttcttttctttttttttagtttttatttactttacctagtatgcctttttttagttgcttctcaagtcagaaaacttttcaggaaggtttccctgtgcatttgcaccagatgaatgtttgatgctatgaaaagctttccatatcatcaaaactaatttgtgtagatttttgcatgaaaaaaatcataaatttccctcaaaatagactgtgttgcagtacacaagttgccataatagtataaaacagtaaaatgtgcttaaaaggccatccttttcattttcagagataacataaagatctttgcatgaggtaaatctacagcatagttcatttttagattttgttgagtcctgtaaagaagaagaagaaaaaagtttcagttgtggtagaataccgtgctgtgtttaaatgttacttgttttcaaactttgttttctatgaaaatgatatggaaacttctaaaatggaatttggtgcatatgtactgctgaataaagaccgatgaagaggtttgagtagatgtacaaatcaagtaatggtttgaacacctttaataatatgcctaatctgttcaattgttttagaatctttttatcttagatgtaggcagccatgaacaatctattttgagccactttagggagaaaactttgtatttttaaaacttgcataaaagttatgcaagtggtttttataaattggaataatacctcagttttgaggttatgcacactaaattaaatgtgacataaattaatttgtacaaaaagaactctttataaggtggctcattgtaggaaat

SEQ ID NO: 9967 - DNA, 6000 bp, Homo sapiens
tgtccccagcattttctcacctggataaagcccataagctgggtctcaggctgggctcagcaaaggactcgccttgcaaccgacaggccattcccacccccacacacaacctcccctgttttcacattcaccatggcatcccagagcaaggacacaggagcccacaggccagttgaggttgggcaaggagacttccaggacttccagacagagtaccaggttttatttttcaccttattctctactttaaacaaatcataactttctctttaagcctctgctataaattctcctggctctcctgggcttccatattttgggggctggggtgtcaaaagtgagatgaagttcttagctccaggttttggggtaaaccaaggtaggaacattttggcatttatttcaattaacaatacttccttggacgggtgcggtggctcacgtctgtaatcccagcactttgggaggctgagacaggtggatcacttgaggtcgggagttcgagaccagcctggccaacatagcaaaaccctgtctctactaaaaatacaaaaattagatgggtgttttggcacctgcctgtaatctcagctactcaggaggctgaggcacaagaatcgcttgaatccaggaagcaagcggaggttgcagtgagttgagatcgcactccagcctgggtgacagagtgagattctgtctcaaaagcaaactaacaaagaaaaacaatacttcctggggttttggtgtgcagagggctttgttggaagtgtgactcaatcttgcctgccttctgggagctctagaattgttcccaacccagtccatggcttctagccaccactacagggctgtttcatgtacttctctctctgactctgtcttgtccgactctcttgagaatttctcaacgattgctcatgcctgtcagtatcagtgcttccatcgttccatctttgattcacttctctttcctttctatttactcccaaaatggagtcattcatcctgatgtcctcaattgctgctgatatgctggtgattcccaaatacatagctccaacccccaacttcccccagactttagatctgtattggtattacctactggacatctctatggacagttccgtatagactcaactcatctgcccaaccaagtatgttcctcctgaattcctctcctggttacttcatcacaatctacataggctcaccagctagaaacatttatgagcttacattccttcttcccatatcttatcagcatatcatatccatttcactccaacactctgtcttgaatttggccctccctctcccctctctactttaattcattggagcatgggatttggagttaggtggttttgggtttgaattccagctctactatttttggttgtgtgatagagttatttaacctctctgagcctcagttccctcgtatgtaaaatgatgataataatacctacctcacagggttgttgtgaggatttaaattagatattgtacgaaaagtgcctagcacagtgcctggcacacagtagagtaggtgctcaataaatggtagctattattattattattttatcattattattatttactctaaattggtagcagtttagggtatttttggaagataaagcttttgcaaaggtagaagtgaagccttgagtgctggttcaaaaattagaagtgcctgtattcagtcacttaatgacttcaggccgtgactatgatgtgagagaggtcagatcttcatcctgccacatcgtggcttctggctggaggctgggaaggactgtaacatttgcaaccagatctgtcctttcttgcccttccttcctcccatgacaggcgtagtcctgcccaaggaaggcagcagtttatctctgcctacagaaagagaagagccaacagattttcttaagactctgcaagaaccaagcaggcctttcatgtgtgagggttgggtctgtctcctcagcttggatgtaaagattctgtttatcaaagaggggatttcaaatcccatgtcaaactaaattcaactcttcgaacgtcttctaagcaacatatatgcctgtcactagaaggcatacacagtcgcataggtatagctaaggagaacatcggctcgttcatgaaaagctgtagctgacctccgggaagagtgtacagtcatggacttatttgtgaaaaggtttagtttcttccaagtagtcgcctccttcctccccgctcctctccttgggtcttgatcccttggaaaaagctcatgtccggaacaaatatatgagaaaagcttgagagaatcagaggtagtgttagaaagcagtaaattcagcacaaacacttctactgcccagttgtatttatttgtgtgtaaagtgaggacagccagtcctgggactctggagacagaaaaggcctacagcaatccaaggcttaacagatgtgcttccacaaatggcattaatatcccaaagctctccagaacacaaataggaacaggaggaagtgcagggactacaattcccagagcgctcagtgaaaaaaaaaaaaaaaaaaaaaaaaaaaaaaaaaatgaggcgggtggagcggtgtatgctggaatgtgtatttctggtagggccgactaaggccacgcctaccccttcctgaggcgggggcggtttctcgaaggcagtcggtagttgtagttttgctaaacctagagcgcttcaaattgcaagcaaggaggccgcgaggcctgacgggatttgtagtcggcgctagacgccggcgcgcacgcgcagccggggccggggcggggcggcggcactgcggtgaaagccgaggcagcgggcagacgagcagggggcgggcggacatcttgggatccggagagtggccgggccggcagagcagggggccgaggacaccaggtgagccggggatctggccttatggcgtggaggaggacgctgcgggtcgtctgcctcgccgcgcagctttgtcctgccctgcactgagctggcggaaagctgcccacacccgggagtggcttcagccttcggacccgggagctagctgacggtggggcgggggcgcccggggcgcgattgcagggctggcggggagcggtgccctccacctgacccgcctggcgcctcccatgagagggataccgcttggaatcctcccagagcaggaacgctgcgcagcgccccctccctaggatcgtgccaaccccctacccctccgcgcaaggacaatttccccgtctcgtaggacagtgacacccctttgtgccgccgccttgcaccgtgacaggtctcacgccatgcggcaccccctcctcttagttcagtggcaccccgcggctcttcttccttagacctgtgacagcccccgcacccccatggcaccatcttttcccacaatgtcctccccaaggcgaaaagcctaccaccctctcattactctgcacctgaaccccaagcaggctctgtctccccagctttcccttattcaccactgtcagttcccccggccggtttttccttcttaaagccttgaccttttccatactggaaacccttacctttacgttcactccaccagcccagtttgctgctgtgggctcacctgaggacgctgcctggctttcactgaaggtctttccccttaactaaatgttccattcttgcccaaggcccccctctggttctcgggtgcccttcgctacctaccactcgatacctgtggacttggtgctttgccccaggctctacctccattttgcatctcctctcccagcctgtttgggactgagggatgggatgagtccaccaccttgagagaccgctcacccctctggaagaccttgacagccacaggaaaaggctttattttccagtttagaaaagtcctctaaagtactccctgtgaaattaataccagggctaatccaggaaatctaaaaccaaattaatgccttttctcaaacagtctaaattaatttgacccaaataatttggataattcaggcatcctgacatccctgcttcttgcttataggcacccaggccagaaatgagttacttcatgggcctggaatcacgatttcagatggaaggatttcttaattttatgagcctgcgccacccccaccccccagtccttatttttattgcattccagagctttttgaaaggggggtggtaatcagaaataactgtaataagcagcttgggtgatggaagtgtagtctgccagccctaggaccttcctcctgtgccctttgcctgcttattccactgcctggaagaggttaagccacactcccgggtccacattagggcctaagggctcccttctcttctccttataccctttcctggaatgtttgaattctgtgaattagagtgccggaagttcaggccctgcgaccttctctgaagggtagtggagcccaagagactggatgctctaaaggttatgcctgggggccccaggcctgaaccaactggagtaatgcctaccgccattcctgcagccgcaggcaggcaggcaagccttagtgagtcactggcgggagcccgagagtctgcacaggagggggccgaaaaggatcattcctgagctcagtgctggggagagggggcgggggttactgatgctcagccccaggaaagggagggtcaaaatggccttagaatcctgggcctaatctctctctgtttctttctcccatctagtgtggaataaacaggaactggagcctggctgaggggaggggcatgtctgggagggctgcagggtcacttactaaagggttgagtcaggaaagaagctccagtgacctgcacagctccacaggggatgttggcagcgattctgaggtcttcttttaccctgcccccgcctgtcctaggtctgttctcagagcgatgggccgcggagactgatctgccgccatgattggaggcttattcatctataatcacaagggggaggtgctcatctcccgagtctaccgagatgacatcgggtgagtcccctggcggagccagctgtgccccaccactccagccccccagccccagcatacaggattaggtcttttcccaccattggcttgacttgggccaccctgacccctggctgcaccctggaagctcagctagtgtagcctggctcccattaggtctggtggtattggcccggcagccagcctgccagcccctaggtgggacctgtggaatggcatggtcccacagctttaggaactccttcccttcctgcatcctgtttctctagttacagtgcctttgcccaggctggtgaattccttctttgaggaggaggaggagaaatgtctccagtgggtggggttagtggccacgctggaggcactaatccatctaagccttgctctcagaagcccttcccatatcaaacgccttcactggattctgttgaaagcccctccaggctgcccaatcctctcctgctccctttctcaggagtcgtcaggctgctgactcagctgtcttcagttcctctggcccattccctggggagtggctggaagcgtgaggcactctctgggtcactgtgggagggcagggaagccatgctaccctctcagtagacccagagcagctccatatcctgggccttcacacagagccacagcctgccttctcattctgcgcccccttgcacgcccttgttctttgcgactgaagggacctatcctagcctccgaggcgctaaagagtaggctcctctggttcctgctgcctgtttttcttcctcagagagcttgagataaagtcacagaatgggcctgtggcagtgctcttcatttggctccctggctgatgggctggcttggcccttgcgggcgtttgtccattggctggtggtgtggcatgagctagagctgcagctgtggcaaggcctggcctgtctgaacctggctggctacaccccccaccccagaccccc

SEQ ID NO: 9968 - DNA, 6000 bp, Homo sapiens
gagtgtacagtcatggacttatttgtgaaaaggtttagtttcttccaagtagtcgcctccttcctccccgctcctctccttgggtcttgatcccttggaaaaagctcatgtccggaacaaatatatgagaaaagcttgagagaatcagaggtagtgttagaaagcagtaaattcagcacaaacacttctactgcccagttgtatttatttgtgtgtaaagtgaggacagccagtcctgggactctggagacagaaaaggcctacagcaatccaaggcttaacagatgtgcttccacaaatggcattaatatcccaaagctctccagaacacaaataggaacaggaggaagtgcagggactacaattcccagagcgctcagtgaaaaaaaaaaaaaaaaaaaaaaaaaaaaaaaaaatgaggcgggtggagcggtgtatgctggaatgtgtatttctggtagggccgactaaggccacgcctaccccttcctgaggcgggggcggtttctcgaaggcagtcggtagttgtagttttgctaaacctagagcgcttcaaattgcaagcaaggaggccgcgaggcctgacgggatttgtagtcggcgctagacgccggcgcgcacgcgcagccggggccggggcggggcggcggcactgcggtgaaagccgaggcagcgggcagacgagcagggggcgggcggacatcttgggatccggagagtggccgggccggcagagcagggggccgaggacaccaggtgagccggggatctggccttatggcgtggaggaggacgctgcgggtcgtctgcctcgccgcgcagctttgtcctgccctgcactgagctggcggaaagctgcccacacccgggagtggcttcagccttcggacccgggagctagctgacggtggggcgggggcgcccggggcgcgattgcagggctggcggggagcggtgccctccacctgacccgcctggcgcctcccatgagagggataccgcttggaatcctcccagagcaggaacgctgcgcagcgccccctccctaggatcgtgccaaccccctacccctccgcgcaaggacaatttccccgtctcgtaggacagtgacacccctttgtgccgccgccttgcaccgtgacaggtctcacgccatgcggcaccccctcctcttagttcagtggcaccccgcggctcttcttccttagacctgtgacagcccccgcacccccatggcaccatcttttcccacaatgtcctccccaaggcgaaaagcctaccaccctctcattactctgcacctgaaccccaagcaggctctgtctccccagctttcccttattcaccactgtcagttcccccggccggtttttccttcttaaagccttgaccttttccatactggaaacccttacctttacgttcactccaccagcccagtttgctgctgtgggctcacctgaggacgctgcctggctttcactgaaggtctttccccttaactaaatgttccattcttgcccaaggcccccctctggttctcgggtgcccttcgctacctaccactcgatacctgtggacttggtgctttgccccaggctctacctccattttgcatctcctctcccagcctgtttgggactgagggatgggatgagtccaccaccttgagagaccgctcacccctctggaagaccttgacagccacaggaaaaggctttattttccagtttagaaaagtcctctaaagtactccctgtgaaattaataccagggctaatccaggaaatctaaaaccaaattaatgccttttctcaaacagtctaaattaatttgacccaaataatttggataattcaggcatcctgacatccctgcttcttgcttataggcacccaggccagaaatgagttacttcatgggcctggaatcacgatttcagatggaaggatttcttaattttatgagcctgcgccacccccaccccccagtccttatttttattgcattccagagctttttgaaaggggggtggtaatcagaaataactgtaataagcagcttgggtgatggaagtgtagtctgccagccctaggaccttcctcctgtgccctttgcctgcttattccactgcctggaagaggttaagccacactcccgggtccacattagggcctaagggctcccttctcttctccttataccctttcctggaatgtttgaattctgtgaattagagtgccggaagttcaggccctgcgaccttctctgaagggtagtggagcccaagagactggatgctctaaaggttatgcctgggggccccaggcctgaaccaactggagtaatgcctaccgccattcctgcagccgcaggcaggcaggcaagccttagtgagtcactggcgggagcccgagagtctgcacaggagggggccgaaaaggatcattcctgagctcagtgctggggagagggggcgggggttactgatgctcagccccaggaaagggagggtcaaaatggccttagaatcctgggcctaatctctctctgtttctttctcccatctagtgtggaataaacaggaactggagcctggctgaggggaggggcatgtctgggagggctgcagggtcacttactaaagggttgagtcaggaaagaagctccagtgacctgcacagctccacaggggatgttggcagcgattctgaggtcttcttttaccctgcccccgcctgtcctaggtctgttctcagagcgatgggccgcggagactgatctgccgccatgattggaggcttattcatctataatcacaagggggaggtgctcatctcccgagtctaccgagatgacatcgggtgagtcccctggcggagccagctgtgccccaccactccagccccccagccccagcatacaggattaggtcttttcccaccattggcttgacttgggccaccctgacccctggctgcaccctggaagctcagctagtgtagcctggctcccattaggtctggtggtattggcccggcagccagcctgccagcccctaggtgggacctgtggaatggcatggtcccacagctttaggaactccttcccttcctgcatcctgtttctctagttacagtgcctttgcccaggctggtgaattccttctttgaggaggaggaggagaaatgtctccagtgggtggggttagtggccacgctggaggcactaatccatctaagccttgctctcagaagcccttcccatatcaaacgccttcactggattctgttgaaagcccctccaggctgcccaatcctctcctgctccctttctcaggagtcgtcaggctgctgactcagctgtcttcagttcctctggcccattccctggggagtggctggaagcgtgaggcactctctgggtcactgtgggagggcagggaagccatgctaccctctcagtagacccagagcagctccatatcctgggccttcacacagagccacagcctgccttctcattctgcgcccccttgcacgcccttgttctttgcgactgaagggacctatcctagcctccgaggcgctaaagagtaggctcctctggttcctgctgcctgtttttcttcctcagagagcttgagataaagtcacagaatgggcctgtggcagtgctcttcatttggctccctggctgatgggctggcttggcccttgcgggcgtttgtccattggctggtggtgtggcatgagctagagctgcagctgtggcaaggcctggcctgtctgaacctggctggctacaccccccaccccagaccccctcctgccttggatggactgggcaagccaaggccaggtcacacgccgccttgcctgtcttgtctgcttctgcctcacggtgtgtgccgccctcccggtgtgttgtgtgtctaaccctctctctcgttgctatcactctcctcttcttgctggcgtcatttctctcatcccatctcattggctgccgtagcaataggtaagcggcctctcaagctgctgcccaggtacaggtgggtgggggcctgcccccatcgttttcctgcatcctttttcattccctcaacttgctctggagttggatcctgggcaagaatgggtagcacaattccatggccccttggtacttctccctcctttgtgacttctgaagccatgctggctttgtctaacatctggaggagtcggccctccccactggtgggatcactagcgggaggactgaagaagcagtgtctctttctgtcctggacctgggagcttacagggaagctagataaagctgggaaattagggccagccctgggagtaaggaatatctgtctctaaacctgatgaacctcactttattaaggttacatcagccttaatagttgacttccctatttcttgtggcctttagacactagcccagctcaggcactcttcccatgcctccacagggagtcataagaagggaaccactccagtggtttaggcattggctttctttggagtgtgtgtgtcagacttctgcagaaaggagggtggggctgttagcagctgtggttgatccttatggggtaaggttcacctgggtgctgagcaggccctatgcactcttttccctcaggaggaacgcagtggatgcctttcgggtcaatgttatccatgcccggcagcaggtgcgcagccccgtcaccaacattgctcgcaccagcttcttccacgttaagcggtccaacatttggctggcagcagtcaccaagcagaatgtcaacgctgccatggtcttcgaattcctctataagatgtgtgacgtgatggctgcctactttggcaagatcagcgaggaaaacatcaagaacaattttgtgctcatatatgagctgctggatggtgaggctggcgggctggcacggcagcgggcgtagggtgggaaaaaaccaggctgggcctggcctgaaggtgggtgtaggtccgaggctctggtacactctgaactttctttcctgagtatttggtctcttgggctaggatctctatgcccctcagaaggccagttcacatccagacctgaaggctggtctgaagtagaacacagaaataggccagcaggtgatcttccaaggggctaggaacctgactcaggtttggtggctgaacctcctgtattcatcctctttcctttgtggcttggaccttagttcactaactgtccacccagttttccatctcagcagctgcttcagagcctgggggagagtgagatattacaagcctcttggggtgcactgttatctctgttcctctgtagagtgtgatctaagagaaggtgaatacttccaccttcccaatgtctattttctggagaaaacagctcaaagcttcttgacttgccacccactggccatgtgactcttctattgatttcttttcttttttttttttttttgagacagggtcttgctcttgtcacctatgctgagtgcagtggtgcaattgcagcttactgaagcctcgacctcctaggctcaagcaatcctccagccttagcctcctgagtagctgggaccataggcacatgccaccatgcttggctcatttttactactttttgtagagctgggtctcgctatgttgcccaggctggtcttgaactcctgggctcaagtgattctcccaccttggcctcccgaagtgttgggattacaggcatgagccactgcacctggccttgatttctctatttgaaaaaaatcaaacatttgaattgttttcctgtaaagcacaaatcacagaataaatgctacaaagctagaagactttcttgcggatgatcccacatgggctttgggagctgtgccggtcagatgtgtaggcccaagtaggggctggaatgaagaagctctgtccaggggctgatggttcccttctttttgcagagattctagactttggctacccacagaattccgag

SEQ ID NO: 9969 - DNA, 6000 bp, Homo sapiens
ttggtataactggttgtctggaaacagaatgcctaaaagaaaagcagaactattcatgcctctggcttgagccaggtcataatagggacctgctgggatttctgaagatccctctgttaagcctacagtatctctgggggcatttttgagatactaaggaggaaaggagagaggatgagaggaagagaggagaaagggagcaggatcggggagggagctgctccagccccaggaatctgtacaacttgcacatttcatagaatgcagataacaggtagatgtctcctgaaggtagataacaggtagaatgtctctgtggccagtaaaccgggccaaggcccactcacttctggagaaagcagagctccagttcaccatacatgacatttcacaacattaaaggtcagatggatgactttggcactgctccagcgtctcccaccacacataccagcacattgaagtgtagagcttaccacagcagctttcctgcctcctcctggctccaatgtcttcctgcctaccccatcaatggggcacccccaagtccattgcttcaacttcagtttccgcttttcactctctctctccatgcatcttctcttatgacctgcatctccagccccgtgcagacactctcaagccgggtctccagtgctgccttctctcctcagcacaagacctacctactagaagcccctggtcagccctgcctgggtgttgtttcaaatgaccttgtaaggccagctgacctctttccatcataagcctcctaccatgggcacacccacactctcagccctgcgggacatctgtggtccatgtgcacctcggaatctgcaggtcctaggctgagcctggcctcttccctctctcacatgccaggttcctctgcatgtcactgttcctgccatggatcccgtctcttggtccccaccactcaaccccgtcagctttcccctagttcagaacttgcctggattactccactggtctcttagcaggcttccctgactccactgtttgcccgccaacccactctccatgctgccaacaggtaagttggaccaagacacccaccaatctcttcattcaaccctccaggcagcttctccagagagaagctgcacctctttgcttggcacccaggggccctccaggctgctcttatttcttccacactgtctgtcatcacggcccacctcagaccagtcatgccagactctcctcgtcagcacatcctgggactcttcccatcttctctgacctggctgacattctctcactcccctgccccttctagcagaagcagaactgggcacccctccgtggcagcccctcagcccactacatcctcttccctccgccccattatgtcctcttgcctacgtcccactgcaccctctgccctccaacccactttgtcttcatcttagctgttgattcctgctgctatctcttgcaccacatctgcatttcttaatggagccagtgcccaaccagcctttatctccaatactcgtacacagccttgtacctgttacctctggctgcattaagacgtgcttgtcagactgaagaaggactagccactctatacctcctgcatggtttgcattttttttttttttttgagacggagtctcgctctgttgcccaggctggagtgcagtggtgccatctcggctcactgcaagctctgcgtcccaggttcatgccattctcctgcctcagcctccccagcagctgggactacaggcgcaagccgccacgccgggctaattttttgtatttttagtagagacggggtttcactgtgttagccaggatagtctcgatctcctgaccttgcgatccccccgcctcggcctcccaaagtgctgggattacgggcatgaaccaccacacgtatacattttaaatggagtaagttctgaactcaatgtgtgaagcaaaaatcacatgcaatcaacactgcttaggaaagttcttctaaagttccacacaaagttcatgataactggtttgaggtataccacctctttcccaaagggcacaccacccacaactgtttttcctatagcctcaaaacaaatccctatttcttgaactgatcagcagcaaataaattagttggcttatgtaggaaccatgttttattaaaaacgtgttgctggtttaaaaattttttatagttgatcttttcttaccacagatggtcatgttcacataaatcaagagtacatactatgtacttatatagtacatatataggcagagacttctggtgacctccatctacggcctgccactcccctgattttcatgcccaagacccttcactcctgtatcaacagagaaaaaacctttctagagcatggatgtgtgacaacaggtcgggcagctcaggggaaattaagtaactcctgtatggtgagttgtactaggtctttccccaaaagggcaaggaattctgcactggccactgtggcttggccactttctgggatagaaatgaagcccttccaaggacagttctacgtaaatgatgaggaagtttcagttgtatgaaaaactaggaggaaaagtattctaggcaggggaacagcaagtgaatgagcctttggagtgttggagtaaaaggaagaaggctaggagggtgggtagtgggggagaggaaaatggtgaggaagaggtggagaagggcagtaccagacctgaggacccctgggatcatctagattttactctgtggcagccttaaggaggtcctgagctagggagaaatgtgatctacatttttaaaagatgcttctgataaatggttatgactacttgctaatttgatacattaaaaaaaaatcttgtaattttaacttgcatttttcgtattgaggtaaggtatcttgtcatatgttttggtatcatttctattttatttcgcatgtatgaatcgtgtctttgcccatttgatcttttgtttgttgacctcaggaatctcttacatatttaaagagatgagcctgttgtgataggagtggtatatgtcatatgtgacagtttgtcatatatcttttgactgtttctggtgatttcttttccttgcagattttatttttatatcattaaatatatctttaaaataaacgagaaatacaaactggagagatatttgggtagaaggtccagtaagttgaattttgtttgtgatttgccaaaggtggcttaaattcttttcattaccatttttaaaaatggaataaattagagggtatgtgtctcagaggaatatgcccttgggtaaaggatgtttatatcatgcttttacacattttacgtcttccagacttaagctcatcaaattgcgcgggtggggggcagggggccagaaagggggtgggaggatagagggctcagagtctgagagaaaggaactcctatcttcatcccccaaccccccaaggaggagagtggggcgcagaagaggaaaccaagcggggggaggttagagaacttgcccaaggtcacaccgcgagctggtggtggagacagattcgaacccaagcctgactccagaactgagaactctccaccttctcgcgacagcggtacagaaaagtgccctcctctccttcctgccggcagccgtctgcgcttggccatgggccggcgggagcagccactcccccggttctcccgccagtcagaggtcgggggctcggcgtccccttctggcttggagcccctggcgcgtacagagcgaccagggcggacacatttgccgcgctcaagtctctgaccccctccctccttcccagagccctgcgcctagggtttcctgagctcccaaccccctcccttcccgagcatagacaagtttgtattcaagcaaggccaggactggtccctgagtcgctctcgggccaggcgaccagcctcactgccccagagtcaggaataaacggtaacaacagccaccggtgcctattgcgtgacccgtgctttacttccacctctccgaataccccggacgaacagacccccaggaattattgtccccattacacggacgacggaactgctgcagcttcggaaagttggataacaagcttgggctcgcaaagctaataataatactagctaacatatgattgagtgtttcctgtgtgcccagcacatgtctacctacgaacaccatcccatagatctttccaatacccctataaaatgtgcacaattatcattcccatcctacggatgaggaaacaggtttggcgccctgtccaaggtcactcagccagtgagtgacggatcctggatccaaaccaaagcgggtgaatcggatggcagttttttgtgcgttgtccgctacgcagagaagcaaagggcttagaacccatgataccaaaggccgggccccaaacgccccagggctgcgcgcaaatcaaccatctcgaactgccacaacctgcagagaggaattctcagggactgggacgtcaggagcgccagctgtgtcgagtgctggcccgcacaaagtccgtgcagccggatctcggctcccggcccccgcgcgcccctcaccaggagctggagagtacttaccataaaagagagggcaagcgcctgttcgggaagaatccccagcgctggcaggtcctggactccctggagaggggtctgctgccgccgccgcccactcaggggcgcccgagtgacccgcaaatgccggctctctccgcacggccaggggcgcgtcctcacggctgatgcccggcagcagcgccccctctgcgctgcaggatggcctggagttaggagcgttcttggcgaagttggcgctcaggcgccgggggtcgggcctggagtggggaagcgccttactgaagcgatcctgggggcgctccaaggcccgcgctctagccgcttggaagcttggcgcctgacccggagggcgacgagtcccgcgctcagggcgcacgggccgcgcctcggccgctggcccccggcgcgccgggcgtcttccccagcgccctgagcgcacgcagcggtagcagcagctggggcccgggcccgggatgtggtgtgttcatcgccctcccctggggctgggtgcttttgtgcgcggggcgcgccggccgccacggccagctctggatgctgcagccgccgccgcctccccctcctccgccgccgccgcccgctccccgccttcccggccggcccggaggctgcagctgaaagccgatctggctgagctcatccctgaaggccactaatccaatagccgcggaaggcgcggtcgccgggaacgccccttcccccaccatcccgcgccccggccgtcccagctcgggccgctgccggcgccgccaccttctcgaggccaccagctggcgggagagggaagtggagcccgcgcccgcgcccctgtgccaaggcggcggcgcggtcgccattcactcacccgcccactcgcccgctcactccctagctctcgcattcattcctgcgcgcgggtcctcccggattcattcaagcgctcctggagcgccagggtgggtgcccctgacggggaggagacacccagtcactaggcagctttggtgcctttactcaacgcacgtgggaaatagcagccaggaggaaaaaagggtggtttattatcccccttcctcagacacacacgtccacactttatttttgagatcaggctccaactcatctcttaaagtccaatttcataccgcacctgctcaaggagcgttccccgcccacccgaggcgcaggaagtcggtctctttgctctaccagcgctgatggtgggccgcctcattgggagcctgaactgagcgatggggtaaagggcgtggccaaaacagaagcctcgagggtgcttctggtatctgcgcttccttggggaaattgaaagttcttggtttggtggccctcgtctgtgctcccagaattgactttaggtccattacgcagtcatttgct

SEQ ID NO: 9970 - DNA, 6000 bp, Homo sapiens
aagggaggtgttgaattccagccttccccattgacccttgccaggaggctcaagatacccctaaccaggagagggggagaattaataacccttcccttggatgtgatgccagcacccaggcagaaactcctggaaactccagaacttgccgttccacccatctgccctagggcactagttccactgacccttagataccaccctcagaaccattcctggtggctggcctcgtgggcagtctggcagacacccagctgaccttcccatcccggaggtgcctcagctatggagggaagattcttagagcctttgggttatcattctgatggcagagtgggtcctaaaccaatctctggggagtcccaggctctgcatggtgaaggggaaacataggattctgggggaggagtctaggtggtacggtgaggagtcagcctgctgcggaagggtagagggcatgagccaaggccaaacccagagtgacctttcctctctcctctggccccaggcaactggccctgaaggcactcaatgagcggctgaagagagtggaagaccagtccatctggcccagcatggatgatgatgaagaggagtctggggccaaggtggacagccccctgccctcagacaaagctcccacacccccagggaagggggctgccccagaatccagtctaatcaccttcgaggcagctcccccgacgctgtaactccagaccaccttgagtgtggcacctcccctcccaagccccccttgacatcctctcagctactccagggcacctgactgctctgaggagagggaagaaggcctgctggggctttccatggccttctgctgtttctcgccaacactacccaggactcttgctacctggttccaactccagacaaccactatgccaggcccggagcctctgaggcatcggccagtccaggccctcatctgaggtaagaatgtacatcagctggcagccccaagcaagtggctgcagggacactgatgccacagctcctgggccggccctcacatctgaaactggttgccgagagccctgagccaaggcaaggatttgccaaaaatgttctgggggcccagcaaatgcaggagccgacctggggctgcacatccctgcccatccccagaaagactgttcctgtcaggatttgtttccctctgctgtggcggtgactgcttctggaccagaacagctccagctcccaggtattttctacaggaccacttgagtgggcagccaagcccaggctcgcagtatcaataaagcagttctctgaggaatgactcctgggctcttgtcaggccaccttgtgcagccccctcatcacgttcaactgcaatgttagacagggacttgattgtctccatggtaactccagctggataagaagcccattgccccagctccccaccaccgccaccaccaccaccacatgcgcactgccaagcagccttccaagagctattgcctcagactcttactccttttttctttccctccaaaccccaatctgggaggccttctgtccctgcctagatctgatgataagggcctctccatcataaggcgctgttcttacccatggtttatctctaagacagaatgctcagttcttgccacccctggagacaactcacccccagctcccagttattgtatgtatctaacccccacagtctggagactccagcacagtagacagttggggggacagaaaggacacacagctgtaccattcacagctacagctctagggcctgccagggcccggagtggcctgggaggctcagcagctagaccctggggatttgtgtgctaggagagcttcagcccctcagggagcagccaggggtcgggggtggggggtccccatcttgcccagctgcccattttcctgtgctgatggcattaacaagaaccatccccaactctgggctgcttctcccatcaatcttttcagtcattttttacaaattttttacttttttctctcctaaaatttctgaacatacagtacaagtatgagctgccttgcaggagaggcagtcttgcagccccagcttcatccagacacatgatgcctatgttcctctgggatgacagagaaaggggaaggaaatgggaggcactccagcatgaggagcaggaattcacacacgggcctccaaatgcccaactgtcccagtgcctgaggtgtcccctgactcagctgagagagttcaacaggtccctaggcccagctcctacatggaggggcaaatccaggcttcccctaggctgggaagagctcatggttggatcctcttgcggtataggtaggcattgctcacctggttcataatgaccaagctggtgaggacagggcataatacagccaggtaccaggctgcaccagtgacagaggcagtgaaccagagtgagcacatgcccagcaagaggctggcactacccagcaggtagcccaccagcccagaagtagcatggtatagcttgagcttcgccaggggccatcggggcagcagcttggggtagagcagccccaccccacctgagcactgcagccctgcccacagcacagccagcagccctgcctgcccatgccgcgtaaccaggtgggctttgccaagctgctctttgtggaggatgacaaggccgaggcccagcagtgcacacagcagggccagcagctgcagcacccagtggcagcgtgctcggcctttccgtgagagggagtgcagcagcgaactctcaggagaaaacaccagtagtgcctcggtcatcaggaaggagaactgaggaaacaggggatgggaagctcaagtgagggtgctgccccagaagaggagaagagggctttatgtaacccttagctgccagtgagtctgggctgattcccctttttctttctctccccactgacaagactatccatttggtggggcaagagtggaaaaccccatctgggatgatatatgtgccctgaataatctccacacttcctcctaggtgccagtctgaaatgtcatctgtcgtatgttaccaagcaaacacagggtttgagatgtggcagttataaatgattcacaagctttgtttccctaacgtggggctggatacaatttcttggcaagagctggccacatgggtgcactgtttcagggaaagttaggtgcatcaccagaaattaaagtaaaaagggacagaggtacatccaaatgcaatgtctcagctttctgcctagaggtgggtgaagcctcattgtgcttagacaaatcttacccatttgacctgggtcctgggtcttcattactctgattcaagtctctttttttttttttttttttttttggagatagtctctctctgtcacccaggctggagtgcagtggcctgatctcggctcactgcaatctccgccttccgggttcaagcaattctcctgcctcaggctcctgagtaactgggattacaggcacctgccaccacacccagctaatttttggttttttggggggtttttttgtttttgggtttttttttttttttgggacagagcctcgctctgtcgcctaggttagaggttagagtgcagtggcgcaatcttggctcactgcaacctccgtctcctgggttcatgcgattctcctgcctcagcctcccgagtagctgggactacaggcgcgtgccaccatgcccggctaattttttgtatttttagtagagacggggtttcaccatgttggccaagatggtctcgatctcctgacctcaggtgatgtgcccgcctcggcctctaagtgctgggattacaggcatgagccaccgtgcccagcctcaagtctgaaatatataccatgggcaggagtagttggagcatgcaactcttccaaacagatattaaatgtggacaaagattcagaggctgccagggccaccaaccatgcccatgctcccacccctaagaactgcccaggcccactacttacagccaaagacataagcaccgggtgccaggagaacaggcctggaatgagaagaggaggcctcatggggctgaggcaagaagaaaccagccataccaatccttaagggttgaggaataccagcagcccatcacccaaggaggtgctgccaaactgtgagccccttcttgctctgcaacaagctgaccccacacctatcctctcttcctggcctcttcctggatcagaggccatgctttgccactcctctggcagtcctccctccttcccttacacctcctgagaggcagccaaatggagcacccagagaaggaaagacaaaccaggaattctgtgtgccctggccatacctacctgctccacctcactcatcgctccagcacagaattccctcaaccagccaggcctgttcccggaagtcccactgcccttcctccccaggaacagtggcccttcccttcccagaagtcagctatgaattctacttactggagccaggcctggcaagcacagccacaaagatggtaaagcccagggccacaaggtgggcggcagcgccagaagcagtacgcagagctcggtagatgtgtgactcggtctccgcagaaagggccatcgtcagccgtgctagtggttgtagcctgaaagcatagtagcgtgggccaggatctcaggtgcccactgttcactcctcactggagaaaaggctgcaaggcaggaatgccaccctcttccaataagttatggtaggaaagaacagtaccaagaccagcaccaggaatggtcacaacatgccagtcgacggccggcggcctgtcaacgtgtacccatgtctgaactggtaccaatcgctggcccgccttccaggtaggaggcgcaaagccatgtaagactacaaatcccagcgtgtaccacgccgtcgccggcagtagagccagctgggagggcgcggagcactatggaaattgtagttccctgctgcggtcccagttacagcgtgaatcccttagcgcaccgcctccccaagtgctgccagcatgctgcccctccacgctagggacttgcctgcctctgccgcagcgcagatctgatgcggtggtttcctccaaagaaagcgggatactccgggccctgccgcgcgcaccgccgctccgtcacggagccgctttacttccgggtgcgacgtctacccacccaggacttcctgggacgagccgtcccccgccccagccacgcctctgagtcgcgctgcgcaggcgccattgggcagagggattggcaagcttgcgtgccccagcgacacaggcctcgaggctgtctctgacaagtgttcacaggaggtggggacgcctctgcgcgaggaacgaggagctacgggcctgggcccggttattgccatgggcagcggctgccgcatcgaatgcatattcttcagcgagttccaccccacgctgggacccaagatcacctatcaggtgccacccgggctcgcgggactgggcgggaagagggacgttctcgagagctcaactggctgcctgaaggcagtagtttcccgtgctgcacgcaggcatgctgcttcattcgcagacaactgtgaggctagaggatagtcagacccaggcccccggctcccaatgtggcagggaagacatacgtcacattggcagtgtttgtaggatatcgggctgtagggatccggttggggggttccaggtcccacagaaggtgagttgggtgacccatgagtatccctgaactgagtgaagagtaaatgatgcataggaagtttaggtaaggcaggagaaagtgttccaggtagagggaacagcatatgcagaagccaggaaggaggtgagatcatagcgtatgtttggaaacagaaagaagtaataggcctgagtggatgggagagaggggaacgctggagaagaggacttgggcttggggggcatgaggaggtcaccatttgtactacacccagtacagatgtc

SEQ ID NO: 9971 - DNA, 6000 bp, Homo sapiens
tataaaagagtgacataaaattgataagaggccacactttgttaggggttctaagggtacaggaggttgtagtgttgcattcaaagagacagtagagagtaaaagaagtcacacaatgtgttgcaggaagtcagggaccccaaacagagggactggctggagtcacagcagaggaacataaattgtgaagatttcactttaatatggacacatatcagttcccaaaattaatagttttataatttcttacacctgtctttactgcaatctctgaacataaattgtgaagatttcatggacatttatcagttcccaaaattaatacttttataacttcttatgcctgtctttaatctcttaatcctgttatcttcgtaagctgagaatgtacatcacctcaggaccactattgtgttaaactgtacaaattgattgtaaaacatgtgtgcttgaacaatgtgaaatcactgcaccttgaaaaagaacggagtaacagcaattttcagggaacaagggaagacaactgtaaggtctgactgcctgtggggttgggaaaaaagagccatatttttcttcttgcagagagcctataaacagatgtgcaagtaggagagatatcgctaaattcttttcctagcaaggaatataatattaagaccctaggaaaagaattgcattcctggggggaggtctacaaatggccactccgggagtgtctgtcctatgtggttgagataaggactgagatatgccctggtctcctgcagtaccctcaggcttactaggattgggaaacaccagccctggtaaatttgaggtcagaccggttctctgctctcgaaccctgttttctgttaagatgtttatcaagacaatacgtgcaccgctgaatatagacccttatcaggagtttctgattttgctctggtcctgtttcctcagaagcatgtgatctttgctctgccttttgccctttgaagcaggtgatctttgtgacctactccctgttcatacacaccttccccttttgaaatccctaataaaaacttgcaggttttgcagctcaggtgggcatcacggatctactgatatgtgatgtcatccccagcggcccagctgtaaaattcttctctttgtattctttctctttattgctcagactggccgacacttagggaaaatataaagaatctatgttgaaatattgggggcgggttcccctgataacaatgtttccctctaagctggtggctactctggcagtttgccctaaaaaatggaagacttgggccataaagctacaggaagagactgtttagctggcaggttatcatatggacaaggattactaccagtagcagtagtctgcagaattgtgtaccacagctctctactgttgggtacaagataggctgcactatccgaccttcttgtcatgattctttggagccacacaactaatcctggttaattctttgtgaggccatatgatgtatggcatttctgggccatagcatttaaatgtctgcatgaaaccctccagagtgatctttatttttgccataacaacatgaaacattcaagatggcaactgttccattagccagggacctggagtgacagacatggaacagaccagctgaactgcaatggattcaaaccataaccaagaaaacgtttgctgttacaggccactaaaaaattggaattgttactccagcacattgcctatcttgactgataaacaaatttgttctgtttggctgcaactggcaggacgaagactaacggttggaagtttcaggaagactaattctgtgcaatataaggtaaaaaaatatatataaggtaaaaacataataaagtatataaagatgaaatacttttgaaattatccattcacttgcacaatatatagtgaactctattctctggtaagtacggtataggtaaaaatccttgccttaatggcggtaagtagtaagttccccttcacacccaaaatatctgcattgaatggcctctaaagatttgacagaacaaattaactttaaaaataccttccaacctagagctttaggatctctgattcctctggtcttaagagaaaaatatgtacatatatatatatattttttcttcctcaagtatttctttgattcaaaccactaactgatccattgtcttttcacattttgatgtcttttttccagcaaataacttccttcaaggccaatgctgttttatcctttcccttgatctttcttctaatatttagtaggcaatattttattgtctattcttttaaggaaataaccagtgcagcttttgataccagctactattattggccatttgatatgttccagatttgtctttcagtcatttaagtcacatttggacttgttaaaaaaatctagtagcacaaatgtattattgtgttagttcatttgaggtgctacaacaaattatctttgactgggtaatttataagcaacagaaatttattgctcacagttctggaagctgaggagtccaagattacagcaccagcagattcagtatctggtgaaggctcactccttgcttcacagatggcacttttgttgctgtgtcctcacacagtggaaggggcaaggtagctagattcagcctgtcttacaaaggcactcctgtcactcatgagggttgaagccttcatgacttaatcacttcccaaaggccctacttcttaataccatcacttttgatattaggttctaacacatgaaccccaatattgggggaacactaacattcagaccatagcaactaaccaaataatccagattaaatgcccctttcttctgaaaaatgatcttagccttgtgctatgaaatttgtggccaactacaatattttattaacatctgagctgtaaggcttaagagtttatcaaactatgtcatttaatgcactgcacccagaattgcataattctgtattctaacagagcccatgtgctttctatacaagactattgggaggaaaaagcaaattcaaaaaatgaggggcaaaatggtctcggttcaactcagaggagcatatcatactttcagttataggggcttggctgataacttggggaagcagatgagtatataagagtgtaagaaagaaaaaaaaaccttttttaaaaatttcaaatttctgttcagcttcatttcaggctttcagaattggaaaatcaactgcctgctacaataaattactgttaagcagtaattaaataccgagaatgtatttttttccattccaaacctgatgtctttctcagacacagatattgttactggttaggaaatgcagcattttggtaaattaaggcaggaggatttaatgtctcctgggacctgtggggacagaaagtgatccaagaaggaaaacgttttactatgttttgctcattataatcatttatacctttttgctttgctttacaaaactaggagttgtggtgggcacttgtatctttaaaaaggagggttggttccctaaaagaaccctaattcataattttaaaaaattcctatatgtttggaattgtggtctcggcataaaatgatgatcaactgaaaaaagatgaataacttccagtgaattcaataaccatggatgaggggaaaaaagcagcatgaatacatgctgtattctcctttatttagaaaaagcacacaaaaatacagcagagttgatgtgtttgtcaccagggcttgaaagtcgaatcaaccactgtgtaaaagataaaataagactgcacggatatcaggattttcccagcgtgctttattcatagccatctgacacaacaggacctaacagagcttttaggaaaaactgaattctcagcccacaatcactttccaggaacttccctgcaaacagtgctgtgcgctggcaggatggaaatcttagcaatctccctcctgcttccatagtttcctcctctctaaataaaattatttatggggacttaatgagagagcaagccttgtgtgaaaggaattcaagaaagtgcggcttctaaaaatacacctaggcagctctacagtccttattgttacaacctgacgttttgcagttcatgccatgaacctaactacacttcttgccaaatacacacaagcgtacaaagaagaggaaaagtaaaaactatgttactatgttttatctttctgcaatccctttgagtaaacagtagtaattttctgttgacatactcaatgcaaatttcccaaaggctacacaatacaaaacaaaagacctgttagcttcctcagagctggggggaggagaggcagggggagagaaataaagttgatggagctccagtttctcctaagcctgcagtcctgagcctccagtcaccctagtctttttgtagagattttttgagtttcagtctccacttgggaaggttccttggccccttctctcccaatgtcaataaaaccctcatctctcccgctttgcccccagctttttggggaaattggaccttgcctaggcgtcttgttccagtgggttgaaaagtacagctggtgatgtgaggataaatatttaaactaatgggctgggtcacagcgtgggggtcttcaagagagggcctcctcctccttccgccacgtgctcctcacttggggtgcagggctcctggacaaggggctaagacggacgagggtgggatgaagggagatggacagaccagactgtaagtgaaggaggccctctaggaaacatcgtctcgaccgaacattgacggagaaaaaaaaaatggcccaaatgcccctagtggggaagcatacaccccacgcaggctgggttggggtgggggtgcttcgcggcctctcacctgacttcctcctccgcctgcacacacactacagtaaccccctctactcaccccccaaaacccagccaaacaacaagcaacaagaggaagccgcaggcgacaagaggaggagtgcgcgtgttgggggcccccggagaggtgagggggcagggttggcgggcgacgagaaccgcgccgcgcaccccaagcgcacccccaagcgcccacacttacccctcgaggctgagggtcctgtcttccgcgccaacccccgtgtgcgccccctggcccgccctcgcccctccggcccgccgccccccacaccccggccggcgcgctgggagggagcccgggagcggtgcgcagcagcggcggcggcggcggcggctcgggctcggctcggctcgggcttcagtgcgcctagtgtcgccagcggccgccgaggctcccaccgccagggggagaagccgggcgggcgctggggaggcgggccgggccctggccgccccgctggccagcccgcgccgcacaagctccgaagcggcggctacgcggggtccgccgagcccccgggcgcagcgtgcccggtccgaagcgccacgtctggatgcgcgtcccgggtggctgcgggctcccgcgggggacgccccggccgctccggtgcgcctccagactgcaggcgccgcgaccgacgagacgagagcagctcccgccggccccttccccctcccgcccccgccgccgccccctcccccttctcccccccccgcccgttaacatctcctccctccccctccttctcttccttcccttggccccgcgcgctcgctcgctcgctcctcgcctcgctctcccctttaaacgcccacttcgtatggggaaagaggacaacttgaagtcaagttgcaattaacttccgcggcagccgcagctccggcggcggcggcggcggcaggagaggcagaagccgccgcctcggaagtccgacgccggcgcgcccgcccggggagccgttcttggtttcaggcccgcactcgacagccaccgccgcccccaacgtccatgcctgagtgagttctgctcttttgcctcccttttccccttgctactcttgctgttttatctctgtc

SEQ ID NO: 9972 - DNA, 6000 bp, Homo sapiens
cggcagggtgataggagagacgcaaggtgtgcagggtcatgaccagtgagtcacttggggcaggtcaggtcagcaagagacaagagtcacacttggaggagaccatggagatagagagtgccaactctcagtgacaggcactgagaccctgaggcccaaccatttcatcccaacatgtgtttgagaagccacctgcttgctcacagaagtagtttcaacattttctctccaatttgggtcaaatgcctcatttagtaaagaaactctgcttttctaaaatatgaagtgaactaatttctgttcagctttttataaattttcaatcatgaggtccaaattaaaatgcttttcaaagtatgactaaagttgcaagctgtgatacatgattggttaaattttatttttcacattttaagaaaataattccatatgtttttgccagctcattgaactatcttggcaatgaatagatcagtatatctaggaatgattgataccatatgattcttgggtatcatattttgatgatattctgcaatgtttcaaattaccgaaacagaaacccacccacacacactgaggctcaaaatttgcagtttttgtcttgatggctacatttagagtttaaacatcatcattaaaattttacaggtgacatatcaagaaaaattaagcccactagttgtgtctctttgaagggaaaacattccttcattataatgaatgaaattgtatgctaggtatgaatgctggtgacctctagaaaatgaaccactgacccataagtggatgagaatcagccagagtaaatgaggcagaagttttcccagcgtaactgggcatgctggcagggcagattcttgttataattaaaagagatagagtggtcaatagggaacatttaataggaacaaacatgactacattgccaaactatttttctggtccatttttcattctcatgttatgccatatatctgggttttaaaagtgacacaagcattgcacatgaaactaacacacatacaagtgtacagcagaacccaggaaaaattcaattaaaatatgaacaccatcaatcaccaacttgttcagagcaaatccccatctaaatctgtactgaccaatacagtagccataaaaatgagcatgtgaccctatgcaaatcagacatcccctcctccagacactgcatatattcctggctggtgtctaccatacttagggacctcctcttttggctttggagcgccccacccccgcgtctctgtacaggggagccattttcttctgccttctcttttctttcttgcctattaaactctctgctccataaaaccacacacaaaaaaatgagcatgtgaaatgtggctagactgaattagatgtaatgtaaatgtaaaatacactctagatttccaagacagcgtcaagaaaaaaaaaaacaatgtaaaacatctcaataaatttttaattatatgttaaaatgataatattttggatatcttgggtttaaaaaaatcattaaaattaatttcatctattcctttttacttttgttttctaatatggctactaggacatttaaaagtacatatgtggcttgtggcttgtaatatatatatatatatatatatttttttttttttttttttttttttttttttgagacagagtcttgctctgtcaccaaggctggagtgcagtggcgagatctcggctcactgcaagctccacctcccgggttcgtgccattctcctgcctcagcctcccaagtagctgggactacaggcgcccccgccacgcccggctaattttttgtatttttagtagagacgggatttcaccaggttagccaggatggtctcgatctcctgaccctgtgtcctcccaaagtgttggcctcccaaaagttgggattacaggcgtgagccactgcacccggcctgcttatagtatatttttattggccagtgctgatataaatgaaacatttaggtatgcaaaatagtgtttatccacctaacagaactgaaatataaattcctattaattgataataacatgacaacacaaagaaaacttgccatgagaccagcctggcccacatggtgaaaccctgtctttactaaaaatacaaaaaaaaaattagctgggcatggtggtgcacgcctgtagtcccagctacttgggaggctgaggcaggagaatcgcttgaacccaggaggggtagttgcagtgagccgaaaaaactggccacgaagtgattgttaccttgataagttaccttttccattcctcttacactggtaagattctgtgaattcaaatgtttgcttaataactttctaaaggcacaataagaaagaagacattctgggaaatgaattgtgcactaattgtaagttgagctctggaagaaacagaaaagagtcatccacctgagctctctggaggtccctgctttttgctccaaggaagccactactgagaaagtaaggttagatcttttattcatttatatgaacagggcttatacatttctatcaggaagaatatcagaggattctcatccaagcaaacgttgatgaaacatcattgacagggtaatgacattctgaatggaaaaaacgtgaaccacaaagctgcgttgcaatgggagtgtaaactttgagggtgcaatgtgtcccaaaggcatgttgattagaaagttttaacactgagaggggtgtttatttaaatgaatattatcctctttggggagtccattggatctatttattttggttttcccaactctgtctcatgctgcattgaaaaagatacttttatgcttaggaaaaaaaaaaaagctctactgtaagtattcttagctgggcctcaccaaaatgaatgagatttttaacatgtatagtatatacagtacacttaatatgtatagtctattgtatattgatggagctgtcactgcagaatgaacaagtaaatggaagattttcttcactaggctagggggagaatgtcaggggtatctgggagctaatgaaattctgtgagataagtgagggtactgtttaaaccccaccagttctgcaagtcctcacagaaagcaaaaggaggggcacccaattagaacaacttcatccttagacaggacaagcataggacacaaccacaaaaatcattcgctaaaccccagaagaatgtggctgtgtaaggattaaatgagacaaagcatataaagtgcttagtatgtagtaagtgttcagaaaacatcttattattgttttgaaacatgtcctatggcatgagtaaagtttatctccatttcactgtagaaaatgtaaaggctccagaaaattcaccagtaccttctccgcttttgtctaaattcatctgtgagaagctttactcacgctttggctgccggtgactcacggttaaatcatctctctcaacttttttccttttcggttttttaatacagttgcatatcacatgacattctgctttgttttcttccttccccttccccaggaaaactaagcaactctaacagccccattaccttaatgaataaaagccattcagtgaaaagaactggtatccacttcatcaattaaaaagctaacaaccaattcttggaaattttctggagccctatgaaaattcatatcacttagtaacctatgtgagctgaaggttggtgtccaatgactgctaagaagatataaggaatgttgcagaaatataaatagaccagcactgaaatttaattaggcactgcatatgttaataataaattcaattaatttagccttctacctatactagaaagaaaaaaaaaacctgggcaaaataataattcattttaaatgcttcagttggtaacctcctttcctgaagagtgatttatgcagtaatttactgactgtgtcttcataaggttgttccaaaccagcccttctgaaataataataacttctgaatgtgtgttgtaagagatataacaaatgacttcctattaattttcatttaatgagttgcctattcacatggtaatttttaaaaattctcttcttaagataaacaggttataaatactgtggattacacttccatttcacaaaaatcacaacaagaaaatctctctcatattctctacatgatttgcaggtcaatcagtttaaaatgttctatactaaataggcatccatttctttcccagttagcacagcagatcattttaaatttctatagccaaatgattccaaattagttaaaaatgaaaactgaatatttagcagcaggaaaggtcttagcaggaataatgggagggagtggggagcaggaaacaaaatcatgagaaaggtggcaacctggttaaatacggagcccatgaccttggttctttttataaagaacaaaaagcataaagatcattctttacagctttcctatttccccaagtttacttttttaaaaagactccataattttttacataaatattaatacttaagcatcttaattgccaatatttccaaaaaccttaattatgtaacaatgaattaactctatattataataaaaagcaagtataaaataataaaaactaggaagaagaaattgctcagagtcataggtttttcatatggttcacaccgatttaaaaagtcctgcagtaaacacggcaaaattctcaaatataattcctcgcaacactgggaagagtctgcctaaagcattaaataactcaaatgcaattgctacttacatgagaaccgaaagggccttgctcccaacccacactgcctcacaccctctccgtggaaaagcccgtactgcatttcacccataaacttgtccagctcctgccctgaggcattgacgagcagagctcccgttttgcagaggacagtggctttgatccacaacggtgtccccaaggctgtcacaactccgagggcacatgcaaaactgaacactccggccatgcaaaaaatgattttcttctgttggcttggcatgatgagaaacggcttctgtgagggcgaggttcaaaaacaagacctttgtgagcaatgggaagggactgcctctttgactgcatttattacggaagctgaacggacagctcccagctgaaaaggcaacttcaccatcgacggttctcgccaggttaaatgtcagtagatgaaggcctcatcatcactcatacttggcttttctccttttctgctgcttcttctccctaattggaaatctttggactaagaatctgtaaaacaagtctttcaaactgccttcaagtatctcctctgtgtcacttggtaacaaaggtcgaagataacagatggagtcctcagtgtaacttgataaatgtttcccttcctcagccttttgtctgattgggtgagttgaaactttcagaaacaggcttgaatctgatggtacattttcagcaacttgagaagttcacttatcgatgtttttatttttgttttttgtttgttattgtttttggtggtgggggaaggagctttagcagaggtagggagaacatatgtacctgtattgatagttgatgtcaaaaatttttaattacagcaggataaaaatattaaacagaatttggtcctacacgaatattaagtgctctggatcaaccatgggtccttgtccttccaacttaatttctcccagatccatggtttatacctaatgtatcaatagagaatttgattcaaatttttcttggcatacagaaatatgaaaatgcaggagcagatatctagatttctaaatgctttcctttaacaggcttagctgctttaggataatagcaagggaatgtgtttctgggtccaaggaataccaggatctgtaaagataagggcatattgatggaaagagggatggtggtcagataggtgactctatggattcatcataaaaatgcacaggtctcagcaaaggtaatctgtttgggagactag

SEQ ID NO: 9973 - DNA, 6000 bp, Homo sapiens
acatgctgaatggaaatcaagatttaaaaagaacaaacaacgtgtcactgtaaaagcaaagtgttaaagcaacagcccagtagcaatgtaatcccagcactctgggaggccgaggtgggcagagcacctgaggtcaggagttcaagaccaccctggccaacatggcggcactccgtctccacaaaattacaaaaattagctaggcatagtggcacgtgcctgtagactcagctactcaggaggctgaggcaggagaatcgcttgaacctgggaagtagaggttgcaatgagctaggatctcactactgcactccagcctgggtgacagagtgagactccatctcaaaaaaagaaaagaagtctccaggaaaaggcagggagacaagggagtaggagaggctcctgagtaactactctagggcattttaagtgatctcacgtgaatgccaaggaagttactttcaatcagcacacaggtgtataactgattctactctgttaacttgggagctgtttagaatagaaaggcaaatctgaaagggctgtttgttttgctgcattaaatcatcagcattcgctggatcgcttcatgtaaacaacaacataatcttttattcagtgaaaacaggtccataattaatgggagatactcaaagcttcactatggaatagtcacttttcccacatcagccaacccttcctatgacctttcttctttcagcaacaacagcaacttcccctatttccaaaaggccctgtttatgcctatctttattagtgttttaagtccatcaaccctcaaatgtgaacactgtttagaaggaaacatcaaagattttattccataactgtgtcaaaggaacccagtttagagactgggtaaagattcttcattttcaaacatgatacatgagggagagggaaaaaaaacctgtacaatctcacaccctgtaaagagaaagattgctgatttccaaatattacttttgccttttcctaaggccataacggatgcccatcagaactaaagcccgcacatgcaaataaaataagagacagcttagagggagattcatgattcacccgacattaatcatggagcctccaattctgacacatccaaggtacacagctgagcttatccatctgaactgtttccaatggcagcatcctagatataatgtaattacaatacaaaacatatcaaaaccagagtttcactctgagggccgaaagacaaaaatcaattaaaaaaaaaatctgctgagcttgagaatgtaaactagataaaaggttaacactctgaagtaacatattttatactgtgtcagaggcaattaaattcccagtgattggagatatgtatcagagtttgaatgaactatgtgtaggatttgctttaaaataataaggtgttggggaggaagagatgagagaagattgagttgtgagtgttgaagttgggtgggggatccattatattttgctatttttgtaaacgtttctacagtgctttataaagatgtatatagcaatgtaatatgcctaatatcatgtttggtaacactcttagctttgcacttggaaagcatcacttgaagcattattaaccctgaatggatcccaaacctgccacactgctgttcaaagactaaaatccactgtttccaatccactgggaaaaagctcatgccagggctgtgtttccaaaaccctgcccaaactacagctaacccatatcctgaacaggagctgagaactcaaatgcaactgaagagttatgctgagttatgattctgagaggaaacacaaaaatactaaataaaaagggattttggctaagacctcacaaggacgaccctactccaaaacagaagcatttttatccctcatgtcaaacagataagcgctttcgaggtcatagcaggcaagaagtaggggtcccaaggctaactccagcccccagcgggtttcgagaaagccaggagcagcatcgccaggccgaggccgccgcctcgcgccaaggcgcgtctgcagccccagagcctgggaacccgggcacgcgcgccccatccctgaggcgtggaggtggccgaggccgaccagtgtggaggtggcaggagccccaccagtggctcgggggcgccccctgaggtccagcggcgtcgcggcaacctcggaaaacgaaaagccagcgtctcccagagctctgatattttaactttaccttgctccaaagcctgctgctccctctcgggctgcacttttccaaaccaaaccgccctcttccctgcgcctcccaccactgtcctttccctttcccacacccctcggctcccggaccaggaaaggggctatttacctcgcagcgtgggcgcgaaaagaaaatgagaagacgaaaatggtccaagccccacgaaggctggttccctggcagtcccattttggatctcaagcttcctcacacaccagggaaaagaaaaccacggtcagcccactgactgcatccccgagcgcaagaaggacagaagtggaattggaaattcctctaatttgcaaggcagccctccacgacctcccactgcacccattaaagagtggccctcacaaagctcaacccctgtgtgcacctgagcccgctcagtcgtcaagtccgtggtaaagcaggggagactagaaaggagagatgattaacccaaatactgagcagtgatcttttagtgaatgaaggcagctgtttctaaggggagatgtccccatggcctacactaccgtagaggccgtagaggcaggactccagtgggcaaaccccaggccccagtgtcctaccgtagaggcaggactccagtgggcaaaccccagggtgagtgtggacgcacgtcctagctcggcctccgagctgcgtttctgggctggagctccgtgccgctccgcgggcaggaggatgcgcagagagaaaagggggtgcagaataccagacggtgttttccctttctgcccctcgaggccatccccgattctgcaaagggggcattcgctgccagtcccccgaggggatccccaagggcgacgagggctcccgcgcgccctgctccgggtcgcacgacgggactaagggacccgctgcaccaaaaacgggcgctccagccgcccgaggacaggcgtctgtaaccaggcagagcggagacctcggggcacattcctctttttcttgattcagataacctccacctccgggtatgcaggagttgatggatgagagggcagaaaaacggggaattctctgtccttaggggagcgagggatgaaaagcaaatcaccccttcttccagcccttccccgggctagggcaggacttggcctccaccccaagggacagctacgagggagctcggggctgctgcccgggggacctgcaagagaggagagggaggcagctggcctctgccctccccaggggagagaggagggggaactgccagctgagagctggaagtggagggtcgccgagccgcacaccgttacgtgcggtgatttattcttatcaacggccagtattgttcctgtcttaacctggccagaaaggagcgagactgggtctgccagccgcgaacagcctgcaaaagggcaaagatgaaggtaggcagggcgcgcgagacaggaaaaaaatcagccccggcgcgaacagcaacccggccgccgaaaccgccccggccgccgaaaccgcccccgccccctccccgcgtccagacccaggcaatccaatcgagcagagcagcggagggaaagggccacgggccggggctaggggagacacggatctctccgaaaccgcctgcgccctgccgtctcactgcgcccaaggaggctgcctcacgccggcaccgaagtgctgcccgcgccccagcccccagagagagggaggacgcccccgacccagaacgcaggctgctccccacacatcctcagtcctccgcagccagcctccgacttccattccccgaaacctagccctcccaaagggatggagaacagcaaagcaaacccccaccttctgagttccttcaatacccgccagagcgagggggctcatcccgggccccccaaacccacagaagcatcctttccatggcctcagtctccccaaccgccccacaactcgagttctcccgatcggcgacgagtcagcaaagcaagtccccctttctcccgattccagctccccaggacccccaaaagggagcgggagcagacccccgcgtcccccagccccctccccggccagcccctgcctccaccttcctcgaccactagcctgcctccctaaacatcatccaagccagcggagcaatccttttctcctatccgggcgccgggccaccctccaccctctccagggtctcccggacgggcgccggagctccgcgcccaggcgacaactccgcatccccaacgcgcgccggccggggccgcatcccctcggcggccggcactcaccggggaagcacacgacataatggagcacggaactggtgattttcaggaacaaaatccaccaacacggttccagtaacctccgcatgtccgaaaacgcacatcgaaaagaggaaagcagggaggtaaacttgttgaataagttcttgcctccgtgcgagcctccgctaagccggggcgcttccccggctcgcccgctccacgggccccccgcgctcggcggcccgagtccccttggaatccgggaagccgccgagcgccccccggaaaatctcaaaaagtgaccgggaacgcagagccacgctggggacgatcctctcggcggagaaaggctgctttccgtttaaaaaggagagagccgatcgggcagggcgcggagtcggcggccggcggcgatgccccgggcctggggcaggcagggaccgcgggcggcggcggcgagcagccgaggatccccaacttgagtcggcagcgcagcacagcccgagagccggcgggcggcggcggggctgagcgcggcgcggcgtctccgggcttcaggcaggcagctccttccagggccccgggaaggaaggaggcatgtttgcgagaggggaaggggaggggagaggcagggggagcggagagccccccaaaatagaaacggccggaggaaacggaggaaaacacaaaggatctcagaggggcgctggggcgagggcgccttcagtccatgctcctgaaagttgtggctccggcgcaggctgggaaggaacgaagagcgcggggctggaaactggccatgcctccatacaggaagtaacatgtgagcatggatcctggcagagactttaaagccggcgagcgaaggagcgagcgaacagggggcgcgcggtggcggcgggggcgcgcagcccgggccagctggcggcgggcgcgcgctctccgcgttcttaaagcagccgcgcttggctcccgccttgcgctgggtccctcggctctgctctctccgcgcggcctctactgggacagtttggggactgggggcgattgtagcccgtgcgcggagagaggagggaggctgccttctggggccggcttgttttttgctggattcccgttgttcgagctcttaaaagacgccgcacggtgctcgggtttggcgagatcctccgcgcagctcgcggatcccggacttgaggggcccctcgccctggcgaggggaaagggggagggcggacagctgcctttttaaagcgatggggttttctgttcggcttcactgccctggcatttgcagcggtgaggctcaccgtctgcggctcctgttcgcgcctccaacacagcgcattcccccgccgggaaacaaagccgagcggcctttgcactccggctacattgagatttaattttttttttttttctttttcgggctttcattggcccagtccaaggctggggaaagtgggggaggggaggaatgtcgatcccaggattgcgaaatctagcccttccgagccccgcatc

SEQ ID NO: 9974 - DNA, 6000 bp, Homo sapiens; identical to SEQ ID NO: 3725

SEQ ID NO: 9975 - DNA, 6000 bp, Homo sapiens; identical to SEQ ID NO: 3724

SEQ ID NO: 9976 - DNA, 6000 bp, Homo sapiens
acatttcaaggtccctcagttaaatatataatacaatagcagtcaggcagggtggctcacgcctgtaatcccagcaccttagaaggctgaggtgagaggatggcttgagctcaagagttcaagaccagcctgagcaacatagtgagactgtctctacaaaaaaaaaaaaaaaaaaaaaaatttaattagctgggcatactggcatatgcctgcagtcccagatattcgggaggctgaggcaggaggatcacttgagcccaggagtttgagagtgcagtcagctatgatcacaccactgcactccagcctgggcaacagaacaagaccttgtctcaaaaaaaaaaaaaaaaaaattaaaaagattgatagaataaaacaaaaagctatttaaaggaaaaatagattacttttctcacataaccatttaaaaatatgtacattttaagaaaggaaagactaatatttaaatgagataaaaatctgagagagtgctagagatgtactgttcaggcaggacaaaaggagtctctcatagattgattcaacagtctcagagatccacaggaaagcaggtgacatagtgggaagagcaccaaactggaagccaaggaactgagttttccgtcctggctcaataagaagctgcatcatagtgagtaagtcaccttaaagcgtcagtttcctcatcttaaaatgaagactaacaaggaccattctaatgccccctactctacagctgttgacattaaaggaataatctggaaatgtaaatggaagggcatctcacccacagttgtaggcttttggtagctcaaaggttgggaactacagggcaagaaagccagtaagtagccatgcttaagctaaatgaagaaagatgggtactcccctctattaggctcactgaggacagaaatgggcaaatgtatagataaaaattaataaaggggaaaatattcatagtcatagtcataaatctatgtatgtatatgtatatatacatatgtatacgtgtatgtatatatacatatgtacacgtgtatgtatatatacatatgtacacgtgtatgtatatatacatatgtacacgtgtatgtatatatacatatgtacacgtgtatgtatatatacatatgtacacgtgtatgtatatatacatatgtacacgtgtatgtatatatacatatgtacacgtgtatgtatatatacatatgtacacgtgtatgtatatatacatatgtatacgtgtatgtatatatatacatatgtatacgtgtatgtatatgtatacatatatgtaaagattaataaaggggaatagtcatattcatagtcataaattcatgtaaggaatatgtatgactgttggacaatgttcttgctgttattttataaggcaccaaaataatgaatagcaactaaggaaaagaataaaacacagagcttcatgccaaggccagggattccataaaacactaaggcaaataaaacaattcctcagtctatgctggtcacagctttcacaaaccctgccacaggaccttaacacttatgtgttgaagtggcactcagaattaagtaagttttattttctccaagtcttcactgttatcaatgattattcttataacaaccacctggtgttcagcattatgctaggaactataaaaatataaaaagaattataaagcatgtccctagccaccgaaaacagaacaatatgcacaggaaaataagcaaaataactgaagacagtgagtgcatgcctgtgtatatatgcatatatgccatctactttggaatttaaatcacattttcccacagaaacacagagaaggtggttaggtttcagttgaggtgactcctcaaacttatttcatgcttatttagttaagcctcagtagctgtccttaattccttaaatctcaaagtgattttcaaccaagttgaggggctaatgggtagtgctgtatagctggaaataacacattcgatattatgacataattttacaattagaaaatgaacaactatttttcatgatgcagaagccactattttaattaaatgaatttgtaagtggtagctataacatacatacacagcgtgacctgccaaacactgctccaatatctttacacataacttacttttcgttatttaactcactttatttatttatttatttatttatttatttaatgttatttattttgagacggagtttcactattgtcgcccaggatggagtgcagtggcgcgatctcactacaatctctgcctcctgggttcaagcgattctcctgcctgagcctccccagtagctgggattactggtacccgctgccacgactggctaatttttggtatttttagtagagacaggggtttcaccatgttggccaggctggtctcaaactcctgactccaagtgatccactcgccttggcctcccaaagtgctgggattacaggcatgagccactgcgcccggcctaactcactttattcttaaaacaaccgcaagagggagtaccgtcaatattcccagttttaaggtgagtaaactaaggcagagggatgttaagtaatttccccagtcacatagttcgacaaagcttcttggtgggtgaagatacacagaaaatattttattttctgaataatctcattatccaatattctttactcgggttgaaaacagaatgaagggataaaggcactatgttaatagttaggtaagtacttttttttaaagcagtaagtaaactaaaatgattcatattagtatggccccaaataattccatattgtttataccacagacaggttcacacaagggccctaagatatatatacatggatgttatatatatatatatatatatatatatatatatatatatatatggatgttacataacaaaacatgttatgtatggatgttacataacaaaacaaaaatccatgtgtgtatatatatatgtatatatgtatatatgtatatatatgtgtatatatgtatatatgtatatatgtgtatatacgtatatatgtatatatatgtgtatatacgtatatatacgtatatgtctatatacgtatatatatacatatatacgtatatatatgtatatatatacatatatacacatggatgttatataacaaaacactacagcagtgttttgatggctaatgactgaaaatctaaatgtccatcaatggggacaggctaaatactatttttatatttttacaaaggactgctgtgtagccatggaaaggatgaggtagttttatacccatggatattgaaagtgcctaatatacagtactaaatggcaaaagcatgtgtattaggattccacttgtgggaaagacagaagggggtatatattatcatgtgctttattatgatcagaaagtttcttaaatataaccaagaaattatttacagtgcttacttctgggaagtggggaatggagatgggtagatcagtagatagaaaagaaaaagactttttttacattgtatccttctgtattaaatttccttttatcaaaagcatatagctgattttaaaatagcttaattaaaaatacagcaatatagagcttagtctccttttacataatggtttctaaccacagactggtatgtaatgatcagtggtattcctaatagtaattaacctagagaaattaatgaatgatttattttataaacaaggataaagtcaacatccctttaattaatccattaatcaaagggagaaaaagaaagggggcctataaaactcaagcagaaggttgaaaaaaatcttctaaagatcatgtttaagaaaggctgcatcccagagtctggatgccagaaatgccaacgaccttcttgaaaaacaaggaagtatctttacgtgattgtcaaattgggttgggaggtcccaaggtgtggacaaggctttttaaaaacttcattcttttacgtttatacttttgcatatttcatattatacacaacatatttacagtggtagtcatacactataaataattaaacacacaacatttggggagatgcatgctcaaaaatgttttactgatagggagtgcaattaaaaggtttggaagctgctgaggtagtaaaaaatattgatgcagtgaaaagaaaaacattaaatggtcattctgtggtcaagggatgagaagtaaaagctatgaagcagttaatgtacaatgcctgcaacttttgagtactcttcaactttttcctgcatctattccaaaaccaaatcctgccatttttccaataggatatttcctgagtttgccccttcataaccattctgaccatctaaatcttatcaattcacgcttttggaaaggcctctggcccttatgtaaagagccctccacttgcttgcatcttgcacagaactgtaaaaaggtcctttaaatgctcagacagcttccaactatctccaaaagtgaaagtacttacccatgattgtaaatatccctgtcccactctcaaactgtccgctccccatagaccaactggagctctttaaataagtcagacaaatatattcctcattcctcaaaggactcaccctccctttcacattccggttgtgcagattaaacatactccacaccatcaaaccaagttatttttcctcgagaactctcttagaggttcctttttctctaacagcctgcccacctctgattcctgggattttcgtgttgacgggatcgttgggatctttcctctcttctcatctttccagtaacccattagcattagcaggattattggacaggcctccgtttgcattaatatctccaatgattctgtgatctccgccctaaagacctttgatttcttttggtcgcgcctccccttcgggacaccaagtttgtttagggcctgagcacaggggcccagcaggttctttccgacgtcagcggctgcgtacggaggccgacttaggcaggccgctccaggaacaaggccgtgcggacaggactgacctaggcgcttttccccgtcgctcccagaggagaaacgtaccggggaggggacagaccgtgagcaagtggtccaagtctgcgcagggtgaccccgaaggcccaccggagaggccgaggcttgtgggctactagaactaggcctggtaggtgaaggaggcgggtgaagggccggatccaggactgaatccgggagaggcggggcgaggaggggactccggtgtagctgcttgggcagctcccgcggcccctctggcgggggtgaccgttattggactcgcagagggaagagttgggtagcgtcccctactcacctagaagcgctgccgcctgaggctccagctgcccccctcccaattcaagccacgtcagctcgggaagcccgtacgcgacaccttccaccgccgcgccccgccagggactcagccactagcagttgggacggaagatgggattaagacaccgaccaatcaggactatcggcaggacgttaccagggagaccaggcacaccttgtttgttaccaacctatcaacaatgacggaaaccaatcaacgacagaagatgctccgcttcctcaaagaaacagccaatggaccctaaagagtgaatgaggggagtgattagacgcgagtaggtgccccggaacaagatctggggagggacaggaagtgtcgagtgggcgggcgttctgggaaaggtcagatgttctcagtgtgaagtggttatgctggcttcctccaattcctcctcttcgtcggttgtgactgaccgagacagcggcttgggcttcggcagagacttgagactgcgggcacccgctgccattaggattgttgaatgagctgtgagaagggagtgggggatatgggactcttagattgaaaaaatactggagcctcttagttgttcgtctagtttcaccttttgattttgttgatgaaaaataattaaccacagaagtaac

SEQ ID NO: 9977 - DNA, 6000 bp, Homo sapiens
caggagcacctgcaggctccgcggtggcagcggcatggcaggctggggccttgggcctcggtgctctggtcctgctggggtgagcatcatggtgccaggagcttcagccctggggaaggggcagaagagggcatgtgaatgcaggcatggcccatcccatgatattatgatctcccagtgtgagcccttccagtgctgggcgtgcccactgcacctccaggaggcagaacctgacccaccaggaggagccaggggcaaactgggcacctccctggcctgaggccctataagctgtggggtgcaccaggtatccccaggacacctggcaagaggtcactccgttggcacctgtgccctgccatcactggcggaggccaggaacaggaaggcaggtgacaagggcctgaggtgtggaatgggaccccagctgacaccaacatctgacaccaacctggagagcagccttcacccagagcctccctatgcactggggagcaggaccctccccacagctctgtactcccagggtgggcaccagctccctgcctgaggctggtggggacatactccaccaccgtcccctacagaagcttgacatagatgggctttagtgctcactcccacctccacagccctgcctctcccccgaacacgccctgacagcccacagcagaggcaccacggaggacatggaggcccaggccacacaggcagcagttctcactgtggataggtggcagcctgggctgctctcggtgggaccccaagccccatgctggataaaccttgagacctgcagtccagaagccaggcaatgtgtcccacccacatccccaccccagccgacgggtgccccgccacacggccccttcccaggctccctggcccaccagccctgactctcagcactctatccaagccaccagtcctgctcccagcctcacacccaactccaaggaaagaggaattcctccacagggaaggctggcaggtgctccctgcactccacccctccacagtgaccccttcccagcctcagcaccccatacccacccagacctgtgtggccccctcctgccttgctccacatcgggccctcacttcctggtcacactcactaccaaggtccattgactccaccccaaactccacaaaatgcccacccctccttcctggattgccagggtactcggctccctccacccacaaccacctacagccaggtccctatgcagaggctaaggccactcttctgacctgcacacgaggtcagcgctgcccagatcctggcgggagtccccatatcctgtcctggcctccactgcctctggaaaagtctcaccacaccctgcctagcaactggcagccaagcactgggctaaatctagaccctgttactctgtaggcagatgactctgatggggacactcccttttcctagcctcagtttccccatttgcaaaaggggcatgaaagctcttttctcatggatgaaagaggaaagggcacacctgcccacaaggcatagtcagcagtgccacccccttggttgtcagtagggcctgctgccctggatgtgcctgatgtgctggggcctctcacccactcctggctggagccggctacagcaaggctgagtcctgagtcttgagttcaagcctcagccagccagtttgcacagaccatcccagacaccccttgtatggtctggccccattttacagatggggaagctgaggcctgaagatggatgccttctccaagtctaccagggagctgggcacagtcccatcagcctctgtgcctggtgcccacatgcagtgtggggctgcctgcccctcccccaggcctctgtgcccctgtctccactccccgccctgctcagtcaccctgttctcatctgcagcacaggactcgtgaagggtctctattacttattgctcccattctcccggccagaatggctgccctgtgagagcagggcctggctctgggtggttgccactgcatccccaagccaagccagggacccaggaagactcaataaatccccgtgagtgagcgaatgaatgaagggtatgcggagggccagccaggtctgggtgcggcagccccccatgcttcttcactcctgtttcactccccacacactccctgcccagtgtgtgcacagcacacacccactgctcaggtggggaaaccgaggctctcagaagcaaagagctttggctggaatcccagagcaggaactgcagggtgctcctagcaggctgccagctgcctttgccggacagcgccccaagaacagcaggggaggagtccccactcccgcccccgcctcagagctcaaggaagacccgggagccagaaaacaggctcctcacagtggcagtggggccggggctgggagctgagcacatgtgaactccaaagaaaacatgaatcactcaccgtttatcagttcaaagcaggcctgcaattaccaggggctgggctctcccctcctctgggataattatacacgtcttaatgcaattatgggccctactttttgtattcaacaggagggaccaggctaagaagccaccatccaaactccagcctggtcttgggcccaccgccccaaactccaccctcaccccactgccccaacaaagtctgctgggaagggacttgcctggggtcacagggttgccggccaagaaagggggagccccgagcctagggctgggtccctcatgcccagcatctaataaaggccagtgacaatgcttgggccacttcttccaccttaggggtataagacttggggctcagactcaaggtcacccaactagtcccagcagggcagggcccaaatttcgagcttccagagactggaccagccagccagcctgcagggctcaactctcataggcttgggtctgcctaggaaaaaatgcattcattccaaagctgggcccaggtgccagggtgccaggggcccatgccggggctaggaggggagcatgggcagatgctgcactctaccgaggagcagagctggccactgtggccggggaaaggcctcaagagaggaccaggtagcctgggagctggtgcaggagggtgggcattcgtggtgggggtggggggcagaacaggaggagcaaaggcctggggtgggaaacactggctgtgcagagggcagtaggaacggctgtggctctccggcatggccagagctgttctaggctgaggcagagccagagccagggcaggggaggctagactggccttgggatgccgatggggctagccagggagagagaggcggagagagaccccgcggtctgcgtgcaggagccccagcccaggggctcctctcctggacaggaggggatcgccgcctggtggaacgccaagccaacagtgtccccttccctttcctggcctgagtgacaccaaagctccttctcaccctgagaaacaaaggcccccaaagccctccccacaaggaagagtccaatccccccaagtcctcctgcgccagatcctgctatggctcaggcaggttggggtgtggggctgccatcctgcccagtggctcacaacagcagccgggggggaagacagctgctcctggcactccgcctcccccacaacgggggtcatgggaggtggtcccagtggttctgctcccgaccagtcctaggggatccggctctgaaggccttggagtcctgctcctgagaaaaagtgcctacctttgcaggccttcccctggggcacccgctcctcccggccagctgctctaagctgctctgtgcacgggggctttcctgggggctcaaaacaggcaggcaacgaccttggggggccaggagtccagcaaagggctgtctgctttgtccacaggcacctcatgtgtcccccacccccagagcacacactgaggccacaaacccaggcctccgcccatgctgtcctctgcccaaaacgcccttcctgggccccactggcaccccccaggaatggaagcctggccctgcagcgaatcactggttcacatgcctgcctctggcagggggctgggtgctcctcaagggccgggcagcatcttggtgcccctggtgcagcacctggcctctgccgcacaccccaagccgcaggaaatcgaggggacctgaggcaagctcctcaagggcccggggagcagaaactgcgccccatccctgcaccgacccccaaaccggctacgtgtgaaaggagatggggcagcacggagcagcctgagccacaggagccgcgctgaggggacagaggctcgaccacgtcccctccccggcacacacacccctttctttcaaggggcgtggccccagaaccccacacaggagcctggggcagatcgccgcccggggccgcccctcggagcccctcccctcctttccagggctgcacctgggacctcacgccgaccgaggggcctccctggagtccccactcccccttcccctggcagcccgggatcggcccgctgcctccagcttcgccgcacatcaggcccgggactatccaggaagcaatcggaagcctccgggagaagcggctgaccctggagaggccccgagagggggaggccaaggaggcccgagcggggcggcctcctgggcggcacccagagcccacctccccgcactccgggccagtgggagcggtggcagctgtggtcgggaagccgctccaacttccaccccgcgccccagggccggccgggggcttagcctgcacgacctcctccggcccccgcggccctgctgggaggctccgatccctatccgggcctggccaccccgtcctcgcccgcggccagaggtctgagccgaggtccagcggccgggacgggcctggacaccgcaggggcctccccgcggggccgccgcaaactttctccccagcctccgtggaggggcagcgcccgccccccgccaccccggagctgccgcggggctcggcgggcccggccggggggcgggggaggccgcggcgctggatcccgggccgcggtcccagccccgccgcacgggggtgcggtctctccgcgtcggcgccgcgaccgcgcccggacacacgcggacgcctgggccggagccgcagggacacgcgggccgcggacacgcgcgccgcagtccccacgcgcgccgcagtccccgcgcacaccccctgcctgccgcctcacgagagggccgccgccggaggccgccccgcgcccacccacgggccgcccggccccggaccccagcccggcccggcccccgcccaccgtcccgcgccgcggggaaagttgcgccccgactcacccgccgccccggggcgcgccccgccgccggccatcgccgcgcccagccgcccgcgccgccgccgccgtccgccccgccgcggggccgccgaagccgcgtaggccgcccaggccgaggccgccgccgcgcccgggctccgctgcgtggccgcgcagccgatgcccagcatgaatggggcgccgagcgccgcgcggctgcggaccggcctcgctctcgccgcccgcggagccccgcgccgcgcgcatgcgccgcccagagcccgggggcggggcgggggcggggccggcggcggcctccagagggcgctctgccccgcgccgcgcgcctgcaggggcccaccgcgcgtcttcaaagggcgatacggctgcccgcctcaactctctgggcgccggggccgcgcgggcagttccgggagccccccgctctcgagcgggctagcccgcgaccccaggaacagggcctggctcagtgtgcccaggctaggagcatggcctcctttcacggggggggaaactgaggctgaaggaggcaatcgcagttcccagaccttgcggggccgggtgttcccagctctcggcctcgcgcgttccgctctgtcagatgggcgggcacctgcgcggggagcccgggcgccccctgcaggccccaggctggtggc

SEQ ID NO: 9978 - DNA, 6000 bp, Homo sapiens
tgatttgaggaaagggatccaagctacatgcaatggaggctaatttcttcactcagtttctctcaaaatatcttaactgccccaaatacgttgaaaacaatcagggacaaatttggggacttctgagggctgcggggaccgaggttctctgcctctggcctcacacttcagcagcttctccctttgggttctcgggaagaaggtggagggcagagggcaagtcctgtcagctgggaacccggaatgtcgggaggccatcctgacccaggctctggagttgtgggcggctcaagggattcctgccagggcccagggttcttcgtgagaccctcaagcaggagcgagaggctgggtttccaaaggcctggctgagctgccccacttgcaggtcattcggccctggggtcctgccccatgtgcagccccacccaggccacccagtgccagtgacagagaaatccagccagatgggaccaggagaaaaaaggattctaggctcctggttctccccagaccaaactcatcctcttccccagaggtaccccatcacatgccccaccccatgggtaccaacatctatcctgttgctgagcctgactctgggcagctttctgctcctccatcccatcactccccaccactggggctgcatcccagcccccaaatctgtccagagcccacctgccaccctccaagccctcagcactgctgcagaccaggccagccatgtctccagagaacaaggccggccccatctccccactgccatctggcacccaccacagagcctggcacacagtaagtgctcaagatatatttgcgactgagtgaaggaatctattcccgggaggcggcctcagcctctcagccactctccctcctccattgctccttctcaccagctacctaggggctttctaaaataataggtagaagaattgtagtcattgcaaacaggcgccaggtacataaatgatctcatttaatacccccaacagccctaagaggcaggtattcacgagcattccccttctgcagcggggagactcaggtgcctgctgagaccactccacttctctggctaaaacccttcatggctcccaggaccccaggataaagtccagactcccaaggacggtctccccaggcctccctggcccttgtgtcatgtgcttcccactctactcgcctggccacgcagaccccctcgagcctgctcacagccttcgcacaggctgctccctttgcctggatgcctttcctcttctccggcctcacctggcttcctcctgctcctccgccccctccgctgggctccctccaccctcattctccctttgcggcacgcattgccctgtgtataagggcctggtcacacatccgtcctcggctcacctgcccagcccacaagagtagaaacaaagtgagttgccattggctccccagggcacagcatgggactgggctcacaatagggacttagtaaatgtctatggaggtgtcatctggggctagaagtaggagatggtggggtgtttacagctgcagaacaagccagattaggcaactgctctccaggaccaagcagagacctgtgctaataatgtcccttagagtaataacaagaagaactgccatctgcttggtgcttactgtgtactgggtacactgagctgcatttatcgattcatctagtccttaaaacaatgctttgggataaggattgcttttactgtccccacttcacagatgaagaaactgaggcccagagaggttaagttccttggccaaggtcacacagctgggaagtgacaaagtgggacttgaacccaagcagcctgatgcaaagtctaggttctgaatctgtcgctgcatagctggcaacagcctggagcaagaataatgatccctcccccacccctgcccatgctagaggcccagaccggggaccttgagcacctctgggagatactgccaagtggcactggcctgtgcccacagcgggcacggcgaagaggagaagggtgtggaaaacacagggagggtgaccaaggaaggccgcagccggaatctgtggccttggggtggggaagaggcccttcgccactctgtcctggggctgtgtccctggagaggccctgtccccttaggtagagaagctccagcccccctcagctgggtgagtcactgcaccgagggagcggaccgtgggaaccagaatggttcttgccagagggggagggaaccctgggctggcctaaggaatcccacagatcagcttacaccaaagggccgagacacagggcctgaaactactggaggaaggccctcagtccacaggacacttctctccattcagcgactccccactgagacccccagtgccaaacacagttgcctgcgagatgaagctctggggtggagatggtggatgaaccaaccatggcacagggcaagcagccccaccaccctttggactgtctgccctgctcacccaccgtgacctttactttcagggtggccggccagatggtgggcagtcgtgggagaccgacctcgaccttgggagaaggaatctgcattttctcaaagccccagtgttgggcccgcccacagaggaatggttaatctcatgaaattcttgtcacagccatggagaagggacagggtggggccccaaggaaggcttgggtcaccacaagaaggctgagttctgcattttgctgatggagatgcagcttcctaagggaatggcaggcagtggagctgaagtgggctcgccagactcagatgggtggagggtgtgggaaaggccccagtgtcattctggggcctcattcctcagggtgaactatggggatcaacagacccagctcccaaagccagtgtgaggagcaatcccttgccatgaacttcctttcagggaaccacaccaagtcccctcccgcacccttgtcatgtcaacacacatgctgattccgtcaacctggccccccttgctactgcccaacccagcctcagacacctgggccccatgcctgcctgtactcctcctcattccccactgagccccacggccctctcctgcccccaaaacacccctgttcacatccctccattctcctggccctggcatctgcccaccccagctgcctgggacgcccccaaaacacacgcactctgagatccaagtccagaaggcagcaaaggctgggcattaaaaacacagatgctgaggccagacaggctggattcaaatccacctctgctagtgcccaactgtgtgatcctcagcaagttgcttaacctctctgtgcctgtttcttcatctgtaaaatgtgatgagaatagaggctacctgagagggttgttctgagaactgggaattgtgacatgtgatgcccctagctggcactccacaagtgctattgtttaccccagactcccacacctggtacatactaggtgctcaggaaatatttgcagaataggtgaataaaagttggcctcaggcacacacctgtttgccaaccatgcagcctcctcagagtaccgactcatgcccaaatacctgcgtcccctgccacgcacatcccactgcacacctagccctgtcccgttgtaccagtgtctgtgcagtacacctgtctgccctgtgcgtcttcaggccccagcttgctggcacacaagtccatgcagacatctgcagggccctggtgcacacctgtgtgcctccttgcacacctgccacacccatgcacccatcaccaacgtgcaatggtaactctgacaggctcacgcagtggccccagaacacaactttggtcaggcatgcagtcacttactgcgccctcagcatgcacctgtgaccctcacgtgcatacctgggctttatgcgcacctgggtacctgtggcaacttggacccctcccagtacgcctaggtatgcgcgcccatgagccggcactcacttgagtccctgcacatgcccacctgggccatacaggcgccagtagtacccctcgggggacacctgtattctcgcgtgcacacctgggttccacgtacatctggatctctgcgcgctcccacctgtgacccactcagctcacgacccgctcggttcccgcccgcccccgcccccgcccccgccgccgccgccgccgccgccgccgccaccgcccgggtgtacctggatgttgagcttgcgctcacaggccggtcccgtgccctgcaccacgctgtcgagcaccgccaccacgtcgggcgccggttccacgaagcaggcggtgcgcgcagctcggatggcggctcgcacgtcggcgaagcggaaggcgcagagtgcggccggagcagcgcgggccgcgggggacccctggggccgctcgaagacagcaaagagccgctcccgggctgggaagaccgacaccaggcggctgtagaggtcgccgcggcccgcgccgcccgcgcactgcaagcccaactggatgtaggactcggtgagcttcttggcgtcgccgccggcgccgtggggcaggcagatgcgcgccagcaggctccgcgcctggctctccttgtcgcccgcgcgcgcctcgctgttgagcgccaggtacgcgtaggactgtgcacccggcggcgggtcggacgggtgcaggaaggcgctcacgaagcccagcttgtgctgctccttggcgccctgcttgatcttgaggatgttgtcgtcggaggggttgaggtcgaaggtgaagagcttggccaggtcgccgcgcgtgtccagggagcggatggcgatctcgggcgtgttctcgaagcggtggtcctccaggctgcggttgcgcgggaagaaggagctgccgtaaccggtgtacgtggcgcccacgagcaggcggctgccccccgcgcccgcggcgggaggcagaactagccccacggtggacgcgttcgggtggttggccgccacgttcagcatgctggggaacaccgtgacgggctcggcgggcggcgcggcgggcgggaagcgcacggccacggccgagatgttgccccggcgccgcagctggcagaagccctggtagatggacccgcacacgactaccaggccctggccggggtccagctgcaggatcttgttgtagttgtccgtgaggcgccgcgggtgctcgcacgaggcctgcggcagctgcggagcgtgacacagcgggctgtcgggcaccgggcccacggccgcctcggcctccaggctcaggttggcgcccgacagctgatagaggcggttgacggccgccaggtacacggtccccgccgcgccgtccagggcgaagttgttggtgggcgtgggcgaggggaaccgacgctggatctccagggcgccggcccgcgccgcccccaggagcagcagcaacagcagcggcaccgggcaccgcggcggcgtctggaacggcggggggctggcggcggcggcccgggcgctaaggggtgcgccgcccgcggcgcgaggagccatccgggcgtgcgcgggctgcgcggcgcggcgagtgcatggggcgaggcgcggccgggagccgggagcccggaggcggcgggaggcggggggcgggcccgggccgcgatgcgcttcctgcccgcgccagccgcccccgaccccggcgcccgggcccgggtcagcctcgccgcgcagcccgggggcggggcgggggcggctccgctgcggacacgccctcactccccgccccggccccgcccgcccccgggacccccgcctgcccctggccgccctgggccacgccccgccgtccgcgggtcccgccgcccgcgccctccaggacccgcccgcggccccagggtccctccccgtagccgccgccgccgtcgctcgctctcctcgctctttcctcccacttggccgcttggcctgcctcgctcgcgcctgttttctcttttccgccctctcccccaccccgtctctccctctctctgcgtctctcggtctctgcgtctctc

SEQ ID NO: 9979 - DNA, 6000 bp, Homo sapiens
ccaactcaagaatgttctgctctgtgtaaatatttcactctgttgctctgccgcttagaaacagagtgggcttcaacagcccacctcatcagaaaacagctccctcatcatgtagcatccaagctagatggtaatcaggagaaccacatgtaactcccctctcctgagtcacacccagatctgcggcatgtgtcattctatccacctgcacaggcccatggaaggaaggtactcactgtgagcactgaactcctttctatgttttattgtgctttgccttgtaatctataactaaaatagacccagttttaaaatattttttacaatgcccagtcactaaaaattaatgagctgccacagtaaaaaaaaaaaaaaaaattacttgcagtaactgtggggtttcttctctccactctagtcagacaaatcctctctaagatctggggtatttactcattagaacacttttaattctttcttaccaaataattgctacatcctctttcaaaaggtgccaaaataagggggaagtgggagtgaggatgaaggaagaaaaaaaaacaccataaaactctactggcctaacagcatgaaattattatgactccatttatgccagcccactatgcagctcagactctggatttgttctttgtagatattcttgtcaatctccagcctaacctgatacctttaagttcatccagcaagaactcaatacctttccctgtaaccagctggctgaaccgcacaactaaacgctccacttacttcaccaggtacaaatgttcatggcattcaccccactgtaaatttttaaagttcacctcaaaacagaaaagatggagaaaaccatggcctttgatagaaaatttttgattatgtagctaacaaaatcaaacatatgtgtttttaaatttaaattcccatgtatacttaacctgtaacagctgttcagaaatctacctggtgtggtgtaggcacagagataacataagaaacagtccctgcgttcaagggattgataatctggagagacaagacaaagggaaatgcaggtgaatacacaacagtactcaatcctcaaataaggttaaaatgtagaatcgcagctcaaaggaaaggaatcaaaagaagaactgagcaaataaaggaaaatcatcttcaaacagttagatggtgtcacggaaacaagaggagcctgactctgaaagagggcaggactttccaaagaaagaggaatgcagaggaggccatcttgagctagtagtacctaagcatttgaggggccaatatttgtttggcttaatttgagatttgttttgttgttttaatagcaatacagttgagaagaaattgagaatggtcacatgcccaaaagccagaactacagttaaccattcacaggattacaaaaatataatatccacatttactcaaagaaactttaaatttggatcctccaacccaaattaaggatgtgagaactgactttgcatagttatcttagacagatctgctctttttagagtgttcaggttttattcacttcatgttaactccttacctgatacctccccaagaacaagtcacatgtacttgaggcaagataagtttggagcatatatgactacagagaaacggtaagagtgtttagcaccgaaattttctatgtgtactttttatataatactctaatggcaaattcactcttgttaaatgagtcattagaatacatttgattttttaaaatctgaaagatttttggctgggcttggtggctcacacctataatctcagcactttgggaggccaaggcgggaagactgcttgaggccaggggtttgagaccatcctgggcaacaaagtaagaccccacttctacagaaaaattaaaaaaaaaaaaaattagccgagcatggtggggcacacctctagtcccagctattcgggaggctgaggcaggaggactgcttgagcccaggagttcaaggctgcagtgagcaatgattatgccactgcactccagcctgggtgacagaacaataccctgtcaattaaacaaacaaacaaaaaatatgaaaaatttttattacagattatttagtttggggatgtgaagtaccctcctgtttcaaagccagcatgacaatactctggttttaaactttcctcaaggcctagtattcgatagcataacaggaggactacagtcaataataatttaactgtacattttaaaataactaaaagtataattggattgtttgtaacacaaaagaaaaatgcttgaggggttggatacccaattttccatgatgtgattattacaaattgcatgcctgtgccaaaatatctcatgtaccctataaatatatacacctactgtgtatcctcaaaaattaaaaataaatttttttaaaaaatatttaaaaaaaagcaaagcctgagaggagttaaaggaaggagagtacaaaaaattaagttttccactgtttgtaagtggcaagtgtgaggcgtccatgcaaggcttctttggcctcctcaaagacaacaaaggtttaccaaccaacgggcctacccagctcagggcacaacccttccctaatgccatccccacctcctcaatacttctaaaaccctctttccaataacacatctgtctcaaagcaacctgaccttaacttacgcataaccaaaccaatgcataaccaaaccaaaacactcatcggcagccttcatcctgaaataaaggccaacagcacacatgataccacaaagaccagcaagttaaatcaaccaccacctcactttgctgggaagggattcttaaggttctccagaagcgcttttaaggttcattaagaaaaacattaaaatgtcatcaactcactctccaaaccgtcatattctcaaatgaaagtgttatcacaattccccgttaaactgttttcaacttcagtccacctgataaaaggtaatctgagaaacagtctgtgagcaggaataaaggcacttattggaagtgctctctcccttcttgtaataccaagagcactagtggaaaagcacaaattaagatccaaaatatgtacacatactatgattgcaactatgtaaaacatgcatagacatatgggtaggaactagtggcaaaaataaatttaaaatagctggtgggattttatgatatttttcaaactttaatgatgttgatttaaaaagaaaaaacatcaaagcatgatgtaggctgacaacaaaaaaaagaccacaattaaatgaagtttatccccccccccaaaaaaaaaactaagaaagaaaatacatttataggtataaagtcccctctagttaagtgagccaaataattcattcatttcttaaaatctggaaagaccatggccgggagcggtggctcacgcctgtaatcccagcactttgggaggcccaggcgggtggatcacgaggtcaggagatgagaccatcctggctaatacggtgaaaccccgtctctactaaaaatacaaaaaattagccgggcgtggtggcacgagtctgtagtcccagctactcgggaggctgaggcaggagaatcactttaaccacagaggcggaggttgcagtgagcggagatcgcgccactgcactccagcctgggcgacaaagcgagactccgtctcaaaaaacaaacaaaaaatctggaaaggccaaatacttttttttcaaaatttaatattttttctcaaaaaaattgagatagaaaatacacttatacgtataaacgctatggttaagcaagaaaaactcatcggtttcctagaattttgaaaaggctcagtcctttgaatttagcttgggatgtccccttgcttcggtagaaatcatgctctcaaactgcaatttaaaacataaatgtgtaaataaccacaccattttaaaaacccaactccgtttagtctataggcttccttatcagaacctaaggactggactccactgctttcctccaggtgaaggaaaatgcttgccccagacggtgccaagacactgagcaaaccaactcctccactcccatccaggggaggggagtcaactatttggactaacagggtctatggcaatgcacattccttccctacaggtaagaggtccttagctgggtgtactgccctcttggactttgatgtcaacagtggtgacccttggagctcagcctttgcaaacaaggctggtgaacagggaagactgcctgaccttcccggacaaccacgccaccagaggcgggggatttatagacagatcgtacagggcgatgacgttgacagtcaatctggcatccagtgaatttcacctcaagtatctggaccccaaaagtgggccacatagcttccctccccaccacctaactatcctcagcctaagaagcagcccctgtgaaggagaggctgtaaccccgttctgcctcaaactcaatggacggctttggagaagtcaactataggctttttacatagaaaagacgtgggtgtggcaatgtgatagaggtgggggtgcgaggtaaaggcttgttctgaggctgcgtttacacggggggcatgatggagatttcatttagagtttatgctcatccggaggaaggggtcggatggaagtggaaagccctccaagccagcccttggcactgccactgtcccttctggtcctggacctcagtatcctcacgcgtaagacactgagctggacagcagttctgaagtttggagattccgggagaatcaggagaggaaggccaccggcccaccccgcaccctcaagctcgggggtcttcacagggactcacacgggacagggcgcgggagcgctgcccgggaccctaacggccctggcgccctcgggggccccggaggacagagggctgcaccccggcgcggagggcggaaggaagcgcgtgggcgcgcggccccgggcggcgggggctactcacgggtccccgcggtcgggcccacggccgcggcagtggatggggttgagctcgtcctgggggaaggcgtgagccatgtagttgtcgtagccaaagacgaacatgccccgtgccaggtcgcgcatctgggcacgcagctgcggagggaaggcgccgctgtagcgcttctcgtactcgtccgggccgcggccccggccgcccagcacgtagccccagttggctgggccgcacatccccggcccaggacgccgcggagccttgcgcgggctctgcgctgccccggtccccggcggctgcagccacgacggcccggatacccccccaggccggcccacgggccccgaggtgggcgacgcggggccgtcggggctcctcagacgctggaagccgaagctgagcggaaagcgctggtagaagcccatgctgggccccagcccgaagacgagccacaatactccatggaggccaagccggaggagcaccagccccaggacgagcgctcgccattgcatggtcgcgcgggcgccgcgggcattattttaaagcgcgggggcctccccgccgaccaccgcaccccgcgctcgccccgtagcccggctcgcttcccctttaaggaactcccccgtgacgcaccaggaactagcccatcgtccccaacccccaggctctccggcgggccggccaggccccacggtcgcccgcccagtggcccgggattggcccggcctgggcccggcctcgcggggcgcggcccaggactccctcccacgcagtaggccgccaggacgtccgcgacgccccgaggccccgcccctcacccgggccccgccccaactcccaagccccgcccccctgggcggtccgtagcccgatgggctggcgtggcgagcaggagccgcgccggcccgcgagggaacttccagccaatgggagagcggcacggcagcgcccgccggacgctggacacagacgtgaccccagaccgcctggccttgggtggatcgggtctctgggcagag

SEQ ID NO: 9980 - DNA, 6000 bp, Homo sapiens
actcaggggaaggggcatgcccacggcctgctacaaccccagtgctccgcttggcagacagggctagccttagctcctgaggcccccaggtgagcagagaggggctgctgggcaggcagagagtccccagcaacaggcacttcctggcatttctgcgtgtacgggaggaagaggctgagtgccagccttaaggcaacggtcagaggcgagtgggcgggtgcgggcaggcaggctgcccagccacccacagcctccgcctccctgaaacctgaaccacttctgggaaaactcaaggacgccaggattctcctcggtggtaagctgtacaccagaaccactaattttgaaccaaactctcacgtgctgagcagatttcactaagcaggaatctcctaggctttgaggagaacctcacctccaaccctgcatccagagtggggggatggatatgcactcaaaagccgttacccctacttcttacaactgtagacctctttgaaagcgtgagaacattctagatcagtggttcccaatctgagatgattttgctctcacctctgccagggacatttagcaagatctggaaacatttttggttgacatgattaaagaggatctactggaatttgtgggtagaggcggggatactgctaaatatcctacaatgcacagaacagctcaacccaccactacccatacacaacagagtatcatcaggcccaaaatgtaatagtgtcaaggttgagaaaccctgttctacagtgaggcccatgcaaccaggaccctgcctcaggactatctagagtctatctacagtcactagcaaaaatattatccagacccagtcctcaaccctccagatcccaatccatggtgacaggtcagtatccgtgagtggatctaaactcctgaaccgatactccttggttctcatttgcactaccctgagctcccaagcagaggggctgaatgcataggctggcactcaagaggacagctttctggaaagagagaccagggctagaatctgaacatccggcaggatcacaaaaggcaaagtaagtgaggtaccaaggtggaaaaagcacccctcccccgcagaacaagctgccccttaagactactacagtggatatgtgcagggcagccaggacttcaaggagtctaatcagggggcagtaggttcccagtatctgtacaaaacagagtgggtgcatacaatgtacacacacatgcacacatataccgatttacattttcctggaggaagggtccacagctttcatcagattctcagaggggtctatgacatggaggaccactgtatagaatgtgggctcttcattggctccttataacaggagttccttaggtgaagtgccagcagaggtccaggtgcttctggagattcttgatgcccagaaagacccacagagtagtacacagtagaggcccacccaagtgatgggaggccatagggtttagatcttatgtttttacccagctatagggcctggaaagatgggcaggtttctcacatcatctgccttgaaagggcccctaagagctagggaggatacccattcctcccaaaaggcagcccacccagacagggcagagcctcgagtgcccagcagatacaaggacaggtagcagaaaacactcttctctgggaggggcacccacggcccatggctctgtagcccatgtccttggcagctaccgctacactaggcctgagggatgaaagtcacttcacttcatgagctcactccctccgccctcccccaaggaagtggccaagaaacttctttgggtcagcctatcagagtaatcagggcctgcacttcctgatgggatagacaggaggcaggtccctctccaagagctctggtcacttcacttagaatactgtttaccccacccccataagccctttgatctgaaccccaagtacagagtacagagacaggtgtcaggagttcttgtaggatacagcattgagtgtccaggatgtccactgaaatgcaagagccaaatggcttgtttcccaaggacactcggccaagcacagaccacaaaagacttgaagaattattaaagaaccaactaaccactgactgatcttgtgacaagcaccatgtgacatttattacaccataaattctaccttcccttctgagattccattgtctaatatggtagccactaaccaaatgttctgcagagcactggaaatgtggaaagttagagttgaggatgttctgtaaggcacacactggattttgatgacagtacaaaaatggaatgcaaaatgtctcgttttaatactgatctcaggctgaaattactttgtatatatcaaattcagtgaaatatactttttttttgagacggagcctcactctgtcaccaggctgcagtgcagtgacatgatctcggctcactgcaacctctacctcccgggttcatgccattcccctgcctcagcctctggcgcagctgggactacaggcgtgtgccaccacacccagctaatttttgtatttttagtagagacgcatttcaccacgttggccaggatggtctcgatctcttgacctcgtgatcctcccacctcagcctcccaaagtgctgggattactggcatgagccactgtgccaggccagtaaaatatactattgaagttcattccatctcatggaaagaatgtgtccccccaaaattcatacaatgaagttctgacccccagtgtaatggtatttggagacgggacctttgggaggtagtgagggttagattaagtcatgagggtggggccatcaggtaatgagaacaggattcacagtcttacaaaaagaggaaaacacccccttgccccaccccacccctgtcatttgagaatgcagtaagaaggcagatatctgcaagccaggaagagggtcctcaccagaacccaaccatgccagcaccctgcaccctgggctcagacttagagcttccagaactttgacaatataaatttctgctgtttaagccaccagtctacagtattttgttatggcagccccagctaagacacagctgtttcttcttccttttattaacacgactactagaaaacgttgttttatatctatccatagttcatacactatttctgtcacacagcactcttctagatgttccttctagcaggcattgtgtgctgcacagtatgggggttattccaaacagcaagccaggagcttgaaattaaagggcatccctgaagccaaagcaacaggacggtcaggtctgctccaaactgggcctggggcagctcttttcacagttctccacaggtcagggactggttgatgtgactacaagaaatacccagtgacccccaccttcctcccagggcaggaatacaggtccttatagtgtgactctgactgccccctggcagggtacactgctcagcactgcccaagctaggtgactgaagcagaggaaaaagaaaggacatacagtccttccaggggtctgatgccgccctgccctgcctaaggagggaggtgtgagactggtgtgatccccagatcccaggtctcaagctgtcctgtcttgggaggaagctctcctaaaggcctgggcttggaagagccccagcacttccagggatcaggcacccagcgggtctggaggcagtcaggtgggctgcggtctgcctatcaagtcagcttgctgccgccctccctctagcagaccaatgcctcccctttcactttcgagcactccttcttggggaaaaggcatcccaagggagcggggcaaaaaagagcagaaagtccaacacgaccaccacttcgcctccaagaagcggctccaggagagctgcaacgccctcttccatacggtactcaggtgccagctggtctttgcccttcggtttccggactcaggctgcgcgcgcgcgcgctactaccctacagaactcactcgctttcggtgtaaactaagcctcacgacgacgcacaggagaaggtagaaccagggtgggaatgggacgcagatcccaaatccccacccccgcagcagcgtggggactccggccccgcccctgcacgcccggccccgcccctcgagggtttcccagactccaggcggctgccaccgagggcggcgggggacccgcgctgcatgtgtaatgggggctgggaacaaagacgcgcaggacccggcggccgggtaccagccgccccgaccttctcgccagagcttcaatgcccagctccccacgtttcccaggactggccaggggacgtcccggcgcgcccgccggggttaggcgcaccccggcaccactgagagagggaaatcggtgcttggaccgtaggagaaacaagctttccaggcggaactccgcttgtttacgcccgcgcccacatacccccaaacacacatgcgctggccgaacacctccagccacacgcccgcagccgcgggcgagctgagcgctggtcacccaccccgccacgtgcctcctggaggcccgaaggaagagggacctgttgggttttccatcttacccaccccctcccctcccaagtgcccaaacaaagcggtcccgcgaagcgaccacactccgcatcccggggccaacggcagggaaagagggagcaggtgggagccagcaccaacagcccgccgggccggtaacgcgacgcagactggtggcaagagatgcaggggactttgggctgcgtgaagccgcccccttcgcttcgctacacttagtgactctgagggacatgcaaccctccccgcatgctgctgctgctgctgcacctacaatcctgccacccccaatgagatctgcccacccctcttggccgccttccccacgctcaggttttcctcactctttccctgggttccacgcgcccgcgtagcccgaactccgaccctgaggctccgcgtcccggcccccatcgcaggggcgcctctaggaaccagaatcccgcagatgactgcacagacaagatcgtgcccccaagttcggcgagccgggcgcccaccgcgcccccagcccacgcccccggaggtgagggctgaatacaggtggtgcggcgacgaggccccgggcccgccctttgttggtaaacaccgcgcggcgccagaggccagccccgcgcgccctctcggcgtccccgcgccgcgcccagttcttaccggcgcacagcgatccccagaggagggcgagggccacccagggcgccgtcatgttccgcggcgccgccccgcgcacacccggagcccgcgggcagggccgcacggcgctcccggggcgcgcagggccaggcggcggctgcgctctccttcccgctccttccttcggtctcgttccctgcgcgcttcctgcgccttcgtccccgagcagcgttcgggctccaagggccggtcggcggggccgggctcagggccgctgcgggcggcgcaggctgcggcccgggctccggggcgacgcgggggccggggggcggcggcggggcacgggccggggcgcgcccgactcaggcatagcgcggcggggctgggcccgggccccgggcgcaggggccgagtccggaggggccatgaacggggggaggggtgggggggaggggagctgaaccgagtccaaaatggctcctgagcggcggccacggagccgagccagcggggaaacccggatgttggatacaaagaggcgggcgggctgggcggggagggggaggggaggcgggccctccggccgcgtggtccgcgcccccctgaggggcggggccccagagaaacaacaacacggaggccccgcccccatcccgcgccctgtgggaggacgcgcgtgcaccaacttgctggaggacagggcggggcgcgcggacggaggtggcgggaatgggctcctgaccactttgcccgggagcctgtggccactgcactcgcaattagtgccccgcacgctcgagccc

SEQ ID NO: 9981 - DNA, 6000 bp, Homo sapiens
cttcaggaaagactgctctaaaagaggctggtagtaagttcagctcttgtgccaggactgtgtgtgaggatggatggcgatcatggaggctccaggtcagcacccgcccctccccaggaaggtaccatagtccgatctggcatgggaaatgaaggggctgggaagtctatcatttctttagtacatgatgataactatactgcatatgactcagtctagcccctgtgctttctccaagcctttccccactgatttgcccatctccccagccctgtcaggcaggcaagaactgaggtccagagaagtttatctgagtagcctgagttcacacagcgaactagggacagagccaggactggatccctggactcggtggtcccctcccatccccaagagcaacttaaaaactcacgaaggcaggagggcccgaaggtgcctgcggggcagcagagcttcagggaatctgagcacagccactggaagaggtccggggcctcctgctgcctgaggcaggggcagggtggagggaggtggggaggaggtgctgagatagtgtcataagtgctgttcccattcccccatgcctgaatctgtgattcaacccagcttggacataagacccaaaaggccatctgaccaatgccctttccccatttggcagaagggtaaactgaggctcaaagtggagcgcaagtcccccggcaagttcttagcagacctgggtttggaaggagcacaaccaggacatgggccccagcatgcacccccctgcttctcggccaaatcaggccttatcaccaggcctcacctgtgacccacttccagggaaggccctttgccactcacttgtgaaaccaccagctctccaccagctcctcactcagctccagcaggcggtggcactcgaagtctgacttgctgcacacaccctccagcacctctaccaggcgggtctcactgatcggacagggcagggctggtgggaaacatgccccaccccacccaccaccctcctcaagtctctctccacccttcctcgtgcggtgaaaatatcaaaggagaggccatgaggtataatggaaggggtcatggttctgggaagcagagagacctgggttcaaatctagtggtagatctagtgggcaagtcacttaacctctctgaacctctttgttttgtcatctgtaaaatggggatgacaataccttccctgcaggtttgttgtaacatacatcagttcctgcatctgagcaatggaatataatacccttgctgggtagatatggctaaaaatacatcctataacaagtgttggcagggatgtggagaaattagaatcctcccacactgcaggtgggaatacaaaatggcatcaccactgtggaaaagcagttcctcaataagtaaaacatggaattgccataggacctgccaattccactactggatatagacccaaaagaatggaaaacaggtgttcaaacgaaaacttgtagacaatgttcatagcagcactattcacaacagccaaaaggtagaaacaatgcagatgtccatcaactgatgcatggttaaacaaaatgtggtacagccaaatgagaatattattcagccataaaaaggaataagtattgatatatgctacggtatgggtgaaccttgaaaacattatgctaagtgaaactagccagacacaaaaggccacatattttatgattccaatgaaatcagcaaatccataatttctgcttgactaacacaaattagtgattgccaagagccgagggaaggggagaatagggagtggctgtgtaataggtataggattttttgggggggtaatgaaaatgttctggaactacatagtggtgatggttacacaacattgtaaatattattaaatgtctttaatgggaaattttttatgtgtattttaccacaaatatatacatatatatatatatatacgcatatatatacgcacatatatatacgcagacatatatgcacatatatatacacacacatatatatatacacacacacatatatatacacacatatataaatatttgatgtcttatatcctgtatttaaagggtctggcacagtgcctggcatataggaggtgatttaaaaaagcaagcaacgcaggagccattacaaagctggaagtgcctctggggttgtcttagccaatcccctcattcctgaatgaggaaactcaggcccggcgaaggaaaagagaaaatgaccaatgttacataataacaaaacctttatttctagtgggcatcccagttaagccttttccacacttctatgaaataggcaaaccaggtattaatatccccattttacaggtgaagaaactgtggctctgagaggttaagaaccgacaaccaggtctaactctgagcctttgctgactcctcttccatctgactttgaaaagctggagggctcagggctcgcctttctgtatccttcccatgcctttctttacatactgactatataaatggctttctgtattacatatattgactatataatggctttctgtatccttcccatggctttctttacatactgactatataatgacaactctcaaattcctgtttccaattcctactcttttctgaattccagatttgtatggagtctacctggatgtctaatggacatttcagcccaatacgttcaaagaacaccacatcccacccctcccctaaaccttctcggtttcgcatctcaccatcttagaaaacagctgcactactcacccagttgctcaggcccaaaatctagtaagcatcttttattctactgtttctctatacccataatgaatctatcaccaggtcctattgttctctctgcaaaatatacccagactgtgacctcttcatcatgtcctccactagataccacactagcttgtgttgcctttgtacctagatgatgcacttgcctcccaaactggtctccctgcttcctccgcccttgccccttacaatccgtttgctacatagcagtgtgagtaatctttaaaggtgtagagaagacagtatcactttttctgctcatagccttccaagagcttcccattacactccaaaaaaaatctaaactcttttctgtagccctcgaggcttaagcctttgccttcaccttctagcactctccccttggctcactccactccagccacttctcaaatacaccaagctcagtcccatcctctgcccaattccctccctgtcacatagctcgcttcttcacttcctgtctctctgttcaaatgccaaaccttgaacaccttgcctcccaccgtcctgcagtctaccgtgcttcactgtttgttcttcatctgacataatattattcacttactcattcactgcttgtcttctctactagaatgtgagctccaggaagggggcattttgcttgccttgtttactgctatactatagatgttcagtgctatttgttgaatgaataagtgctccccaagagttcctagccctacaccagcagagcagagatttggcggggaggggaatatacaccccttcccccagcagccccttacctgtctttgtatttggacaaattctcttcctcccaggcagtgtttccacctccaaagttgtcccggatggttctctccaggccctggaaacagaaaattagtaatagctaagtacagtgcctggcacatgctagcacttcactgttctactgactaggaaactgaggcacagaaaggcaacctgcctagggccatacaactagtaagagaccaagatgaaacttaaatccacgcagatttgcatcccagagttccccactctaaatcgctgtgttcccctctaacgaggctgccggtgcacccaccttgttaaagctgtcaaccagtccccggcaggtatgacacggatggggctgaggcgggggagaagactggggaggtggagagggctggagccagataggtcctgggaggttgaggaagaggctgaggccccagagcatagctgggactaggcccttcgggggccatggggccatctttacccaggctggggacctgcagatagagggcgtggagaggcttcactgaaggagtcaggccccacgcgagaaagaaaaaggtctgttctaaggtgccgtggcgctgggatctgcgttattacaagcaaaagaggccaaactgggtattgcaggggctgtggggatgggtggggaaaggcgcataagatgcaattccagaagagaaataagttatcctcgctagcatggggtggagaggaaagtggcctcgctccttgacaagggggcagaagtcagcctcttgtctgagggtctgataaagaatattaggggccggatccgcagaattagggagaagagatcagattccaagtactgaaggagaggaggccagaggggttgtcttgggggaggtgtccggaaccccgggcttggagggaggagcccggatccggatatgaagggaagggatcagattcagggcctcgcagaagggcaaaggcacggcccacgagccggcagagaaggatccagaccctcgtaggccacggagaaggaagaagcgaccgccccagcccgcgggcgccgtgggccgtctcctcaccgcgtcgctgccacagcctgcgtaaaacgcacaacccccacccgcgccgcagtccagggggcggagcttgccgcccagccaatggcgacgggccatgtgccattacgtcaccccacgccagccaaccagaggcggcaccgagctgcacctgtccgggctttaaagggccgcggggctagggaatgacgtttgccagccccgccactgaaacggagacgcgtgtgggccacatgggtagaaaaacagcgtctgcctttatttaagtcccgtcccccgccccaggtcccgcgcctggtcccaccccgcgtcccggcgcgggagtccccgggggatggaagtagctatccagggctggctgaagggcccgggacacttgctccgctctctcttggagccgcccggaacgcggggcgcgaggctgctgcagggcccccaggaagtctggcagttgggagggcagtgtgaagacgggcacggtgcggaaaagggcgggtacggcgtccgggtggagcagcctgtcgaagcaggcccccacgtagctgccgggcgcccggccctgcaagaagtcgggcagcacgcagctgagcgaggcgcggaaggcgtcgtgcgggccgtgcgccccgggcccggacaccccatcctgtagccactcgctgcacagcgccaccgcaccgggagagaagagcaagaccaccacgccgccctcctgcagggtctggcgccgctgcgcgtgaaaccaagccacgggcccctgcgcgctcagttcacgacggctccacaggtctacggccacgcgcagcggcagctggcacagggccgacgccagggcgcccaccaggcgctcgaaacccgagtcatcggctgagtagaggagcagagccgcgcggcccctggcggccgctgccggagaaaacagatggggagggaagaggtgagctggcacaggcctggctccccgggggcggccctccgcccagcgcttgctcccactcaccccccgagcggacgtcctgtttcaagagcctcagccaccctgttaggggagaggggcggaggcagccagtgagctcggccgccgctttccctcggagaactcccacagccactctggtcctcccccaggggaatggggagccgggaagcgctcacctttcgcgtgatcctttttgagaaggaggatgagggaaagcgcagcggcaaagagtaggcaggccagccacacgagggcccagcgcttgtggatgtctgggagacccagagaagaagagttagaaacttaccctccacagagaagaaaaactgagacttaacagaaatgaattgggccgggtgcg

SEQ ID NO: 9982 - DNA, 6000 bp, Homo sapiens; identical to SEQ ID NO: 3394

SEQ ID NO: 9983 - DNA, 6000 bp, Homo sapiens
acctggctactgtttttatttttgtagagacaaggtcttgttatgttgcccaggctggtcttgaactcttgggctcaagagatcctgctgtctcgtcctcccaaaatgctgggattacaagccggagccactgaatctaccctaagtatttaattttatatatgggaggcttcactcttgacctctaattaaggcccataaactggccaggcgcagtggctcacatctgtaatcccagcaatttgggaggccgaggcaggcaatcacctgaggtaaggagtttgagaccagcctggccaacatggtgaaactccatctctactaaaaaaacaaaaattagctgggcgtggtgatgtgcgcctgtaatcccagctactcaggaggctgaggcaggagaatcacttgagcccgggaggcggcggttgcagtgagctgagattacaccattgcactccagcctgggcaatagcacaagacttatctcaaaataacaaacaagaaagttgaggtgaatacacagctagcaggtgacaaatccaggatcaaatacagaatcaatgcctgattccaaagtccactttctttttacagcattactctgcctcagtggtctctcaaagacacacagaaaaaagcaggagatagcctctaccctttaaggaagggaaacaaggtgtatttgtcagggaaatatgtgtcctgattttctttcatccagattatgaaagataatctcctttacttaaagtcaactgattacagaggttaaccacatctacaaaataccttcacagcaacacctggattagtgtttaattgaaaactgggtattatagcctagccaagttgacacataaaactgactgttacacaagatgctgcttataaatgaagtcattctgtccaagataaagaaaagctggcctggcatggtggctcatgcctggaatcccagcactttgggaggccaaagtgggcggatcacctgaggtcgggagtttgagaccagcctgaccaacattttgctaattttgctaaatgcaaaattagccaggcgtggtggcgcatgcctataatcccagctactcaggaggctaaagcaggagaattgcatgaacccaggaggcggaggttgtggtgagccgggatcgcagcattgcactccagcctggacaacgagagtgaaactctgtctccaaaaaaaaaaaaaaaaaaaccttccacatatggatagagctataagcaaaccacaaaaccacaagtgggtcctgcttacccctgtgggaaattcagatcaatcaggacctagaagatttgtgaccagaaaatatgtgcttatgtttataaacttttagccaaaatgttgcccgtttcctcattgtgaagaaagcaggaaaacaagaagagtttgattttttccataagatggggaactgctttgtcaaaatattgatggagtgacttgtggcttccatatgacaaaacacaaaacaccacactgcctgggcacgcaccatggctcctctcccttccactgcccctaacaacttggtccttggagtagaatgtgaagatcccactcctgcaggaacgcagtccaccccacagagccatctgcccctccctcggataccagcttgtaagccgctctaactcattgttctctcgtagcctggtcacccttggctcaggggtgaggttacaggcaatagtcactggcacagaaggaagaaaggtgtttccttcttgtgaagccaaaagcagtgacaggaccatcctctttgtggaagtttctgggtaaagccattagaattccctttttttctgcagtattcacccattcttgtgatcaggcaaagagtggcttcccccactggtgaagacagtgcccttggagactcttaaggcttctctttcaggttgtgcatgtttaggatgggagcagatattcagatggagaggagcctccattagttacaggacgaagactatcataagatgcccattagacctgagaggccagtaggcatagagagactgatgaagatgggcggtaagggaggttgtagcagagagaatgcatggtatctcccctctcaatcccctattggtttccaaaaggcaaaggctggcctcattgttttggcatcagtagaagagaaaatttagatatttccagaagcagctctggctccaggcaggtagaaagatcttgctgagctggtctgctggaaacatggaggtgggggcagtgatttacctgtgtgcttttcaccattccagccatcttcttacaaatgaagtgacgcagatgcaaggtgctgcaaggcccacctcctcctgctctgacaggcagacaggaaaccaaagcccctatctgagcagcctctgtctctcccattcacctccagcttcccatgtggacctttgccttttccttcttggatggtggaaactcctccagatgtcaagacttgctgtgaataaagttttaagaggaggtcatgtatccaaactgatacatgtgtatttcttcctgggtagagggtgtctacaatccttgggatgggaaaacatcatgtaacctgatcatacaatccagaaaacatgggccactttggatctttgagggaccagtgtgtaattgagggaagttaggtcataagagccaaatcaccttcccttgactgcagataaatccattaaggcttgccttatgctaatgaccttgttttgaattaaagtcacaatgttttctttttaaaaaaaaaaattcactcctccaactttgccattaagtactgctccaaaccccccactcatctgccaatgggtgatgctctttccccatgatcattatatatctctgcatccccacaaacatccaggggaggagatgtgggaaaagaagggcctgtgggctttagagttatgagtaagcatggcaggagcagatacagaggagggaaatctgccagctgccacccttgaaagccagcccatttcttctgagcccacagccaagcaggcatacctggaagggtgagggagtggagggccggctttcactctagatcccacctgtgttcccacacccagagtggccaagagcagtctctaaaatacgccaacccatgatttctcaaaagtagggattcttgtcttatggaatcagtgcagcgggggtgggtgtcagggtggaattaggtcttcctttaaaaagaagtttcagtgcatagttatcaacatcactactgcacaaagaaaaataagccttgcagcttagaacaaagggtagcaaagtattcaatcaccaggcaggtttgtaattttgtttcgttttgttttttgagatggagtctcgctctgtcgcccaggctgcagtgcagtggcacgatctcggcccactgcaagctccacttcctgggttcacgccattctcctgcttcagcctcccgagtagctgggactacaggcgcctgccaccacacccggctatatttttagcagagacgggatttcaccatgttagccaggatggtctcgatctcctgacctcgtgatcggctcgcctcggcctcccaaagtgctgggattacaggcgtgagccaccgcacccggcctgtaattttttttttttttttaatgtttatactttccttaatcctttctgggaataacctcctctgggaccactttccttcctgttctatgtacctcagaagcacaggaatgaagcctgaaaaaatattatcttgctccctaagtcactttcctttctgatctagttcttgggtgatgaatgaaggtggaaagtagcgaaggttgctatgaaaagcttggactttattaccagggccactgcattttcaacaggagtgtcaggatcccagcagtaatgcttttccatggatcagccagacaggcataaggggaagttgggagaccaaaaaagccattgacagattccaggtgagcaataaaccagaattttgaccaactagaccagcgctgtcctacagaaatgtaatgggagccacatgttaaagtttaaatgttttactagccacatttaaaaagaaacacatgaagttattattatttgttttagagacggggtcttgctttgtcgtccacgctggtctccaactccttggctccctcaagcaatcctccagactaggcctcacaaagtgctgagattacaggcctgggccactgcccccggcctgaagttaattttaatatttcacctaacccaatatatccaaaatatcatttcaacatataaaaattattgagattttacctcaccagtcttagacatccagcgtgtggtttatgcatacagtacatatcaattccacactaaattttcagcatttaaagggaaatatggtcctgaaaaaaaaacaacaaaacaaaaaaacgcctgtttaaggagaaagcattccacactgcttgttttaatataattaaaattaatgtatcaattaataaatcaatagcccacgttggctagtggctgccttactgggcagaccaggtctggattgtaaatacgttcagacgttccacgcaaaagcaaagttccctgcagacgctccattaagttctgggtgcaaggaagcgcggatccttcagttctgggcgttttcaccaggtggcactcagaacaccctcacgtgacaagcgtcccacccggaagcgaaatctccccttctacagagttcctccggcgcttcctccaccccgggatacacagaacctcatctcctacggtgctgaagcctgcagcagggcaggatgggcaggagagcagagccgcggagtctgcggcgcgggtgaagagcggcgcgtaattcccgcagcaagattgttccgcgcccgcagcccctggactagcaggatccgaaccccggcggctgcgtgcttataggcgcagacgtcagagagcccgcggcttaaagcgcgtcgcctggctagcgccaccccctagccttcttcaaggcctccagggctgggcccaagcgcccgtcgacggcaccctgggcccagaggactcgcgggcctcatctccaatgattcagaactcacgtccgtcgctgctgcaaccccaagatgtcggagacacggtggaaacgcttatggtgagggcactgcggggaaggaagggcaggggtccgaaccgcgggctcgggccggagaattcggggcgttgctaaggctcggctacccttttccgcgccccagggtgcgctcaggatttaggatgcggcgggagaggagtctgactaagggaattgagaagggggcagggagtgaggagaggccaggagctgcaggccagccctgggggcaggcgctgtagggccgatgtcccggtaaagggcggaattgccggggcctggactggacgcgtgccggggagtgtgcccgcgcggcccccacaaggtgcgagtaggctgccaggtggaagggcacccgggcagatttgggacggtcacaaggcctgataatagcgctgacgctgagaagccgttgatgccgcagcgagctggccgggtagcgctgtgcgcccgcgggcggcggcctacctggaggggccagtcgtggcggcacccttccagcctgttgggacggcgcgtggtcccccagcgacgccacgcctcctccggcgttcgattggtcatcgtgcccgggccgccgggccgctattggtggaggcggaggcggggctggcggcgtggttgcccggtaggtggagtcggggtgcaaccagtctttagacgctaaaggcctgaggccactgcagctgccgcagctctccctctgaggtcttgcgcccgaggtaggggcggcttttatttttttttttaatccttaaaggcggagacggcggcggtggcgactttacgttgacgtctttgaaaacctgcttacctttttcagggctctccagccctcgcctccagatgtgaattggacttaggatagttt

SEQ ID NO: 9984 - DNA, 6000 bp, Homo sapiens; identical to SEQ ID NO: 3405

SEQ ID NO: 9985 - DNA, 6000 bp, Homo sapiens
ataaacccttcccacacctagagccataatttgcaaaccatgccagtgccagcttcaaaggctgtaggtgcctcaaaggctgccactatgggggcagccttttgtatctatgtatttataaatgattatatctaagaactcctttaataaaatggtcactgggtggtaaaaagttagaaaagtactactagaccacaggaaatacctcttgactaatcaactctctctgttgtgattctatcatgtctaagaaatctctgggttattaattcagctttccaaatatccagatgccaggaaagggctaccttagacagtgaccttccaactgcttaaaaagtatacctcactgcaaatctgaaaaattggcattacgtcttacaccttggcctcatatggtctaatcagtaactgagagcctcatcagctctggagaaactgacaaaaaaatcaaataacggggtttacaaagtttaacagattctaaaacatactctccctagaaaagtagtactatctggcaaaacgtggcctgatgacttgttgatcttcctctggatcttcctctggagttacaagagtaagaattatatgagaaaatggatgtgagtataaagtatataacagtgcataaagaactaactgtacttcagcatttgtcccaggtgcctggttccttaatgggctatcctcacttcaagatataaagggatttaggttccttcaaaccaaacttgagctgattaattgcaatagccataagaaatctgagtcagctttctaagctgttaaccaaaaaacctgacagctacatccagacccacaattaatattttattgcccactgcctaattattaactgaccacagttatactcaatttcagtgtaagaaaaaccattttagctgtgcacagtggctcatgcctgtaatcccaacactttgagaggccaaggcaagacgatcacttgaggccaggagttcaagactgcctgagtaacacagtaagaccctgactctacaaaaacttaagaaaaaccattttagtcattgtgataagcaaaactgtaagatgaccccaaatgacccctgccctgtgaatataatgagctatcactctcataattgttatattacagggcaaagggattttaaaggcatatttaaggttactaggttactaatcagttgaccatgagttcatcaaaagattacctggatgggtctaaactaattacataagcccttcaaatatgggtctagagggcagagggacgtacttctgctgtcctgaaagaaagcaaaatgcctacaggggcacgtggcaaggagctgctggtagcctctaagccgaaagtggtcagcaagaaatgaaggccccagtcctataaccagaaaggactgaattctaccacaaccacatgggcatacaaaaagatcctgagctccagatgagaaagcagcttggacaacatattgattttagccttgcaagaccctgagcagagaacccagtcatgccatgccagacttctgacctacagaactataaaataataactgggttattaggcactaaggttgtggtaacttgttatgcaatattagaaaactaatccagtcatccttaggaataagccttgaatcccttgtccctataccatgacttttcattatccatcaaggctctactcagatgtcaccctgatcttctccagaaatgccttattttgcacaactacaacaccctgtatatatcactattacactgaaagtacttgtctctcaactccattgtgtagggactacatagacccttcaaagcaaatgcaacatccagcagaggacctaggcattcactgttcataactaacatctggttcatttcactctccctacaacacctatggattagtcacagcagagacacagccattgaatcctcatcacagcactgttgtaagtcactgccaaatcaatttgacatcccagttctaaaagagcagtcaaagtaacttggggttaattcttcaaataaacctttatattttaggtaccaaacttattaaagcctttcatcatgttcttaataaactaccttctgatctaaatgttttctctgggactcatgctttccccaatttcaagactgaaactatttagtaaacttggatttacaataaggctatgtcccttcagaaaggactcttttccctgttatctgtggaactgtttgctggtttttttgtttttattttttaaatttatatcacataaactattattttggggtctcactctaaaagagtgaggtcagctgccatctctgagctgagggaaaaaaataagggatgattctgcaggcataaggaggggcgtatatgttgattttttaaaaatatacataacataaaatttaccattttaaacatttgtagctgtacaattcagtggcatgaactacattcacactgttgtggaatcaccaccatccatcaccagtacgttttcatctttccaaactaaaactctgtacccactacacagtaactccccattctctcctctctccagcctttggcaacaaccattctattttgtctctaagaatttgactactctaggtacctcaattaagtggagtcatgtattcatccttttgtatctatacttctataatttttaagttttagaagtacttgaaaaggctaaaaatgttttaaaatatttgtattcatgtactacatatatcccaagaaattacaatgtctgtattacttcttgatgtttcttttattgacttagttctttaaggagtttaaaaatccaaaataggtatttgttgttaaaacatatttttttttttttttttgagacggagtctcgctctgtctcccaggctggagtgcagtggcacgatctcagttcattgcaacctctgcctcccagggtcaagcaattctcctgcctcagcctctggagtagccaggattacaggtgtgcgccaccacgccccactaatttttgtatttttagtagacctcaggtgatccgcccgccttggcctcccaaagtgctgggattacaggcatgagccacggtgccaggccagaaatgggattttgccatcttggccaggctggtcttgaactactgagttcaagcgattcaaagtgctgggattacaggcgtaaggccaccataccaggccacattttttgtttctaagatcacaacaattcacaagcaaggagaaaaatatatggcaggcagaaagaaaggttacaaaataattatcaaaagtagaccacgaatggccaggcgcagtggctcacacctgtaatcccagcattttgggaggccggggctggcggatcaccagaggtccggagttggagaccagcctggccaacatagtgaatatacatataatccaaaaggattattttaaacctttcgtacacaaagtgattttatttgatccagatgccctgtctcaccagaagcattaagctatagaaacagagctcttatatcttagtttgtgactagcttattattactaaaaacctctttgttaatgaacaaaaacaattcattttcacgaagaaaagctaaacactacaaataagaaaaagcacactcaataattcaccagcaccttaaagtatattcttcttaaactagttttactatgtgtgtatataaatacacttacatacagattctttttcccaaaactgggatcacattttacctgctgcttctgtcttttaacacaaatatccttctgtgttaatacttttctgaagactctaacactagctgcgtaacattaggcaagttacttcacctcttcgagcctcactccttcatctataaaagaggaattatagtattatctacctcacaggtttatgtgagattaaataatctgtgtaaatactaagcaaaatgtctggtacatactaatgacacagtaaatgttgactttttatggctgcataataacctatgaagcataactaattgcctgataaaatttaaccaattctctattgttggacatttttggctagtttttaacctattaaaacaacattgacgtgaaaatccatagagctaaatctttaatacaacctaaattttcttagaataaatttctagaaatggaatcctggctcaattacattttatacattcccaagtggaagtgccttacattcactaacatgcccatttcctcacattcctcatctctacctcacttttaaagtttatctttgtttcttaattaacagtgttttgtaaaattgtaaatgactgcaatagatggtatgaaaaggacaatctttaccatttaaattttaattaccatttgcacttgagaaaagaagcaacccttcagtgttgtgttctgatgtttttctcaagcactgttttactacacatgagctttacatttaaaaagaacaacttcaatttatagtttcagaataaacctaatgcaatcgttgtatgttaagaatttagaaatgcctccaagttagtcaaaactcagcttttcttgcaaccgcaagcaaagaccaaaaaccctaaaattaagggacagatctgctcagtctgttgaaattcaaaaaggctgggaagaaattaagcagaaaccgacgtcttcgctgttaagaccctgtgctgccagcatcgaaacatctccagtgaacgcttaggaaattgtttctttaaattaatactacttaacacgcctccttttccctggaaacgcatttcctaaagcaacagcattcctgaaaaacaagcataaccctgtccgcagagcagcaagacttaaaaagcagagcagagctccggacaggcagagtgtctgcccctccgcccgccagtcccggattaaccaagttatgcgaagtgactaactcgtgacagcctcgggcgctggacgccggccacgccgccacgtctttcaggtcccaccgctcctaccagcagcctgacccaggatggctctactccccagccttcaatccctggacctgggtttggaattaggagacttccgtcgagggtcaattgtgcgggatcctggccattccatacaaaatctcacgactggcaaaagagagggggacccctcgagcagaggtcagatatcacaagggacccgggtttttccaccccgccctcattcccagcgtggggtctcagatgagtgggaaaacctcaaatatggatcagaaatcatgcaagttcggactctggccttaggagaaaactcttaacggagatggaatgtcacgagggatccagccacccccatccactcattgactggatgaagttttgcgatgggaaaatccaggtcaggagttacggacgacctgcaccgcccggagctccttctgggtccggagtttgggaaaagtgcgggttaggggttaaaggtcacggaagaacttccccactccccccgcctctttcgtccgcgggccggttcaagaggtattcggaaccaggggaggagagcggcggccatcgtacctgagcaggagccagcgcctgctggagctgctgctgctcctcgctgatcttttgcttcagtttcttgaacatggcgcagcgtacgtacggtcctgagtgtcaacgaaacctgaagggcgagagcccggggagtcccggccgcgacggctacggcgacttctttacaccagggacagcgggggccgggcctcgccgtctcctccttgaggctgtgggcaagtccggacactcgtcctgagggtgtcggcgtcgccgccgccgcgtctctttcttccgggtgccactggctggcctcggccccccatccagccccgggagccgcggcggcgacgacaacggcagcaggtgaactgtgcgccaagggcgcttgcgcggcctacgtggagctcacagaggctaactacggagcaccggatgggacaagcacaatgtcgggtcccgcaca

SEQ ID NO: 9986 - DNA, 6000 bp, Homo sapiens
gctgtaatgggctgtgagaaagagaacacagcccctgcttacctggtgaggggctctccagccattcaccagagggctttggaaatagatgggaggctagtgctaaagggaatgaagactgagcttggaatcaagaggccagagtttactcccaatcctgccactcgctaacctcatgatctcaggcaagacagttaccattctgggcctcagtttcctcatttgataaaacaaaggggaagatcacgctgattgctagggccccttgcagggctgagattctatgagtcctctgttctcaggagcaaattcaacgttttctttgttaatatcttggattttacatttttttaccaaaagcttcacttacctcttttcccgatttgctaatattcaaaaagaagcccactagtaactatctctcttagcaatttcctgagcatgtttagttttttcaatcaagtacagcataaaattacgacttccttttgttcatttaatttttttcagagtggaaaaagcactagcaaaatatatcaagtataatgaagtggtaaatgaaagaagtcttaaaaaccccaatttaaacatggtcatttttcaatattcaaatatttgcatatccaggatccattctgagtttaaaaacctggcaagatactcacttgagggcaaaatgagacttaggttaactgacttgttcaaagtcataaagcaagttaatagcaaagcccaaatctttggactaagatgcccggaagtctttctaccatagattgttatcttcctaaacaacctgtctttctagattctctgctactatttcttggtttagaaacatacacttcacatactgaagactttactgcaacaggactgtggccagaactgtacttgtctcattaggcttaccttgctaaggtaagaaagtgatctcactcaaaggcattgcatctccactgaccttgaataggaaatacatattcatatcttgccaagagttcaagtgccaagtcaatacatactacgaagtctatggtttggaggagactatgaaatgatgacatttcccatgcattccaaatgtattaggatgtatgactgaattaagtgggacatgcacctggagccttctcaccttcacagttgacagccatgaatgaactggccatttgtctctggaaatctgcttccgaggaggaaagcaaatgattttttaaaatgcaaaacaggaaggaactaaaggcagcatggcatgagcctcattttttccccaacaggtcaacactgagacatcacccctccacttctacttgagactttgttactttccatggctatcagggtgtgtgtgtttaaatatttctacatttggtaagcaggatctgttacccccttttctcaaatatgccctaatgagacataggaaacatgctgtcactctcccaaaatgaaacacacatgaagactgtataacttttcctctaattaagagtaagctttacccatgtattactagcaatttttctatcactgtaatctcaagttacaatgtctagaagacagatgaagacctgctggccagactatgacagtattctttacagatattcttcatttctatcattattttattacttattttattattttttagcgatggggtctatgttgcccaggctggactcaaactccggggcttaagggatcctcccacctcattcttttaagacaaggtacaggcgggacaaatgcaaagtgtttaaaggaaacagatctacaggcaaaacggtaactgactttgtacatttcaagggtgctgggctaatggtgaaaatgcaaaggaaaaggcctaaaacatggccatgtctgcttaggactgggaacagaaggtttcctgctgggcttttaagagctctctatggctgggcatggtggctcatgcccataatcacagcactttgggaggccaaggcaggcagatctcttgaggccaggagttcgagaccagcctgaccaacatggccaaacccagtctctaccaaaaatacaaaaattagccgggagtggtggcacacacttgtaatcccagctactcgggaggctgaggcacaagaattgcttgaacccaggaggcggaggttgcggtgagcagagattgtgccaccgcactccagcctagacaacagagcaagactctgtctccaaaaaagctctctgcaacatcagcaccacagactcagcattgccctgaagctcttttgtaactggcttttattggtttaattaaccaaggatgggtgggacagagttactccatctctgtcatgttattgttgccggcttgtggctagcagcagctctttaccttttgtatttgatacctggcctgcacaattagcaccttattataggctggcctctcttctaattgccacgtctcaattgagcactttattttattgtcttgttcatgcagtagttcgaggtcctgggctcccccactataataaattctaaactacttttaggcaggtgttgtgttttgagtttatctctttatgcccataagaacaccagggactcacaggcatgcaaacacactgtctggagtttctagatatctgagtatggcatacggttggaatctgggtctccatgcatgctactcaaccctagtaccagatctatcagccatctttgccattgagggctctctccttagctacttggagttaagctcttattctgctcatatataaccttttaccttgtttaaaatattgggttgcaacagacacagcaacatcccatcagcaccacattccatgttcctctagaaaaatgattcaagggatatgagtttatgcttgaacagacttcttgcttttggaattaagattaactatatagttcataggacagttaccaacgccataacaaaattgggatttccttcaccaaataatctggtgaatgtaataaaacctggggggaggctgtgtaaggtgatggttaggagtatgggcaggagagctagactgcctggtctcaagtcctggttctgccatttaccaatgatgtaacctgtgaccctggttaaggcatttaacctctctgtgcctcatttcccaatctgtaaaatagggataagaatacttgcatcacagggctgttgcaaggattgaatcagttattttttatttttatttttttttgagatggagtttcgctcttgttgcccaggctggagtgcaatggcgtgatctcagctcactaaaacctccgcctcctgggttcaagcgattctcctgcctcagcctcccgagtagctgggattgcaggcatgcgccaccatgcccggctgattttgtatttttagtaaagatggggtttctccatgttggtcaggctggtctcaaactcccaacctcaggtgatccaccggcctcggcctcccaaagtgctgggattacagatgtcagccaccgcacctagcctggttaatctttataaagtgcttagaacaatgcttggcatacaataagcactatgtaaattagtgttgaaaattagagtataaggttttagaatacacaaacctacagaatagtatgccccaattcatttattcattcaataaatgaatctaatagtgatggaaaaacaagacggtttaatactgtgccatccttgacttcttgatttttttggttatcatatgttctttgaattacttcaatacactaaaaaagaactcagaatttatggattttaaagacgtccaatgcactattacagcaaaggtgataaaaatgttctggcagcatttaagccgaatgattagtgaagactgtcattgttttagtagacaatttaaaaaggaacattctactgtttacatctctcttacctacttagcctaatatataagacatcgttcataacattatttagcaaatactgcagacccttgtccagtatggaattcccgtcaattgtgagggggggacagttcaaatacatgttctatattttaagacattggaaaatctttatataaagataactccatggtatctgaactcaggcttttcttcctgtgtctttctgatctgtccatttgctgtcacctcttaaatcctcagtctcctcagatatcctagcttctaaaatcccacttccagggtctctcctttctgagcaatctctagcacatctagaaaatatcatttataacatcagcaatctcatgttatcttatcacaacagagctcctcacataaaacccagccgtccaaccacacacaaacacatctaagtgccacaacaggtggggcacctgtgccttcattagggaggaaatccttccggcttcacctctttcagtttccctggaaggcaaagtccaaccctgcaagctgtcttccttttaggtgcccctgtggagaattacgtagagacataagaaacatctaatgtccagtctacgaagaactgatcatcaattttggagctcagcagtttaatgcttaagaatgtgagcaagcacttcctctctataaccttatcagacgacctcccaatcccactgtgcccactgatgcgaccatcatagctctaaccaccatgatctgtggttatgttggccctggagccttcatctgcccagggaacttctctgggcatagtatgttttacttgtcttgtgttctaaaggtagcacaaagcctatctatagtaggctcccaatagttatctgaaactgtatttgaacccactatctgataaataccatttttttttttttttggctgagggtcctcaaaaatggaacatcaggaaagtcatcagaattgctttaacctgccctccttgcttcaactaatttgggttaactttctcccatttatccacacggctcctttaaaacttgcaccatactttgtcagccccgccttaatgagttcctttggtgaccccagcttcaccttgcagatatcctctccgggtatccaatgcccatactcccactcggccatcgcaaggggttggggttggctttttttcgggcaactgctcacagctcccagtaatcacttccatcaagccggggtttccagttcccgctaggaagcgttggggacgtccgggcactgcgcacctcgccagtgccggttaccaagcgcctcctcccccgtctgtgggacaacgctctggtaagcacccgaggcaagaggtcccagcaaggtaatgggacagcgttcggtcacagagagtgagcgagccagcgagagatattcctgggtggaggggtggggacgccttaggactagtgtcccccattcccggacccttcccaccaagaactacctagggagggctgcatcgcctctccagccatcctagggactagagaaatggaggggagaagagcagggaaacagcacccccgggccaatcacgacgtccgcccctccttagtcggggtctctctctctctctctctctctctcacacacacacacacacacacacacacacacacgctcctaagtcaactccagctctgagcaactacgccgcacgcctctcccactgggagtcccccggcccgtgaggctcgcctcaccccagcttcttcacccctaccccagtttcccttcccaactgaccgtgaagccggaggcagttccccagtcccagaccccggtggggctcccgccgccgccgccgctgccttcccctgcagtccccaacccgggacccggcctcgggcttcggcgatggctcctcggaacgaggcgccgcggctctctggactcggccagacaccgggcggcgcgcaggagaagcccatcgagctctcccggcagtggcggcggccgcggctgcaggagcggccgccgcgcaggttgatgacgcgctgacgcggggcgggggggggtgggacgtgggggcgcggtccagaggaggggacgcgcgcagatgacgtgcggc

SEQ ID NO: 9987 - DNA, 6000 bp, Homo sapiens
gacaccaacctggagagcagccttcacccagagcctccctatgcactggggagcaggaccctccccacagctctgtactcccagggtgggcaccagctccctgcctgaggctggtggggacatactccaccaccgtcccctacagaagcttgacatagatgggctttagtgctcactcccacctccacagccctgcctctcccccgaacacgccctgacagcccacagcagaggcaccacggaggacatggaggcccaggccacacaggcagcagttctcactgtggataggtggcagcctgggctgctctcggtgggaccccaagccccatgctggataaaccttgagacctgcagtccagaagccaggcaatgtgtcccacccacatccccaccccagccgacgggtgccccgccacacggccccttcccaggctccctggcccaccagccctgactctcagcactctatccaagccaccagtcctgctcccagcctcacacccaactccaaggaaagaggaattcctccacagggaaggctggcaggtgctccctgcactccacccctccacagtgaccccttcccagcctcagcaccccatacccacccagacctgtgtggccccctcctgccttgctccacatcgggccctcacttcctggtcacactcactaccaaggtccattgactccaccccaaactccacaaaatgcccacccctccttcctggattgccagggtactcggctccctccacccacaaccacctacagccaggtccctatgcagaggctaaggccactcttctgacctgcacacgaggtcagcgctgcccagatcctggcgggagtccccatatcctgtcctggcctccactgcctctggaaaagtctcaccacaccctgcctagcaactggcagccaagcactgggctaaatctagaccctgttactctgtaggcagatgactctgatggggacactcccttttcctagcctcagtttccccatttgcaaaaggggcatgaaagctcttttctcatggatgaaagaggaaagggcacacctgcccacaaggcatagtcagcagtgccacccccttggttgtcagtagggcctgctgccctggatgtgcctgatgtgctggggcctctcacccactcctggctggagccggctacagcaaggctgagtcctgagtcttgagttcaagcctcagccagccagtttgcacagaccatcccagacaccccttgtatggtctggccccattttacagatggggaagctgaggcctgaagatggatgccttctccaagtctaccagggagctgggcacagtcccatcagcctctgtgcctggtgcccacatgcagtgtggggctgcctgcccctcccccaggcctctgtgcccctgtctccactccccgccctgctcagtcaccctgttctcatctgcagcacaggactcgtgaagggtctctattacttattgctcccattctcccggccagaatggctgccctgtgagagcagggcctggctctgggtggttgccactgcatccccaagccaagccagggacccaggaagactcaataaatccccgtgagtgagcgaatgaatgaagggtatgcggagggccagccaggtctgggtgcggcagccccccatgcttcttcactcctgtttcactccccacacactccctgcccagtgtgtgcacagcacacacccactgctcaggtggggaaaccgaggctctcagaagcaaagagctttggctggaatcccagagcaggaactgcagggtgctcctagcaggctgccagctgcctttgccggacagcgccccaagaacagcaggggaggagtccccactcccgcccccgcctcagagctcaaggaagacccgggagccagaaaacaggctcctcacagtggcagtggggccggggctgggagctgagcacatgtgaactccaaagaaaacatgaatcactcaccgtttatcagttcaaagcaggcctgcaattaccaggggctgggctctcccctcctctgggataattatacacgtcttaatgcaattatgggccctactttttgtattcaacaggagggaccaggctaagaagccaccatccaaactccagcctggtcttgggcccaccgccccaaactccaccctcaccccactgccccaacaaagtctgctgggaagggacttgcctggggtcacagggttgccggccaagaaagggggagccccgagcctagggctgggtccctcatgcccagcatctaataaaggccagtgacaatgcttgggccacttcttccaccttaggggtataagacttggggctcagactcaaggtcacccaactagtcccagcagggcagggcccaaatttcgagcttccagagactggaccagccagccagcctgcagggctcaactctcataggcttgggtctgcctaggaaaaaatgcattcattccaaagctgggcccaggtgccagggtgccaggggcccatgccggggctaggaggggagcatgggcagatgctgcactctaccgaggagcagagctggccactgtggccggggaaaggcctcaagagaggaccaggtagcctgggagctggtgcaggagggtgggcattcgtggtgggggtggggggcagaacaggaggagcaaaggcctggggtgggaaacactggctgtgcagagggcagtaggaacggctgtggctctccggcatggccagagctgttctaggctgaggcagagccagagccagggcaggggaggctagactggccttgggatgccgatggggctagccagggagagagaggcggagagagaccccgcggtctgcgtgcaggagccccagcccaggggctcctctcctggacaggaggggatcgccgcctggtggaacgccaagccaacagtgtccccttccctttcctggcctgagtgacaccaaagctccttctcaccctgagaaacaaaggcccccaaagccctccccacaaggaagagtccaatccccccaagtcctcctgcgccagatcctgctatggctcaggcaggttggggtgtggggctgccatcctgcccagtggctcacaacagcagccgggggggaagacagctgctcctggcactccgcctcccccacaacgggggtcatgggaggtggtcccagtggttctgctcccgaccagtcctaggggatccggctctgaaggccttggagtcctgctcctgagaaaaagtgcctacctttgcaggccttcccctggggcacccgctcctcccggccagctgctctaagctgctctgtgcacgggggctttcctgggggctcaaaacaggcaggcaacgaccttggggggccaggagtccagcaaagggctgtctgctttgtccacaggcacctcatgtgtcccccacccccagagcacacactgaggccacaaacccaggcctccgcccatgctgtcctctgcccaaaacgcccttcctgggccccactggcaccccccaggaatggaagcctggccctgcagcgaatcactggttcacatgcctgcctctggcagggggctgggtgctcctcaagggccgggcagcatcttggtgcccctggtgcagcacctggcctctgccgcacaccccaagccgcaggaaatcgaggggacctgaggcaagctcctcaagggcccggggagcagaaactgcgccccatccctgcaccgacccccaaaccggctacgtgtgaaaggagatggggcagcacggagcagcctgagccacaggagccgcgctgaggggacagaggctcgaccacgtcccctccccggcacacacacccctttctttcaaggggcgtggccccagaaccccacacaggagcctggggcagatcgccgcccggggccgcccctcggagcccctcccctcctttccagggctgcacctgggacctcacgccgaccgaggggcctccctggagtccccactcccccttcccctggcagcccgggatcggcccgctgcctccagcttcgccgcacatcaggcccgggactatccaggaagcaatcggaagcctccgggagaagcggctgaccctggagaggccccgagagggggaggccaaggaggcccgagcggggcggcctcctgggcggcacccagagcccacctccccgcactccgggccagtgggagcggtggcagctgtggtcgggaagccgctccaacttccaccccgcgccccagggccggccgggggcttagcctgcacgacctcctccggcccccgcggccctgctgggaggctccgatccctatccgggcctggccaccccgtcctcgcccgcggccagaggtctgagccgaggtccagcggccgggacgggcctggacaccgcaggggcctccccgcggggccgccgcaaactttctccccagcctccgtggaggggcagcgcccgccccccgccaccccggagctgccgcggggctcggcgggcccggccggggggcgggggaggccgcggcgctggatcccgggccgcggtcccagccccgccgcacgggggtgcggtctctccgcgtcggcgccgcgaccgcgcccggacacacgcggacgcctgggccggagccgcagggacacgcgggccgcggacacgcgcgccgcagtccccacgcgcgccgcagtccccgcgcacaccccctgcctgccgcctcacgagagggccgccgccggaggccgccccgcgcccacccacgggccgcccggccccggaccccagcccggcccggcccccgcccaccgtcccgcgccgcggggaaagttgcgccccgactcacccgccgccccggggcgcgccccgccgccggccatcgccgcgcccagccgcccgcgccgccgccgccgtccgccccgccgcggggccgccgaagccgcgtaggccgcccaggccgaggccgccgccgcgcccgggctccgctgcgtggccgcgcagccgatgcccagcatgaatggggcgccgagcgccgcgcggctgcggaccggcctcgctctcgccgcccgcggagccccgcgccgcgcgcatgcgccgcccagagcccgggggcggggcgggggcggggccggcggcggcctccagagggcgctctgccccgcgccgcgcgcctgcaggggcccaccgcgcgtcttcaaagggcgatacggctgcccgcctcaactctctgggcgccggggccgcgcgggcagttccgggagccccccgctctcgagcgggctagcccgcgaccccaggaacagggcctggctcagtgtgcccaggctaggagcatggcctcctttcacggggggggaaactgaggctgaaggaggcaatcgcagttcccagaccttgcggggccgggtgttcccagctctcggcctcgcgcgttccgctctgtcagatgggcgggcacctgcgcggggagcccgggcgccccctgcaggccccaggctggtggcgcattcccggctggggacgcagcccagggaggaaagtcccgcggcagaggcgtggcgagacgcgaactccggctgtagcgtggggcagcggatctacacggtgtgaggtgtggggctgcagaatccagggtgacgggccagagctgtccaggcaatacccccagcctgcatggcaaggctgaggggcagacacccagcactcagttactgtactcacaaccgccactcccaggcaggaggcatccgggagggcctcccggtggacgcaaccaggccaaggaaggggaagccggcaacaggagcatcgataacagagcagatgggccaggaaaaccccgtcgtgggagggctgagtcccggctggggacttggcccccatctgtagcctgaggggtgcggtttttgctgtgtgaatcacgtcacccctacagaagaggaactc

SEQ ID NO: 9988 - DNA, 6000 bp, Homo sapiens
ccccatgggtaccaacatctatcctgttgctgagcctgactctgggcagctttctgctcctccatcccatcactccccaccactggggctgcatcccagcccccaaatctgtccagagcccacctgccaccctccaagccctcagcactgctgcagaccaggccagccatgtctccagagaacaaggccggccccatctccccactgccatctggcacccaccacagagcctggcacacagtaagtgctcaagatatatttgcgactgagtgaaggaatctattcccgggaggcggcctcagcctctcagccactctccctcctccattgctccttctcaccagctacctaggggctttctaaaataataggtagaagaattgtagtcattgcaaacaggcgccaggtacataaatgatctcatttaatacccccaacagccctaagaggcaggtattcacgagcattccccttctgcagcggggagactcaggtgcctgctgagaccactccacttctctggctaaaacccttcatggctcccaggaccccaggataaagtccagactcccaaggacggtctccccaggcctccctggcccttgtgtcatgtgcttcccactctactcgcctggccacgcagaccccctcgagcctgctcacagccttcgcacaggctgctccctttgcctggatgcctttcctcttctccggcctcacctggcttcctcctgctcctccgccccctccgctgggctccctccaccctcattctccctttgcggcacgcattgccctgtgtataagggcctggtcacacatccgtcctcggctcacctgcccagcccacaagagtagaaacaaagtgagttgccattggctccccagggcacagcatgggactgggctcacaatagggacttagtaaatgtctatggaggtgtcatctggggctagaagtaggagatggtggggtgtttacagctgcagaacaagccagattaggcaactgctctccaggaccaagcagagacctgtgctaataatgtcccttagagtaataacaagaagaactgccatctgcttggtgcttactgtgtactgggtacactgagctgcatttatcgattcatctagtccttaaaacaatgctttgggataaggattgcttttactgtccccacttcacagatgaagaaactgaggcccagagaggttaagttccttggccaaggtcacacagctgggaagtgacaaagtgggacttgaacccaagcagcctgatgcaaagtctaggttctgaatctgtcgctgcatagctggcaacagcctggagcaagaataatgatccctcccccacccctgcccatgctagaggcccagaccggggaccttgagcacctctgggagatactgccaagtggcactggcctgtgcccacagcgggcacggcgaagaggagaagggtgtggaaaacacagggagggtgaccaaggaaggccgcagccggaatctgtggccttggggtggggaagaggcccttcgccactctgtcctggggctgtgtccctggagaggccctgtccccttaggtagagaagctccagcccccctcagctgggtgagtcactgcaccgagggagcggaccgtgggaaccagaatggttcttgccagagggggagggaaccctgggctggcctaaggaatcccacagatcagcttacaccaaagggccgagacacagggcctgaaactactggaggaaggccctcagtccacaggacacttctctccattcagcgactccccactgagacccccagtgccaaacacagttgcctgcgagatgaagctctggggtggagatggtggatgaaccaaccatggcacagggcaagcagccccaccaccctttggactgtctgccctgctcacccaccgtgacctttactttcagggtggccggccagatggtgggcagtcgtgggagaccgacctcgaccttgggagaaggaatctgcattttctcaaagccccagtgttgggcccgcccacagaggaatggttaatctcatgaaattcttgtcacagccatggagaagggacagggtggggccccaaggaaggcttgggtcaccacaagaaggctgagttctgcattttgctgatggagatgcagcttcctaagggaatggcaggcagtggagctgaagtgggctcgccagactcagatgggtggagggtgtgggaaaggccccagtgtcattctggggcctcattcctcagggtgaactatggggatcaacagacccagctcccaaagccagtgtgaggagcaatcccttgccatgaacttcctttcagggaaccacaccaagtcccctcccgcacccttgtcatgtcaacacacatgctgattccgtcaacctggccccccttgctactgcccaacccagcctcagacacctgggccccatgcctgcctgtactcctcctcattccccactgagccccacggccctctcctgcccccaaaacacccctgttcacatccctccattctcctggccctggcatctgcccaccccagctgcctgggacgcccccaaaacacacgcactctgagatccaagtccagaaggcagcaaaggctgggcattaaaaacacagatgctgaggccagacaggctggattcaaatccacctctgctagtgcccaactgtgtgatcctcagcaagttgcttaacctctctgtgcctgtttcttcatctgtaaaatgtgatgagaatagaggctacctgagagggttgttctgagaactgggaattgtgacatgtgatgcccctagctggcactccacaagtgctattgtttaccccagactcccacacctggtacatactaggtgctcaggaaatatttgcagaataggtgaataaaagttggcctcaggcacacacctgtttgccaaccatgcagcctcctcagagtaccgactcatgcccaaatacctgcgtcccctgccacgcacatcccactgcacacctagccctgtcccgttgtaccagtgtctgtgcagtacacctgtctgccctgtgcgtcttcaggccccagcttgctggcacacaagtccatgcagacatctgcagggccctggtgcacacctgtgtgcctccttgcacacctgccacacccatgcacccatcaccaacgtgcaatggtaactctgacaggctcacgcagtggccccagaacacaactttggtcaggcatgcagtcacttactgcgccctcagcatgcacctgtgaccctcacgtgcatacctgggctttatgcgcacctgggtacctgtggcaacttggacccctcccagtacgcctaggtatgcgcgcccatgagccggcactcacttgagtccctgcacatgcccacctgggccatacaggcgccagtagtacccctcgggggacacctgtattctcgcgtgcacacctgggttccacgtacatctggatctctgcgcgctcccacctgtgacccactcagctcacgacccgctcggttcccgcccgcccccgcccccgcccccgccgccgccgccgccgccgccgccgccaccgcccgggtgtacctggatgttgagcttgcgctcacaggccggtcccgtgccctgcaccacgctgtcgagcaccgccaccacgtcgggcgccggttccacgaagcaggcggtgcgcgcagctcggatggcggctcgcacgtcggcgaagcggaaggcgcagagtgcggccggagcagcgcgggccgcgggggacccctggggccgctcgaagacagcaaagagccgctcccgggctgggaagaccgacaccaggcggctgtagaggtcgccgcggcccgcgccgcccgcgcactgcaagcccaactggatgtaggactcggtgagcttcttggcgtcgccgccggcgccgtggggcaggcagatgcgcgccagcaggctccgcgcctggctctccttgtcgcccgcgcgcgcctcgctgttgagcgccaggtacgcgtaggactgtgcacccggcggcgggtcggacgggtgcaggaaggcgctcacgaagcccagcttgtgctgctccttggcgccctgcttgatcttgaggatgttgtcgtcggaggggttgaggtcgaaggtgaagagcttggccaggtcgccgcgcgtgtccagggagcggatggcgatctcgggcgtgttctcgaagcggtggtcctccaggctgcggttgcgcgggaagaaggagctgccgtaaccggtgtacgtggcgcccacgagcaggcggctgccccccgcgcccgcggcgggaggcagaactagccccacggtggacgcgttcgggtggttggccgccacgttcagcatgctggggaacaccgtgacgggctcggcgggcggcgcggcgggcgggaagcgcacggccacggccgagatgttgccccggcgccgcagctggcagaagccctggtagatggacccgcacacgactaccaggccctggccggggtccagctgcaggatcttgttgtagttgtccgtgaggcgccgcgggtgctcgcacgaggcctgcggcagctgcggagcgtgacacagcgggctgtcgggcaccgggcccacggccgcctcggcctccaggctcaggttggcgcccgacagctgatagaggcggttgacggccgccaggtacacggtccccgccgcgccgtccagggcgaagttgttggtgggcgtgggcgaggggaaccgacgctggatctccagggcgccggcccgcgccgcccccaggagcagcagcaacagcagcggcaccgggcaccgcggcggcgtctggaacggcggggggctggcggcggcggcccgggcgctaaggggtgcgccgcccgcggcgcgaggagccatccgggcgtgcgcgggctgcgcggcgcggcgagtgcatggggcgaggcgcggccgggagccgggagcccggaggcggcgggaggcggggggcgggcccgggccgcgatgcgcttcctgcccgcgccagccgcccccgaccccggcgcccgggcccgggtcagcctcgccgcgcagcccgggggcggggcgggggcggctccgctgcggacacgccctcactccccgccccggccccgcccgcccccgggacccccgcctgcccctggccgccctgggccacgccccgccgtccgcgggtcccgccgcccgcgccctccaggacccgcccgcggccccagggtccctccccgtagccgccgccgccgtcgctcgctctcctcgctctttcctcccacttggccgcttggcctgcctcgctcgcgcctgttttctcttttccgccctctcccccaccccgtctctccctctctctgcgtctctcggtctctgcgtctctccgtctctgtccccaccccaaactccgcgcgtgtggcgcttctccgggttctgcctctgcttctccttctccctccgactccgcttcgctctccagtccctggcagccccgcccccggccctttctagtctccttctctctcctgctccgtttttccgtccctgacgctcgctccctctctccgtggctccctctgcctccccctcggaccctccgtccctctctcggtccctctgagctcccctttccttctccctctgccttcccgaaccctgtgtctcccctccacactcagcctccctccaccacctttctcaggcactgtccaggccttcgctcccccggtgccggccagtcgggccccccagaccccataatctgtcccccaaaccccagacccataaaagggatttacaagtggcagggccagagggaccagtgctcagggtcagatatataaatgaggaaaacatggagagaggaaatagttccagccagtggcccacaaccgatagccagagcaaggccttggtcctggagcccacagttgcctcctgtg

SEQ ID NO: 9989 - DNA, 6000 bp, Homo sapiens
ccagcccggctaatttttgtatttttctaagagacagggttttgccatgttggccaggatggtctcgaactcctgggctcaagagatccgcccgcctcaacctccaaaagtgctggaattacaggcgtgagccactgtgcctggccaatattaatgattgtttattggtggtggcattcaggtgatttttctcattttatttttctagtgtttaaattttgtataatgaatgtgtaccattttttacaaaaaatcttaacgatgaaccttcattaaaaagtctaaaaacaaaaatgctaatatactaacagcagttaattctgggtgatagaaatacacaggattgctattctttgtacttttctgtattttttaatttcttaaactaaaaacaaattcagaaaaaaacaataaacacaaatattaaatagtaactgcctttggttaatattttaaaactttaaggggccaggcacagtggctcacgcctgtaattccaccactttgggaggccgaggcggacggatcacctgaggtcaggagttcgagatcagcctgaccaacatggagaaaccccgtctctactaaaaacacaaaaattagccgggcatggtggcacttgcctgtaatcccagctactcaggaggctgaggcaggagaatcgcttgaacccaggaggcggagattgcagtgagccaagatcatgccattggactccagcctgggcaacaacagcaaaactccatctcaaaaaaaaaccttatggatacttttttgtattgtctaggtttattacaacgagcatgtattacttttatgaagatattctttctcttcaaaaaatgatgtcttctaagaagagcagatggaaataggccgggcacggtggctcacatctgtaatcccagcatgttgggaggccaaggcttgcagatctcttgagggtcaggagttcaagacaaaattagccacgtgtggtggcgcatgcttgaaattccaactgcttgggaggctgaggcgggaggatcacttgagcccaggaggaggaggttgcagtgagctgagatcacaccactgcactccagcctgggaaacagagcgagactctgtctcaaaaagaaaaaaaaaaaaaaaaagaacttttcagatcagacggtataacattattaacaaaagagagagaccaggcgcagtggctcacacctgcaatcccagcagtttgcgaggcctaggtgggagaatcacttgaggccaggagctcaagatcagccagggcaacatggcaagacaccatctctacagaaaaatttaaaaattaaaaaattagccaagcacggtggcacaagcctgtagacccagctacttgggaggctgagatgggaggatcgcttgagccaggaggtcaaggctgcagtgagccatgttcacaccactgcactccaccctggacaaaacagcaagaccctatttcaaaaacaaaacaaaacaaaaaaaaacaaaacaatcagagagacaaagagaacagggtaggaaaagcacaaaatatgctctacagatgtagtttggtaggggtcgagggttgagtaagggaagtagctaaggattagggaggagagatggactgcaggtactaaatgccaggctgaggacttgacagcttgggggaagaaacaaccaagaaatacaggggaaaggagtccctgtactttctggtctttctgaatactaagattttttggacagtgttttatttcacatcttcactcttttcccccatctgcaaaaacttacatgagtaaaagtcaccaaataattagagaagacaagacactgaagaaaaagttgtctttaatagaatccacagctaacattctatttacgtttttttaatagagatgttttatttttttattttgcttttttttttttttgagacagagtctcactctgtcacccaggctggagtgcagtgacgcgatctcagctcactgcaacctccacctcctgggttcaagtgattctcctgcctcagcctcccaagcagctgggactgcaggcgtgtgccaccacacccagctattttttgtatttttagtagagacagggtttcatcgtgttagccaggatggtctcaatctcctgacctcgtgatccacccgcctcagcctcccaaagtgctgcgattacaggcgtgagccactgcgcccggcctttattttgctttttaatacacatgaggtcggctgggcgcggtggctcatgtctgtaatcccagcaccttgagaggccgaggcgggtggattacctgaggtcaggagtttgagaccagcctgaccaacatggagaaaccccgtctctactaaaaatacaaaattagccaggcgtgatggtgcatgcctgtaatcccaactactcaggaggctgaggcagaagaatcacttgaacccgggaggcggagtttgcagtgagccaagatcatgccattgcactccagcctgggcaacaagagtgaaactccatctcaaaaaaaagaaaaatagacatgaggcctcaccatgttgcctaggctggtactgaactccagagctcaagcaatcttcctgccttggcatgctaaagtgttgggattgtaggcgtgagccaccacacctggccccaatgtcctttgtttaaagatggagagggggcaaatgggtaatactgactctgtgaagagaatgagtcatttccagttatcaccatgattaccttttaatttatctttaatgttttctgataaatgttttgtaagctgaggcatttcttctggagaatattcagcatttgccagttcctccttgagcacagcatggatacagtctttaaccacagagggcctgaacctgaatggaacaatttgtgaacatccagtcggtgactccacaaccccagcttaccttcataccgcaacttctcccatctttttgtcattagtaccacttaatccttctttttcatattttttattataaaatataaacaaattaagacaaatcataggccacatgtgtatcttcaacctggacctgcactgaacttcaacacattccaactcatgctccatatgaatgtttattaggcaactcaatacatccaataatgagcttctcatactcccctctcccccaaaacaaaatatatacttgttgttaattttgttctgcacgctttcacaaaataaaataaaataaaataaaataaaaaaatacggctgaatggcattctgggcattcagaaccttttaccaagataactgagggtatctttctctgtgttcattctacccaagggaaaaatcctgtatgaaatttgtatcactttttctgtgagttaccaagagaataaaaataaacaaagaaatttgtatcacattataatcaaaattcctgttttccatatttgccaagcaaatatggggtgtgtgtgtgtgtgtaaagttagtgatcttacaaacctagctgagtaccctctgctctggcccgtgagcctgacatttttttcagtgtgtgtgtgtgtgtgttgtgtggtgtgtgtgtgtgttgtgtggtgtgtgtgtgtgtgtgtaaagttagtgatctcacaaacctagctgagtaccctctgctctggcccgtgagcctgacatttttttcagtgtgtgtgtgtgtgtgtgtgtgttgtgtggtgtgtgtgtggtgtgtgtgtgtgtgtgtgtgtgtgtaaagttagtgatcttacaaacctgagtaccctctgctctggcccgtgagcctgacattttttttcagtgtgtgtgtgtgtgtgtgtgtgtgtgttgtgtgtgtgtgtgtaaagttagtgatcttacaaacctagctgagtaccctctgctctggcccgtgagcctgacattttttttcagtgtgtgtgtgtgttgtgtgtgtgtgtgtgtgtaaagttagtgatcttacaaacctagctgagtaccctctgctctggcccgtgagcctgatatttttttcagtgtgtgtgtgtgtgtgtgtgtgtgtgtgtgtaaagttagtgatctcacaaacctagctgagtaccctctgctctggcccgtgagcctgatatttttttcagtgtgtgtgtgtgtgtgtgtgtgtgtgtgtaaagttagtgatctcacaaacctagctgagtaccctctgctctggcccgtgagccttaatcctagcgagggctcgctgcggtggtctaagggcctccagatcccacccgggtaggacttcgcacagatgcagctcccgcgccgggagtgagcccatcctggcacccgtgtgcacagtcaccctcgaatcacggctgaacggcatccgacgcgagtggcttcctgcctctattctacccatctccttactcaggacgccatcgcgggtttcccagggccaaccattcccgccgcgccaccctaagacgcgcccggcgcccaaacactgaggaagcgggtggggtcccctgcggcccctgcagcgggaggggcgcccggacgtcacagcagggccgcccgcccgcctcgcggcctcccgcctcccgccccgcggaccccgcgcgtcccccgcgctccttccgtggcccaggtcccaggcgagctccgcccctcagaccagcgcgctcgaggtcgccccgccacagcccgtcctctacccgcctctgctggaaaacaggccgcagaatataggtgttctcgggctcccctgcgttcttctcagcctcaggcaccccgtcgcccaccgagaaggacactccgatggacgtggccatgccggggcttctcggtccgggcgtagctcgcgatgaaggcctagcgggttgcggtcgcggccggcagcagggaaagcgtctccagggcaacagggccgccctcccgcctcgctgaagcccgcgagcgccccgcacagccgccctccctgcccgcgcctgcgcaccggctgctgggcgggaactggtcgcgtccggacgcgcgacagcttccacccgcctcaggcagtatcagccgcgccgcagtcggaggaaatagacgcggggcctgaggctcctggacttgaggtattaggctggtgcagaagtaattgcggcggccgggtgcgggggctcaggcctgcaatcccagcactttgggaggccgaggcgggcggatcacctgagtcaggaagagttcaagaccatcctggccgacatggtgaaaccccatctctactgaaaatacaaaaattagccgggcgtggtggcgcgtgcctgtaaccccagctgctctggaggctgaggcagaataatctattgaacccaggaggccgaggttgcagtgagccgagatcgcgccactgcactccagcctggcgacagagcgagactgcgtctcaaaaaaagaaaaaaaaaaaaaaaggaaggaaggaaagagacttaggctgcattccccgcttttaaaaatatatatttatttttatttttttaaacgaagtctcgctctgtcactcaggctggagtgcagaggcgcgatctcggctcactgcaacctccacctcccaggttcaagcaattctgcctcagcctcccaagcagcagggattacaggcgcgccccaccacgaccggctaattttttttgtatttttattagagacggggtttcaccatattggccaggctggtctccaactcctgacctcaggtgatcgcccacctcggtctcccgaagtgctgggatgacaggcgtgagccatcgtactctgccgcattccctgcttataagcaccagtccctggtcctgttttagaaggctgttgtatcttggcctctgctagcttcaaaaactaaggcccgatgaggtagctcgtgcctgtaatccctgtttacaggagaggctgaaagggcagggattcctttttttttttttcccacttgagacagggtcttgctctgtttctcaggctggagtgcagtggcacactcaccgctcact

SEQ ID NO: 9990 - DNA, 6000 bp, Homo sapiens; identical to SEQ ID NO: 3811

SEQ ID NO: 9991 - DNA, 6000 bp, Homo sapiens
tacgaagtctatggtttggaggagactatgaaatgatgacatttcccatgcattccaaatgtattaggatgtatgactgaattaagtgggacatgcacctggagccttctcaccttcacagttgacagccatgaatgaactggccatttgtctctggaaatctgcttccgaggaggaaagcaaatgattttttaaaatgcaaaacaggaaggaactaaaggcagcatggcatgagcctcattttttccccaacaggtcaacactgagacatcacccctccacttctacttgagactttgttactttccatggctatcagggtgtgtgtgtttaaatatttctacatttggtaagcaggatctgttacccccttttctcaaatatgccctaatgagacataggaaacatgctgtcactctcccaaaatgaaacacacatgaagactgtataacttttcctctaattaagagtaagctttacccatgtattactagcaatttttctatcactgtaatctcaagttacaatgtctagaagacagatgaagacctgctggccagactatgacagtattctttacagatattcttcatttctatcattattttattacttattttattattttttagcgatggggtctatgttgcccaggctggactcaaactccggggcttaagggatcctcccacctcattcttttaagacaaggtacaggcgggacaaatgcaaagtgtttaaaggaaacagatctacaggcaaaacggtaactgactttgtacatttcaagggtgctgggctaatggtgaaaatgcaaaggaaaaggcctaaaacatggccatgtctgcttaggactgggaacagaaggtttcctgctgggcttttaagagctctctatggctgggcatggtggctcatgcccataatcacagcactttgggaggccaaggcaggcagatctcttgaggccaggagttcgagaccagcctgaccaacatggccaaacccagtctctaccaaaaatacaaaaattagccgggagtggtggcacacacttgtaatcccagctactcgggaggctgaggcacaagaattgcttgaacccaggaggcggaggttgcggtgagcagagattgtgccaccgcactccagcctagacaacagagcaagactctgtctccaaaaaagctctctgcaacatcagcaccacagactcagcattgccctgaagctcttttgtaactggcttttattggtttaattaaccaaggatgggtgggacagagttactccatctctgtcatgttattgttgccggcttgtggctagcagcagctctttaccttttgtatttgatacctggcctgcacaattagcaccttattataggctggcctctcttctaattgccacgtctcaattgagcactttattttattgtcttgttcatgcagtagttcgaggtcctgggctcccccactataataaattctaaactacttttaggcaggtgttgtgttttgagtttatctctttatgcccataagaacaccagggactcacaggcatgcaaacacactgtctggagtttctagatatctgagtatggcatacggttggaatctgggtctccatgcatgctactcaaccctagtaccagatctatcagccatctttgccattgagggctctctccttagctacttggagttaagctcttattctgctcatatataaccttttaccttgtttaaaatattgggttgcaacagacacagcaacatcccatcagcaccacattccatgttcctctagaaaaatgattcaagggatatgagtttatgcttgaacagacttcttgcttttggaattaagattaactatatagttcataggacagttaccaacgccataacaaaattgggatttccttcaccaaataatctggtgaatgtaataaaacctggggggaggctgtgtaaggtgatggttaggagtatgggcaggagagctagactgcctggtctcaagtcctggttctgccatttaccaatgatgtaacctgtgaccctggttaaggcatttaacctctctgtgcctcatttcccaatctgtaaaatagggataagaatacttgcatcacagggctgttgcaaggattgaatcagttattttttatttttatttttttttgagatggagtttcgctcttgttgcccaggctggagtgcaatggcgtgatctcagctcactaaaacctccgcctcctgggttcaagcgattctcctgcctcagcctcccgagtagctgggattgcaggcatgcgccaccatgcccggctgattttgtatttttagtaaagatggggtttctccatgttggtcaggctggtctcaaactcccaacctcaggtgatccaccggcctcggcctcccaaagtgctgggattacagatgtcagccaccgcacctagcctggttaatctttataaagtgcttagaacaatgcttggcatacaataagcactatgtaaattagtgttgaaaattagagtataaggttttagaatacacaaacctacagaatagtatgccccaattcatttattcattcaataaatgaatctaatagtgatggaaaaacaagacggtttaatactgtgccatccttgacttcttgatttttttggttatcatatgttctttgaattacttcaatacactaaaaaagaactcagaatttatggattttaaagacgtccaatgcactattacagcaaaggtgataaaaatgttctggcagcatttaagccgaatgattagtgaagactgtcattgttttagtagacaatttaaaaaggaacattctactgtttacatctctcttacctacttagcctaatatataagacatcgttcataacattatttagcaaatactgcagacccttgtccagtatggaattcccgtcaattgtgagggggggacagttcaaatacatgttctatattttaagacattggaaaatctttatataaagataactccatggtatctgaactcaggcttttcttcctgtgtctttctgatctgtccatttgctgtcacctcttaaatcctcagtctcctcagatatcctagcttctaaaatcccacttccagggtctctcctttctgagcaatctctagcacatctagaaaatatcatttataacatcagcaatctcatgttatcttatcacaacagagctcctcacataaaacccagccgtccaaccacacacaaacacatctaagtgccacaacaggtggggcacctgtgccttcattagggaggaaatccttccggcttcacctctttcagtttccctggaaggcaaagtccaaccctgcaagctgtcttccttttaggtgcccctgtggagaattacgtagagacataagaaacatctaatgtccagtctacgaagaactgatcatcaattttggagctcagcagtttaatgcttaagaatgtgagcaagcacttcctctctataaccttatcagacgacctcccaatcccactgtgcccactgatgcgaccatcatagctctaaccaccatgatctgtggttatgttggccctggagccttcatctgcccagggaacttctctgggcatagtatgttttacttgtcttgtgttctaaaggtagcacaaagcctatctatagtaggctcccaatagttatctgaaactgtatttgaacccactatctgataaataccatttttttttttttttggctgagggtcctcaaaaatggaacatcaggaaagtcatcagaattgctttaacctgccctccttgcttcaactaatttgggttaactttctcccatttatccacacggctcctttaaaacttgcaccatactttgtcagccccgccttaatgagttcctttggtgaccccagcttcaccttgcagatatcctctccgggtatccaatgcccatactcccactcggccatcgcaaggggttggggttggctttttttcgggcaactgctcacagctcccagtaatcacttccatcaagccggggtttccagttcccgctaggaagcgttggggacgtccgggcactgcgcacctcgccagtgccggttaccaagcgcctcctcccccgtctgtgggacaacgctctggtaagcacccgaggcaagaggtcccagcaaggtaatgggacagcgttcggtcacagagagtgagcgagccagcgagagatattcctgggtggaggggtggggacgccttaggactagtgtcccccattcccggacccttcccaccaagaactacctagggagggctgcatcgcctctccagccatcctagggactagagaaatggaggggagaagagcagggaaacagcacccccgggccaatcacgacgtccgcccctccttagtcggggtctctctctctctctctctctctctcacacacacacacacacacacacacacacacacgctcctaagtcaactccagctctgagcaactacgccgcacgcctctcccactgggagtcccccggcccgtgaggctcgcctcaccccagcttcttcacccctaccccagtttcccttcccaactgaccgtgaagccggaggcagttccccagtcccagaccccggtggggctcccgccgccgccgccgctgccttcccctgcagtccccaacccgggacccggcctcgggcttcggcgatggctcctcggaacgaggcgccgcggctctctggactcggccagacaccgggcggcgcgcaggagaagcccatcgagctctcccggcagtggcggcggccgcggctgcaggagcggccgccgcgcaggttgatgacgcgctgacgcggggcgggggggggtgggacgtgggggcgcggtccagaggaggggacgcgcgcagatgacgtgcggctcgtggggcagctcggcagcatggcgtccgtgacgctgagcgaggcggagaaggtgtacatcgtgcatggcgtccaggtagctacagcagcggcgttgggtcggccgccgggttcagcctggccctgcgggtcgcggcctgccctgggtttgccagtgaggaggcagccgagctgcggcgactctccgtttaccttgtgattaaacggttctgctgccggcgtttgcaattcagagctggcaacgtggacgtttttaggactgttagcgcatttgcagttttgcgggtctataagattccgaacccgggcaggaagcttgggcagtctcggaggccttttcttagtgagagagcatcggccccagggccatccattcggcgttcgcgcacagatcttgtccgagcctcagttttctcttcgaggaaatgggagtttggaggtgggcttctggcctgcttttcctcacctcgtggttaggagggcgcatgcgaggtgaacgcactttgaaaatacaaattgccgtacaaataaagggggaagggtttttaaaaagcggctaggacgcctgtaatcccagcactttgggaggccgaggcgggcggatcacgaggtcaagagaccgtcctgaccaacatggtgaaaccccgtctctgctaaaaatacaaaaaaatttagctgggcgtggtggcgcacgcctgtagtcccagctactcgggagactgaggcaggagaatcgcttgaacccgggaggcggaggttgcagtgagccgagtctcaaaaaaaaagcggctaggcagccgatagcctaagtgctgtttccattttgccaatgaagaactaagatccctaggcagctataacctaatgtcctctgtgttctatattaaatccctggttatgaccactccagaacgagggttgaaaaatgttggacctggtaacgagctaccctgtatcctcctccggctgtgtctccacttgttaacctacggtgtggtcctcctatcagagttcttcatcccat

SEQ ID NO: 9992 - DNA, 6000 bp, Homo sapiens
tccagcttcacgggcttctccacattggctttcagtagtgccttcagggtgtcattctccttgttctgtgggggcaatggggctgactccaaggccacctcatgcccaggctaggaccctcagacaagtctgggcctgagatggggcaagggccttagtgggcagcagccctcagcagggtcactgtggggatgggccaaggtagtggatgggccaggttcacagaccagggttgagcctgcagccactgggacccccaccttccccaagcactgccaaaccttcctcagcctgccagaaaaaacaaagcaagcaaaaagcctcccagatccacagcattccagtgctgccccactctgagctgccccttggccagggccctcatatccctcatgccccaggaggcaggccccttgggccttgttgccacctccaagaggccatatgtcctctgtccaccccacagagctcagaagctgagcactgggcagggccccagtcaggctctgagtacagccctggaagaaggggagacagggctgggactccctttagaaaaaaagggagggaagggtagactggggccccctgtgggacagatgaagacacacaaacacacataagcaagcaaagcagaggcaggttggggaactcaccagcctcgagtgcccaatggtgatgatgaagtcaaagtagggctccaggcccgcctgctgggctggggagttctcctgcacctatcccacagcaaagaccacagtcactgcgccaaccctgggactctccaagtagccctctcccccatttcaggaaccatcagcactcccagtgtgccagccagaacacatgtctggcatgaactgttccggacattctcagggttcactccatggcctcttgctaccttcctgggcacaaattttcctcttaggaaaatggctccttcctgattatgatccacagatgctttcagaaatggctcacagcccaggacatccttaggggctcccaggaggcaatatggagacaggctggcccaggcctgtgggaatgctgctctagagggctaggctagggttggccggaaagccaaaagggtttaccagaaaggtttagactggaccagaagggagggccctgacgtgcagtggaagtgggcaggcctcgggagggatacacccagggctgtacccagaaagagggagtgggaaaagcagcttgcagccaggtcccagcttgcaccccagcctctggggtgggagacccaggctcagtccagcaggtaatgaaagccactggcagagaagcagaccccaggggtagaactaggcctgagccagggagcccagtgagtgggcagtgccaatccccacagcctggctctggactgaggagccccccagtggctcagctgccctaccagcctcatagtgtagcctccatgcctgtgcaggacacctcctccaggaagcattcccatttccagggtgctccctgcccctccctgaactccccacctcactgctgtctccaaaagcacaacaaccaggctttgcaggctgtggcagaaatccatcccaaaagccccatatacagagcctggcttaaacaatgcaggctttgtcccaaggccctagacccgaagatgggcccacaccctcaggtctttggctgcgggcatttgataacctgttggcgtagacaccagccagacccagcccagagggcacaggacctaggctcttgctgcctcctcatgggaaaggccctgtggctcctgctacataccagcccctccaggtttggattccccaacctgaaggagagctcatgaagactaggctgagaacaaaccgctgagatcaaggccagtttgcccctggaattaggattcccttctggcagcatcaccaactgagcccctccttatcacctccagaagctgccatggcttccaaagggagtgagtgcggcccagaaatcagatctgggcctagttggcctggcccagtaggcaagctgctcccaggccccgctgcaggggagctctgggccctgccctctaacccttcaggtgaggggatctttcgaaaaccacaggacaggacagttattcaggaatagcttggggacaatgcccctccctaatcagggccacctccaaatcactccacgtcaggtgcctgcctacttccctccccactccccagtattgcatgtcagctgctctccatcatgaatgaggtccagagggtcaggccccaggcctggcctccttgacccacccaatacctccaccaccctctcctgtggctttgtcctctgcttggctacactccacttctctcacctggggcctcatcactactcactatggctccgcagctgaaataatctatgctgctgcccactgtacggctccccctgcagaaaccactgcctgccatccagctccctcaggggctcccatcacagcctgccccaaggccctatagtgctgcttttcctcatgctcccaccctatttttcccaatcagggaacctaatggaactcacagtgatcacaacttacacttactaagggctggttggctgagtgccagggcatggcaccacctcacctgctttatgtgtcatttaacctttttaataacctcaaatgacaaatgagaccaagtactcaataattcagtaatttgaccccaggaaatccaacccagagccctccccctaaccactgccctctcctaacagctgtttcctggtgaatctgccactactctaagctcgctgagggcagcgacttctccaaagtattgggcacgcagcgaggtgccaatatttctagaatgcagcacagctgttcttcagtgttgttaaaggtaagtaggtcatgtcactcctccatttaaaacctcctgatggttttacatctcagaataaaatcttaaatcttcaggacaacaggcaaggtcctacacggtctgctctggtctcctcctcacactggccacaccatccaagcacaccagcctcacctggcatttcctcaaacacacaagcacaacctacctcggggcctctgcacaagctggtccttctgcctggaatactactattcccctaaatatctgtattgtccactctttacttccttcagaagcatctgttcgaatgtgacttgagaagaggcccttcctgaccactctatcaaaaatagcacccactcaccattctgtatccccttaacctgctttatttttatcactggtaattaccacctaccatgtattttttcatttcccttctttccctaccatcatccaaatgtcagctccagaacagggaccatgtttgttctgttcactgctttatctctagagccttagaattctgcctgccagagtaggagctcaaaactttgtttttgtgactgacaacctctgatccctggtccctctccaatttgtccctctccatcaggcaggcccctcccgtcttcgaagctcccatcatcgccccacccctcctcttgccaatatcctgagttcctttgcctttaatcaaacctgttggaagacgctcctggctggatgcattccactgtccacgcttgctgtttggtgtctcaccataagaaagcccattcccaagcacaaatcctgtcaactctgggttctccaagccagcctggttttcacgttaagaaacttttagccctctcatgtggttagctggcaacagaccctaccttcaaaacacacaaaccgacaagcttgcctgtctccactcatctctgcatccagctgcctttcactagggaaagggggggtgcagggacgcctcttccccgcagcgctccggggtcagagacccccagcccctctcacctacattatagcccttccctcaccgcaggcacaaatctccatccggctgcgggaccctctcctcaccctcacagcacactccgttctaggaaccccactccgtctccactctccggaagcctgctcgcccagacctccatgtagcggcatctaaaggctgggaccctccccagctgcaaacgctctcctcgaggattctgcagcactctcccggccctcccgctccccactatcccgtggctggtttgcaccggtcctctaccctcggaagcccttacgaccctacgactggcaggacgcgcgccgacgggctcccccgcagctgcgtccactcggttaaccccggcccccgggactgtcctcggcgtggctgactctcttcccaggcccagcacggagagcggcccgcggcaggcgagcgtaaatgtgtgctaagtgcacgagtgcgtcccgactggtagtggtgcattcttcacccgggaggagcgccattcccggcggccggaccaggaaaacgctccgcttccggcactgctggcacttggggcgggcgctgggcccgaccgcggccgcggactagccagggtccgggagtcccgcgaggccgcctctcccaggaggctcccaccgggcagggggcacctcccgccacccaggcggaaacactcgggccgggaccccgccgcagtcgccagccagccggcgaccggacgcccgggcgcggggttgcgggcgcctcgccaaggtcaccggcgccgcggcggcaactcaccccgtggaggtggaagccctcggcgccgcctgcgggctgctcagcgctgacgcccaggcccatggcagcggctccgctcggcacccaggtccagtcccgctgcgcctacccggaccgacccgacgccagtagcaccgactcgctctctcggcgctcgattcctgcgccttgtgacgtgaggcgttttgttcctcccactccagacactggacgctcctagcaaccggctagcagctcggtttccaaggactgtaacgccttcaaccgcccgccgcgatagagtgcccacgaccctgcctcgggaatcccgctctgcaccgccccaccagacccggactcggagccgcgagcggcccgagatgagcagcaatgactcctcccttatggtgcgtggcccgggcgctgtccgagggctccctcgtgactccccgcccctgacccagagaccgtctgccctgctactctcctgccacccttcgctgtcctcagttatatcaggcggtcctgccttttcttgccccactccccctggcaagggcgtcttctccggtggcttctgcgcaccctgagccccaaattagcatccccgtttcttgagctaccccaaaccagctcatccaatcactatcattatcccttcttgtcatcatcccttcttccacccagctcactctcgcctgcgcctcccaccccagttgatggcttcaccatttaatctcctagccttaactcatacctcttccctatactcatcttctaatcctgtctacaagaaatgccagctccttgatgtctcctgggttttctttttatctttttatcttctagcccagaaccagcaccatctctcccccctgagagcctgcaacagcctccctcccatctggtttctctgctgtggctcttttcagcatcagtagtccctgctgccaccacggcacacaccccccacatgcaaaagcagccagagtggttgttgcaaaaatgtacatctgaaaacatccctcgccttaaaaccattctgctttctgttacccttaggatggtgtctgggctctttcatatggcccatgaggatgtttacagtccaaccacatctgctcccaacctagcacccacaaaccttagaggaagtgaaacttaactttaaaatctcagcccctttgtcaagctgtagtttccatgggcttaagcttccttagctgtgaaagatactgagaggaccatgcacaggatagtggatatgaagcccacaataacttgtaactacaattcgtataatttttcttattatttgtcctcatttttccccccttattcccttcctaagacaaagcc

SEQ ID NO: 9993 - DNA, 6000 bp, Homo sapiens
atcacaaaagaaattagaaaatactttgagataaatccaaatgaaaacacaacatactaaaacttatgggatacaggaaagcaatgcttagaggaaaatttattgctatagaggcctatattttaaaagcaacaaaggtcccaaatcaatagcctaattttccaccttaaaaaactataaaaaagagcaaactatacccacaccaagcagaaggaatgaaataataaagattagagagatgttaatataatggagaatataaaatgagaatataaaaatgacagaaaaataatttaaaggttgttttttcaaaatatcaacaaaattgaaaagcttttaactaggttgaccacattaaaaaaagactcaaataactaaaataagtaatgaaaaaagggacattacaatatagattatctatattatctaatatattagatacattagataaaatatctaatatatatttctaatatctatatatctaatatagatatatattatctaatacaaatgggcacattctcagaaaggcttaaatatcaaaactactgtgctatcatgtttattgcagtattattgtgaataaatagccaagatatggaaataacctaagtatccatcaacataactctcaggacggaaaagtggctataaagagggcattcctcaaaaacattgaaaggcaacctgctggcatctgggtaaaaagactaaaatcatggttaaataacggacacactgaaagtttgggaggaaaagctggggagagagattatttgaataattagtgtatcaaaaagtttctggccgggcgcggtggctcacgcttgtaatcccagcactttgggaggccgaggaggacggatcacgaggtcaggaaatcaaaaccatcctgactaacacggtgaaaccccctctctactaaaaatacaaaaaattagctgggcatggtggcgggcacctgtagtcccagctactcgggaggctgaagcaggagaatggcgtgaacctgggaggcggagcttgcactgagccgagatcgcgccactgcattccagcctgggcgacagagcaagactccatctcaaaaaaaaaaaaaaaaaaaaaagtgtctgcatgtattggacatccagaaaagcacatgcatgcccacggaatgatgcaagtaacatacaaactgtccagactttaccttttgtttttttattatgaagtatgcaaagaaacaacaaagtatggctaggagaaattaaaataaactgctactaaggaagcacagatattggaccaaaactttaaatcaactgtcttaaaaatgttcaaagagctaggggaagataggtcaattgaaattcttcagcctgaagaaaaggaagaagaatgaagaaaaatttatagagcctcagagacctataagacacccttaagtgtaccacttatgcatggtgggagctccagaaaaagaggagagagagaaagggaaagaaaaaatatttaaagaagtaatggctgaaaatgttacaaatttgataaaagaaatgattgtacacattcaggaagctcaacaaactccaaaagaataacataaaagatccacactgatacatgacaataaaactttcaaaagagaaagacattttgaaagagaaaatattgaaaggagcaaaaaagaagtgattcctcacatattaagatactgaaggtgaacagtcaatttctcagcagaattcatggaagtgagaaagcagtaagacaacatatttacagttgaaaaaaataccatcaaccagaaattctacattcagcaaaactacctttcagaaataaagaagaaattaagacattcccagataaacaaatcctaagttcatctatagtaggcctgccatacaagaaattctaaaaggatatcctcaagtagaaatgaaagatatagtaacttgaagccatatgaagaaataaaaaaatactggttttggtatctatataggtgatttaatagccagcattgtatttttggtttgaacctctttttatgtatgatttaaatgatggatgtacaaaataattataataaatctatgttaataggtacacactgtataaagatgctatttgtgacaacaataacacacaaaaaagtagagacagacatgtattatataacagcagggttttgtataccattgaagctaggatggttttaattcaaaataggttgttataagtttaggaggccaattgtaatctctaagtaaccactaagacaataactaaaaatatatatacagaaaaggaatgagaaaggaatcaacatgatacactataaaaaaaatcaactaaacacaaaggatggtagtaatggaagaactgaggaacagaaaacatgtaaaaataaatagcaaaatgacagaagtccttccatagcagtaattactttaaatgtagatggattaaactttccaataaaaagacaaagattggcaaaatagatttttttaaatgtgatccaactatatagtgtaagattctttttagtttcaaggacattaataagttgaaaatacaactagggaaaaagatatgccatgcaaataataaccaaaagagagctggagctgctatactattatcagacaaaatagactttaagtcaaaaaatgttatgagggacgaagaagtgcattatatattgataaaagcgtcaattaaacaagaagactttatttcttcttgtttataatatttatttatagaaaataattatttgtagaaaacaacaagctcaaattatatgaagcaaacattgacagatttgaagggaaaaagaaacagttctacaataatagttggagattttaataccccactttttttgtgtgaaatagggtgtcactctgtggcccaggctgcagtgcagtggcacaatcatggctcagacagcctcaacctcctggtctcaagcaatcctcccacctcagcccaccagtagctgggaccacaggtgcacaccaccacacccggctgattttttgtgtttctcactttgaataatgagtagaaccctagacagaaggccagtaagaaaatataggacttgaacaacactattgaccaattagacctaacgcatatgaagaacattccacccaacaaaagcaaatacacattctttccatggaatattctccaggataaaccatatggtaggccacaaaacaagccttaatatattttaaaagattgaaaccatacaatgtatcttctctgaacacagcagaatgaagctagaaatcaataagagaaggaaaactggaaaattcatacatatttggaaactagacaacatacttttaaacaaccaatgtgtcaaagaaaaaaaaatcacagaaaatgagaaaatatcttcagatgaatgaaaacataacaccaaacacttgagagatgcagcaaaagcatcagctcagagggaaatttgtaactataaaacagctacatttaaaaaaaagatctcaaattgataaatcatcattttgtaaaatatatacatacctatagatatagacacatagatttgcatgggggtatttccagaaggataaacatcaaaatgtcaatacaggttatctcttgagtgtttgggaatttttttctttacgctttcttttttatatttctatgattattacatttaagttataaaatggaaaaataaatctccaaaaccaatagcactttgaagctacaagccatagcccaagacctattttactctaaacacagtatccaatggtgtcatgcatttttaaataaataaggtagataattcataaagtgacattcaacaagcacttcttgagcacctattatgttctaggcactgttacataaatgactttacttcagtgtgcttagattcccctttccattcctaagtatggtgtcaagtgtatccactctcctttgtcacaagtatttgaatttggattttaagtctcatttctaattgtttaatgcagttaaatccctactaaaggaatatctggcatcacactaccaacccttggcctgcctcagtgatttcaggctttgcaaggtcaaagtaatttgtctcatcaatcaccacctctgtactggcctactcctgaaagtagacagcctactgactctgaggtgcattcttaaggttgattgcaaagtgggaggaccaaatctcaaaaactgggccccactggccaacactatcaaatacaaattctccacttgctaaatattccttctggtatctttctcccactttccttactcccttcctttctggaactctgatttggcctccttctaactcgcctctctgctgtaagaccactagatggtgcagttttagaacccattctcactggatcttctctcctctctctggctctcccgccacagatcacatgtctaatccagcaagaaaacaccttggggcaggagtttccactgccaagacagctatacccaaaggggatggcaatagcaacaacctctgttcagttttgtggtcctcgtgcagctggttgtgtgttcatctgttgacatttggaggtgcggtgggggatgttaatcagaggagcagtacctgagagagggcctctttctcacacactgcggagaacctctgtgaacaaggaagagggtaacactctaggtggcgatgcacggagccccgtggcctggttgctcggcagggtgaggagaagctgtaactgccagagcctgagaatcgccccttctcaggacatggcgtactccctgcgctcgcctgcacactgcagggtcagctgactgccgtccctccacttacaacagcgggacggccactctccctgacgcacgcagtgacccgaacaaagcccgtgggaatcatggggcgttcctggagggtcgcctagacgacccagcccaaccccacccacagtgcctggcaacctagaccagtcagggacgcggcaggaaatggaagagcctccgcaagaggctctggctgaacccttgaaacatgaaagcccagccgctccctcaagtgctggccacactaagggccaggaagaagacgaccagaagaaccaggccgaaaggaaggcagataaccacactgctcacagaatagctgaccagactgccctaagagtgcctagccaggctgaatccagcatatttagccaagctaccaacggagtagctgaacaaaatgggcatagtacacctggtcaggctggccgcagagcatccaaccctgctgatgtttctgaccttagagcagatgatcaggttaatcaaacaccgtctgaacagactaaaggcaaggcatctagccaagctaataatgtacagcatgaacagagtgatggtcaggtgtctggcctgacggaggaaagaactgctgaacagactgaacgaagattacctacccaggctgagagaagaacttctgggcagattgatggtagactggctatgccatctgaccagagaggttccagacagaccgaccacagaatggcaggccagtctgagagaagagcttccgagcagatggaccgcagaatgtctggcgaggctgagcgaagaacttctgagcagattacacacagattatccaaactatctgagagaagaccttctgtgcagattgacagtgggtcatccgtcccatctgaccaaagtccttctgtacagattgacagtggatcgtccgtaccatctgaccaaagaccttccgtacagattgaccgcagaatgtcagggaaagttaggagaagaagttctgagaagactgactacagattggctggcctggctgacccaggaacttctgagcagactgacctcagattgtatggcctcgttgaccacaaaacatctgtaaagactcaccaccaagtgtacggccaagccactgaactagctgaacaccaggctattgaccaagctcatagtaatgctgatcaa

SEQ ID NO: 9994 - DNA, 6000 bp, Homo sapiens
tgtaagccttaaaccacaactttttaagagtaaaaaaaaccaagctaagtttacttcaaatgggttacttaggaaatggagctatcaaatccttcctatgacattatgcccctactaaaataaataacaagcaaataaaatgtaatacaaagaaacaaacttcaaaaatcaaacctatcaggagcaacttacacttacaggatgcttagaatgtcaaccattgttctaagtacctctcacacactaactggatcttcttaactctatgaaagttgactgtccccttacactgatgaagaaacaaacacattagggccaggcgcaatgtggctcatgcctataatcccagccctttgggaggccgaggcaggcacgttacctgaggtcaggagttcgagaccagcctggccaacatgctgaaaccccatctctactaaaaacacaaaaattagccgggagtggtggcaagcacctgtaatcccagctacttgggaggctgaggcaggagaatcacttgaacccaggaggcggaggttgcagtgagccgagatcgcgccactgcactccagcctgggcaacagagcgaaactccgtctcaaaaaaataaaataaaataaaattttaaaaaataaataaaacgtatgaggagctactaccccaacatcacagctagtaaaggatagagcctgagtttgaactcactttaaccactatgctacaacacaaagacttcaatgatttttcttacacaaattttttgtttgtttgtttttgagagggtgtctccctctatcgcccaggctggagtgcaatggcgcgatcttggctcactgcaacctccacctcctgggttcaagcgattctcccacctcagcctcccgagtagctgggactacaggtacccgccaccacgcccagctaatttgtgtatttttagtagagacggggattcaccatgctggccaagatggtctcaatctcttgacctcgtgatccgcccgccttggccttccaaagtgcttggattacaggcgtgagccactgcacccagcaagactgcatcttattaaatggtgctagggaattcagcacaatgatatgagttctatcaatttcatttacccatgtaatcactcgacccatttagtacagacgctcaactatagatcataaacttgattagaaacacaagtttttggaaggatgatctacacggatcaagactaacaaaacagctgggaaaattccgcagattcagtcatctaagacagacccaggtttgaatcctagtgttcatttaataattttgtggccttgaacaagggaattaacttctttgcatctctgtttcatcatccacaaaaaaagcccaacactatctacctcataggattagcctagggtataaacagcatagaaagcacctcacacctcctagagcatagcccggagcacctagtccctctcctctggctctatggttacagggcaattaattgcactcttaccgaatccaatcccagaggggtaaacagccaaatctctccagcatcagcgctctcagagtcttttctttttaacttcaagtttctattggtggcagagcaggagataccaccttcgtggtacctaaactgaacgatactcaacaattctttactacacagctctagggtcctagccctcctctactaccagaatgtctgagcataaagtataaatgtctcgtgttagctgctttccttttttgcatttcagtgacttatactgtaaatgttatttgtgaaatgagtccaattcacatgcactagaaaaatacaagttctagtgaataccaatgtttctgccatgcctctcccctgacttcctaccattcacattcttctttattctttttatataaatgacaccaaaaattgaacaaacccaacaaattatttcaaccaacttcatcaaaatgtgtcaagtcaggaattctttataatagtactgctacaagttgtactagggagattcctttgtcagctactcgtctgacaaggttgtatatatactgcactgatagatttaatcaacaagttgatgttcaaaaggtctattaatacatttccttttatcagtaccccttatatttatattaccttctgttagcttgaaaggctcctagaacacaggaagcagttacctctaattctttcgggagactggtgtcatggtaatcatgcaaaacctttaattaggtgtcgagaatacaaatatcaaaaagattcttagacatacgtattaaaatgcttaacacttctttgaagcaaccaatgcaaaaatatcatctctgcaaggggtcactccatttaccaccagtgtctcccacattaatacccaaagctggtatacgttaaaagaaaaatgtcataaactgacggtgagctttgcaacaatttttatgccattaacatgtcactttattaagttccttagcaataagaaaaacttttcccaggcacgtagttttcgtcccccatacagtttagtattttgtcctgtaggtcggattccaacaactcaaacgtcaaaaaaaatagtagttatttatgaatttaatgattgcgattacatacatctcagtgcaggatagggttgaaaaaaaaaatcatattccaaacaagaaaacctggatttaagagcaagaagcctaatcacacatcacacgcctaactgctctcaggcatactttcttcctgcagcccctcccccacaggtaaatgctaactatttctagaactctcaactatttgggaagcttgccatcaactcccatgataccacccaacccacaccatgttttcggggagacaaaggtgccctacttccccagactataaactattaaaatggtgagaacatacaatcccaggaagtcggcattactaaaatacatcaatgtagcatgggtcttattttaacaaaaatgaaaatgaatcacactggaaaacccaaacagtcactcattgtatcttcaacgtgtaatcgaaattatttattccaagttatttcaggtaagtagatgaacacaccacgagggccttattatccaaactggtgaagaagcctttaggaaaaacggagggggaagatcacttaattatatgaggtggggggtagagcaaccattcagtcttaaaattcaaactaaaaataacctggcattttcaccccccacattttattaacaagcttgtttagatcagcatacggttcctgtttggaaaacaagaaagtgaatagtaaactttcctaagtcaactgtaaatcacataggtactaaaactcttcacccctggtgcctgcacagtccaagatttcaagtaaactccagacactgagaacacctaatttttaactagtttccaacatttctcatttgtaatcaccaaattatcttagagacacttagataacctaacaaagagagcattttttaaaagccacaacccaaattttacatgaaatacaccattttcacaacctaaatttaatcccggttgccactgcgaagtgatgcctgtttcagcaaattaagaacttccaaaaatactgaacacgttaacacatgcatggcttccctcgagctgccatttaagattaatattccacttaaataaaagtctgcttctgttcaaaaaattaaatcggttgcaaagaggaagttaccgagaaaccaccctcacaacgtggcctttacactgtcagaaaataacgtgactctgtgccacccaaaacttaccaggaagctggcaataactttgccaattctacactcctgaacccaacttcaaagagcctccaccaaatacctccttaagacgataaaaagcactaagttacaaataaacacgtcccggagcaaggcccggctgccgcgcgcccctcccccggccggcgcccccgccccggacgcgcggccccaacagccgcccgcagcccccagcacgccggccggggtcgccgcgcccgggccggggacgcgcccggggaggggagatttccattgccgcccgaggtttcacaaaatagcatgcaccgaaaagctccttctcctctgctaaaaataggctataaaggagtcggcctcatgatggctccttgattcaatttgctgcaaatcctttcctgaaagcctccccccccaaacacacacgcacaaaaagggggtgtaaatgcacgaagggaggaagagggggagaaggccgaggtgcacattttcggggacaacataattagggtgaggatcccccgagaccgggaaagggtaggggggtgggcaggcacgtgagcatttcaaagaaacctgagagaggaaaacggggggatgggggcgccccaagtgccctccctgccttcccttcccccacgcaagcccagttcccccaagggccaagttgaaaaatgcatgttccactcgcgcccatccccccgcggcccagcgcccccggccgcctctggcccgcgccccccgcccaggcccccggccgcccccactccagggtccggcccccagcgcttacctggaaacggtggcctccaacgccgctcccccctcccgggaatggaggcacaaggaaattcccctcctcgccgccgccgccaccgcctccaaccacccccaaaataacccctccggggggtgagaggcaattataaccccagcgagcggagggcgcgggggatgggcgccgggcgggcgggggcggggagcgcggcgcgggtccccaggtggcgagcggaggtgctcccgccgcggggggaggggcgggggcgcacgcggccggcggcggggggaggcggcgcgcgggggaagggcgcgagcggggagaggaattgaggcagaaggtaaaagctgttactaagggaaagagccaaacggttcggagcagccaacggctcagacactcaacactggggagagaggaatggggaccagccaggcacaaatgagctcgcgaggcccgcggcggcggcggcggcggcggccgcgcagcaaaacaaacccgagcggcctgcgccgggcgggcgggcgagcgggcgggcgggcgcgcgggggaggggccggcgggggaggggcgccgcggacgccgggaggcggcggcggcgcggcgggggggctccagcggccgcgctcctctccttcccggcccgctctggcggcactgggggctgggctgtgcggcgcattcttttaaaaatcaggcgagccccgcgggcactcgaaggcgcctcggggccccgggccgcccgccccgcccccaccgccgcgggccggcctgggtgtgctcgggtgtgggccgctgggcccgagacgggtgggggcggggaggcccgcgcggtggccggggtggagccgccggcgaagtttccccaaggacgccgcgggctcccgcgtgtccggggggcggcccggcggcgttgggggctgggcgcacacgcggcgggcatgtgggggagtgcggcgcggcatcatatggacatttgtttgtgaaaatctctgtgaacacctttgtgtgcgtaaatacatatggttctccgaagcgtacctggaaaggtgctttatctgtaataagcgactttcaaaatgtgatccagagcacgggatctggagagaaaacacgcacacaagaaaaggtttttgatactaaacacaaagctgtaattgaagtatttatgcccaaatgtactgtgaatcaagcatatggtggtatttatcatctggtgggtctgtttgaaaggtttgctcgatcagttcttatttcacaaaaataaaataatgtaactaaatgtttactaaatatatacctgcacagtggcatccacagtagaagtttatccactttgtgtactttttgcatgtgtgaagcacagcaaggcggtttataaagtataacttagatgagtgataatgtggcagtatggttgagggagggttgtttttaaagaagggaggca

SEQ ID NO: 9995 - DNA, 6000 bp, Homo sapiens
gaaatcttcaggacctatgacttggtgaggagctcttagatatgacaccaaaagcataatccataagataattcggaaaactggactgcaacaaaattgaacacttttcaattttgcttctctaggaaagcccatgtgaagaggatgaaaagacaagctagaaattgggagaaaatatctgtaaaccacatatctgataagcaactcaaatctagaatgtataaagaactcttgaaattcaacagtgaaaaaacacaaacaatccaattttaaaatgggaaaaacacacatacagacatttcacaaagaggatatatggatggcaaatcagagcatgaaaagatattgagctattatgaaaatgcaacttgagaccccaatgagataatactacctacccatcagaacagctaaaatgataaatagtgacagtatcaaacactggcaagcatggagacaaactggatctctcatgcattactggactgtaaaatggtatactctagaaaagtctgggccaggcgcagtggctcatgcctgtaatcccagcactttggcaggctgaggtgagtggatcacctgaggttaagggttcgagaccagcctggccaacacggtgaaaccccatctctactaaaaatgcaaaaattagctaggcatggtggtgggcacctataatcccagctacttgggaggctgaggcaggagaatcacttgaacctgggaggcggaggttgcagtgcgccaagactgcaccattgcactccagcctggacaacagaatgaaatttcatctcaaaaaaaaaaacaaaaacaaaacacagtttggcagtttcttttaaaactaaacatgcaattattgtacaatctaccaatcacactcctgacatttatcccagagaaataaaaatttgtgtctacacgaaaacctctgtacaattgctcattgcagctttatttataacaaccaaacctgaaaacaaccaaaatgtcctacaaatagtgaatggttaaacaaaccgcagtatattcattccatggaatactactcagcaaagaagaagaataaactatggtcctggtacacagaacaacttgaatggatctcaagtgcattatgcttggttataaaaagcccgtatcaaaaggttatatacaatatgcatccttttacgtaacattcttgaaatgacaaaattatagaaatggagggctgataaacagttgtcagaggttagggatggtagagaggaagggaatgggtgtgactatgaatgaacagccaaaggcatctggtgatggaataattctgtatcttgattgcggtgatgattacaggaatctacacacgataaagtgacagtactacacacacacacacacacacacacacacacactttataccaacatcaatttcctggagttgctgtttactagaattatataatatgtaatcaatggggaaaactaggtgaagggtacatgagacttctctgtactatatttgcaaattcctgcaactataattatcttaaaataaaagctggaaaaaagtattaacttaagatcctcatgtactggttacttaaattatgctaatacttttttgtttaaatataatttttaaatatccccaccaatatcttatctgctaattaactgtaattttgatgttttatgcatgaacactgaagggcacactttatagtgaatagctcctttactacatcacatttctaaactggaaggtactataatctcaggactctttgaaataaagctgctcaaagacaactagtattcaacttaaaacaggaaagcggctgggtgcagtggctcatgcctgtaatcccagcactttgggaggcagaggcaggtggatcacctgaggtcgggagttcgagaacagcctgaccaacatggagaaaccccgtctctactaaaaatacaaaattagctaggtatggtggtacatgcctgtaatcccagctattcagaaggctgaggcaggagagtcacttgaacccaggaggcagaggttgcagtcagctgagattgtgccatcacactccagcctgggcaacaagagcaaaactccatctcaaaacaaaacaaaacaaaacaaaacaaaaaactaggaaagcaggctgagcatggtggctcatacctgtcatcccagcattttgggaggctgaggcgggaggactgcttgagtccaagaatttgagaccagcctgggcaacacaatgacaccccatctctacaaaaaaaaaaaaaaaaagccaggcatggtggcacacacctgtggtcccagctacttgggagtctgaagtgggaggatcacttgagctcaggaggtcaaggctgcgtgagctgcgactgcatcaccgcactccagcctgggcaacaaagtgagaccctgtctcaaaaaacaaaaaaaaaaaaaagaaaagaaaaaagaaaagaaaagaaaatcaattccacaaggacaaaggcagcttcagaatgttcatacaagagacactggaatgtcttccagatcttaccagatccttccacaaggcagtggatgtcataacctaccaccttgcctggtacatattaggaagcactcagtaaacactgctaagttaaatgaatgaatgacctaagggctgccttatttttgctcactgaaacaagaaatgcaggtttacagatcccttgccatagttctgatctacagtttgaacacttttccacaataaatctgtatttggagagaaaaagagaaaggtttatacagatgaaatttgtctaaaagtagagtgaagtagtaatcaaatacacagcatccgtgttactaggttttataaaaacatattttaatttgcctcccttatttcctaaatcttcttcccagcatctgtttataaactgctcatgtcatagattatctctgttctattaacaaagactttatgcctatgctgcaggctacccttgatcctgttttttcttccaccttttacccttaacccctcctcaagcccctaccacatgcactgagagagagagaggctgagagagacagaaagaaagagaaaaacagagagaaagagagagatgactgcaccttgcaaaataggaatttagacaaaacaggcttcatttggcacacaaatattcaaacacaaagtgttcaccataaagtatatacagaatacagaagactcaaatacacaatacagaagacaaaactgagttgtgccacccttactgaattcaccttcagccacaggacttgagaactggttaccaaatctgtagattctattaaggctccaagttgcttggggatggagtgaagaggagggtagaggtcagtttcgtcatttgttaggaactaagaggggtagggaactaaacttgataggaccttttacactgataatgttattaaatgcttgtaactataaggtagacataatctataccggataggtgggaaaactgcagctgtaaggctcaagaggtaaagctagattcaacccagacttccttacttcaaatattctaaagcctaggatctttccaccacatccttcttctacaaatccaactttgggaattacagctactccctttctctaaaataatttcttctccttagagcactaataagctaatcagagacctgttggtagaggaaggagcctgagattacacttgttacaactgctctttatccactgtattaccttgaagtcaggttgtcctctctatgatcatgttactttttgaatttagttgatttctaagttattctaagaataaaaaacactgactccaagatggcttctgttgcaaatgcaaacacttaaatcagagctattaacattgtccaaaatgtactttccagaggaaacactatttgtttatttaattctatctggcaacgttaaaccatttccagttgcttccatttttcattttactaaaattatctttagtgggatcaactcttctctgcaaaatgtaattaaatattaccctatatgttggttctgagctgtatttttttctgaccatgtcacaaatttcaccaattacttttcacactggcaatagtcttccgtggcttttatttctacaaacctaatttttccccgagtgctttatccttctggctctggaggtacatgtgtaaatctgtaatgaacacaaaacctgtaatggaacgtcctacacctagtgctctgaaaagttggttcagtgtatccaatatttaaagtctaataacacgggcatgctaagggaagtttgctattcagattaaacaatgctctgacgtgagcttcgtgaatggttaaagaaacaatcgtcccctttctcactccccatctcttccaactgggagaagcccttggcgcccatctgtcagcccagggttcctgcaggcgcgtgccttgggtggccccggggtccgggaacaggctgacgggagaaaggggacagaggactccaagaagcccagtgaagccccgtggggagccccatggtcaaggccgggactgagggccgggtgggccctgggccgcctccacctctgggcccgccctgcgccacaccctaacccgcctgctcttggctaacgggccgcggcacccgcctccgcccgccagccctcacctcgcccggacggcggccttcggaagtcggcgcctgccagctacccgccgcctcctcagcaatcttagccgaccgggagggctcggcccaggtcaccggcagcccaggcgcaggtaggccgtggtgcgcgtgcgcgagtcttgagccaccccacctcccccctaccccgcattcgctgctgctaagcgacacccgcacccaaaccgaccaatcccggcgcgcctccacagcccccgtcccggcgaaggcgcgaacgtagtggttcttaaagggctgcgacccaaacggagagggagtgtgacgggggcgcgcgcctcccaactttcttcccacctcccggctctcaccgcggcggtttgagatccaagcctgtaattctcacgtccggaggtgagaaggagccttcgtgatctaagctcgattcctgccggggtagcaaccggactgacgtctggaggcggggaggctccgcgtgacagagtgataacgcccggggcgtatgttctgcggtccgcgcggctgggcgggaggcccgagataggcaaaccaaagagcacaacctactgccagcctggatggggcgccaaagtccgacccagggggacacaccccaagctggggaccgaggcacccacagatggatgactggctggaaggagattaggtaggtagcagagtccgtccatttattcatttagcaagtattgagcacctgctatgtgccaggggttgtggacaaagcgaggaattcctgacacgaaaaactatgttaagagaggaggcagggtgagagcacccttcaaacaatcaaacacctgtataaatacaaactgctcttcagggaggagcaggggttttgggagaatttacagaagcttctaggctggtgttgggaatcacaggaggctaactaggcaaaggggagaggaagtgtgtttcagatggagagattagcatgtatataagaactctgtggaaggcagcagagctcctttgagggatgaaaagaaacccagaaagggggaaatggaaagttagtgcttaataggtacagaatttcagctggagaagatgaaacagttctggaaatggatagtagtgatgatcacacaacaatgtgaatgtaccaaatgccacagatctgcacacttaaaaatggttatgtacattttaccacaaaaagaaaagaaactcagagtttagagaataaaggagtggagtgagatccactagagcgaatagaaggggcaggaccatgtaggattttatggaccatagtggaaagtttaggaccatagaacactggtcaaaattgcattttataaaa

SEQ ID NO: 9996 - DNA, 6000 bp, Homo sapiens
aacaaaagccaaaatagacgaatgggatctaattaaactaaagagcttctgcacagcaaaagaaactaccatcagagtcaacaggcaacctacagaatgggagatttttgcaatctacccatctgacaaagggctaatatccagaatccacaaagaacttaaaaaaatttataagaaaaaaacaaacaaccccatcaaaaagtgggcgaaggatatgaacagacacttctcaaaagaagacatttatgcagccaacagacacatgaaaaaatgctcatcatcactggccatcagagaaatgcaaatcaaaaccacaatgagataccatctcacgccaattagaatggttatcattaaaaagtcaggaaacaacaggtgctggagaggatgtggagaaataggaacacttttacactgttggtgggactgcaaactagctcagccattgtggaagacagtgtggcgatttctcaaagatctagaactagaaataccatttgacccagtaatcccattactgggtatatacccaaaggattataaatcatgctgctataaggacacatgcacacgtatgtttaatggggcactattcacaatagcaaagacttggaaccaacccaaatgtccatcaatgatagactggattaagaaaatatgccacatacgtcgggcgcggtggctcatgcctgtaatcccagcactttgggaggccaaggtgggcggatcacgaggtcaggagattgagaccatcctggctaacatggtgaaaccgtctctactaaaaatacaaaaaattaggtggggcttgcagtgagccgagatcatgccactgcactccagcctgggtgacagagtgagactccgtctcaaaaaaaaaaaaaaaaaaaaaaaagtaatacactacaaatgtactttgatcactcattgataatatgattatcaggataatataattatcaggataataggattaacagacaacgtttgctaaaaattatacattgttttgtattgtatgtatatattaataaattggggagttccttttgatattaccaaagaagtcttcatcatgggcaaacggtaaaagtaactgaataaaagtagctcaaaacactagctaagaattttaagcattttttggaaggaaagcaaagagatgacagaacagacctcattaaatattttacactatcaaaaagaaaacaaagatgaaaagataagtgtgattaatcaaagcaggctgaaatattctaggttcctggttgccttccaaataggaaacaataccactacataaagcagatgagtgccttgctaccatcaattacaaagttaagaattctttaaaaaataattaacattttgaataaataacacatacacaaaaatactttattttctataaatgatcgctatggcaggaactcacattacaaataagtggttctcatgcttagatattttcagatttacaaataaaaactactaaaagtttggttcttaaagcacttataattatttaataattcccaaacacaataaatgtacaccagttcctgcgaaatatacaaaggtggtcatctgcagtaccctgaatgggcactgaatcacatgaaccgatcctggggtaaccaagcctcttacttaaatctaggtttcaagaatttgaaaggctctgtagtacatgggtcacctttaggttcctttcaacactgtgatgccatgatattagaagttgcttatccagagaatacatcaacactgaggtgaacacaaaaagcagtagttacagctacttgtcacatccctaccctaagaaactgggcaataaaattcaatctgtgacctattaaacctcacctgatgtaaattactaagagaacgtgcttaataggcaagattcagggcagtcttaaatacttattgctttactttccaggctaatcaataacattgctagagaataaatacaacctcctctctccaacttgaggctaaaaaaaaaaaaaaacagagagtaaatatatgacctggtccattcctgtgaaatgctttgtcaacattttctttgaagagccatcagaaacagctccccaaaaccgttattgcttctgttcttctatgtaagtgggccattctatttttataagtaaaacacaactttctgacgcaaccagaaaaacaataccaaaacactgttaacatcataggagagatgttataaatctctaaaaatactgtcatgtggggaaaccacctacactgtgtatttacttatgtcaacattatgtatagtgtggaatactttcacttatccatatatgaatatatttacatacataaaaatatattcaacaggttttgcacacagtattgcacaaaataaaatgtaataaagcagattctagcttaccattcttttattcatttaccaaacatttactgagggcctgccatcatgccagccatcagggacaaactagggggcaaaaacagaaatcatcccttgtcctcaggaatctcaaaatcaactggaaacacaaatccaaatcttgtaaaactgttaactgagaaactacaaattgagaaacaaaactgcaaatgtgattgataaattagcagtgattattcacactactagaattgtttttccaaatgattcatccaactttttaaattttatttttactgctcctttaggagcaggactacgcccataggcagcgtacctacagtagcacattcaactttttagtcatcctcacctttgaaatacatacagggctgcactacttaccattttcatcactactgaagtggtctgggtgaggcaccatgttctctcacctggtctctcaaagatatcgtaatcccccaaacctgtgaatatgtttactttacatactcatacaagaattttgcgggggtgattaaattaagaacttccatacgaagatattatcctgaattatctaggtgggcccagtgtaatcacaagtgtctttataagagacacacaggagtgctggagaggacagaaggtgtaattggaagatgctcctttgctggctgtgaagatgaaggaagcagtcaggagccaaggaattcaggcaggcttcataaggtggaaaagccaaggaaataaatgtactctcccctagtacctccagaaggaacacagccctactgactttggttttagcttggtgatatttacagatttacagacctagtctgatgtacaaactaaaagacggtaaatttgtattattaaccaacaaagttgctgaaatttgttacaggagcaatggaagactaacacaatttcctaagcagtctctctgcttccattttttctctccttttagcctcaaaaggagcaatccgagttatctttttaaaatgtacgccatatgaagtcatccttctgttcaaaatctgccaatgaaatccaaagtccatgtgagaaccttcacctctccgacgtcatttcccactttcccctactgtgaatttcagccacactgcttccctgctgttcctctattaatcttgcatgctccagtcatggctcttctccctctgcctgaatcagacccctactcttactcccagactcctatccttgaagtcctttcttaaatgttaccttctctcaaagacttaacctggacactccattccaaattgcaaccctcagccgctaacactccctcatcacttccctccccttatcttttttccttagcatttaccaccaaacccaaaacacagcttacttctgcttactgcccatttccaagaaggccaaaaattctgcgttgtttcctgctgcatccccagcaactatgcctggcacatattagacacttaataaatatttgttgaatcaatcaatgaaccagatagagactcttaaaaacgtaaagctgtgatttaaaaagaaagaaagaaaaatatgatgtgggaaaaaagataatcaaaaccgctacgattaagagataatgattctcttaagcctttgccacatctgaacgcataatctggaaggaaattaaagccacatgacttaaattaaagccaagtgaaaatattctggagaaacaaagtaagccagtaacctatttctcaatttaaaaaaaaacccgcaacgcaaaatgccagcattttctcggcatttcttctctaaaacattcacacctgccaaacaggtcttggcaaataaacattctgctcttctgaaaaactgtggttctcatgttagcaaatttgggacgaaatccgtatgcagaaaaagcgccgggccgcccgcaatccacccactccatgacccttttttaggacaaaatccctgggcgctggggcctgctggaggagcttcacgcagtctggagctgaagggacacagcgagcgccccgacccgcgacgccccgactccgcgaaggcctccctgggaggctggggaagcgtcgggggatctctcagcgcagctctggggcccagatttctgcgcccgtcgtgcggtggccagagagggacagcgcagcgcggagacgcggagacgcagagactccgcagggggagagcccgcggtgcgtgaaacaaacctgttctctcctcagacctcaaagacagcggctccaccgcggtacgcggccaccggctttggagcctggaccccaacttgcctcctctcgcggagagacagtcgccgacgctcgcttagccgccgagacctcgccgccaactctctcacctctcgagacgcccaggccgctcaggctcgaatcttgcggagcagggggcgggacaatagcggccgcggcgccccactcggcagaactccgccaccaggcgcgatgccggaactacatgtcccatgacgctctgggaggccgcagctttccaccggaaagagggtggctgaggtgggggaggagcccaaaaggcattgtgggagtacagctctttcctttccgtctggcggcagccatcaggtaggctgcgttgaggatctttgctcttccatccgcctttgatcgtcttcctcttcagccatccaggtccggggaccctgcgtcctcggagataggtctccctcctgtgcggccagagtttggtcaggatgcgggacagcaaaggggtggagaggcggcccccggggcgggttgagcgaagatgtgatggcggcgcgaattcgagctgggcccggatcctggaggaggcgtggggctgacgaatggggcgcccgggacaaggcagcctaaagtgaggctgctggttgggtggggtagatgcattttcctcgagagttaatcctcggtggccgcagcagtaccttgtcctgtgatgtcagcggcatctcctttcaggtcctccttggggacgccgcctgccgcagccacccgcccccttggtgctcagttctggttctgttaattcgccccaccaaaacgtgccgagcaccgctctgtgctggggttgcggaagtgactgaacgcggctccgtgggcgcagtggtgggggttgggctagctgtccccggcagttggtgcagagccattttcattcccggcggtttccttgtttttgttggggaactaagatggacggatacagtcgtcttattgtacttaaagcggatgatatttaatacacagtttgatttcacaggtaagccaagatgggtgcatacaagtacatccaggagctatggagaaagaagcagtctgatgtcatgcgctttcttctgagggtccgctgctggcagtaccgccagctctctgctctccacagggctccccgccccacccggcctgataaagcgcgccgactgggctacaaggccaagcaaggtacgtgatcgactgcgtggatgcttggataaaattatattcgagaaaagttggaaaccagctgttaggaagacactgctgcctcagtgtctttcttcgcatagggctttggcagaaaaaagctagcaacactggtca

SEQ ID NO: 9997 - DNA, 6000 bp, Homo sapiens
gagtagctgggactgcaggcaggtgccactacgtctggctaattttctgtatttttggtagagacagggtttcactatgttgccgaggctggtctgaaactcccgagctcaggcaatccacctgccgcagcctctcaaagagttggaattacaggcatgagccactgcacctggccagctatttttcttttaaggaaaaaaagaggctgctctgcttatggagtagcccttctttattcctttactttatacaaagaaaaagaaaaaaaatgggtggttttactttcaaacttttttttgagacggagtctcactctgtcgcccaggctggagtgcagctgcacagcctcagctcgctgcaagctccacctcccaggttcacaccgttctcctgcctcagcctcctgagtagctgggactacaggcacctgccaccacgcgggtaattttttgtatttttagtagagacggggtttcaccttgttagccaggatggtctcgatctcctgaccttgtgatccgcccgcctcagcctcccaaagtgctgggattacaggcgtgagccactgcgcccggcctactttgaaacttttaaaactatttgcaaataaaatttttctctaaccagttagtttgcagtagagtttcaattcaaggtcacagaagaggaagccaactaactaatgaaatgctcactaaatgatttgtcagtgtttcatattttctttatcatcagttagcattccctacaccatcactttagggagtcaatagaattttataggagtaggcctcagtaagtactgggaggccagtagcactgttcaagcacatgggctgtctgtgtttgaagcctgacctgtcatttgttcactttctgaccttgagcagattacttaaactctctcgacctgtttcttcatggggataatacaagtacttctagggggtttgtgaaaactcataaagaggttaaaaacattgcctggcatacagtaagcacccaataagaataagaaataatatttgtatagtaattatgccagaaactgttataagagctgtatatatattaacaattagctattactagtattactaattcctagttcaggatttagcttagtaaactttctgcttcagaagcaaatacgagaggtgaaaacatcaatttattctcctcagtcttagttacatactttccaagtcaagtcacagagcacaatttccttgctggcagggacaagacatgggtttacatgatatcacctatcccctcaatttaacagcatgtactatgcagttgggcatttaagcagaaattaagagttggcaggtattgctcaactggtacccattttaggaataatgctgaatcatagcattttatctggtcttctctcaggatacttaatgctaattttttgtatttttagtagagacgggatttcaccttgttagccaggatggtctcgatctcctgacctcatgacccatctgcctcggccccccaaagtgctgggattataggcgtgatccaccgtgcccggactttttttttttttttttttttgagacagagtctccctctgttgtgcaggctggagtgcagtggcccaatctcttgctcccaggtgcaagcgattctcctgcctcagcttcccaagtagctgggattacaggtgcccaccaccacactcggctaatttttgtgttattagtagagacaagttttcactatgttgcccaggctgctctcaaactcctgacctcaggtgatccacctacctcggcctcccaagtgctgggaagttgttttttttttcttttctttttttgagactgagtcttgctccgtcacccaggctggagtgcagtggcgtgatctcggctcactgcaagctctgcctctcaggttcaaacgattctcctgcctcaacctctcgagtagcttggactataggtccccgccaccacgaccagctaattttttgtatttttagtagacaggatttcaccgtgttagccaggatggtcttgatcagctgacctcgtgatccgcccgcctcggcctcccaaagtgctggattacaggcgtgagccaccgaacccagccgacacttaatactttcttatggcccttgttatcctgcaagttcttcaagggcaaactctgtgtcttaagtagtcacctttgtaacccttgcaatgctgagcatgagactgaacactggaggagaggaggggaataaaacatctccagggaagaggaatgtaatgggagcctcttcaagtcccactggcagcttatcttttgagtgagctttttcctattttcaaacatttctagtaaaataggcataccaaagggtatatccaggcaatacaagccattgtagttaaattccaccatacaccttttctggcgcctcacgatcagcctggctctattaataatagtcgttacaggaagctgcatgccaggtagaaagagccattagctgttaccactccactgccaagaagtaaagacattgtttccatttcttctacttaagtcttttaaaacctatagaacattatgtccagtatctctatctcacactcactttcattttctatagctgttgaaatttttgttttaatattaggaatattccattcctgggtctataatgaatagcaaacattttatacagtactatggttggaatggtaaacaaaaataagtcagaaaatattaatttttggccatatggtaattttaacttgtcctcttggtgtggtgtggacgcacccaggttggacttcatacatagcctcttgcattatattgactcattgtcagagctcacgaagtcactacctaagtgtctgattgctacactatacattacttcaagatactatgaaggttaatcagattacaaaggggaaatcataaagctgagtaagcttcttggtaataaaactatataaatacaaaatactgttttttattggcagataatatatcgtgttttagcacaacacataagctgctaggcatttattcaatctgattgggaatgggttaaatttggttaaaaaattttaccttaggttgctttaattaaaaaaatgtttaaggctgagtgcagtggctcacacctgtaatcctagcactttgggggcactgggtgcagtggctcacacctgtaatcctagcactttggcctagcaccgcttgaggccaggagttcaagaccagcctggccaacatgatgaaaccccatctctactaaaaatacaaaaattagccaggcgtggtggtgggcgcctgcagtcccagctactcaggaggctgaggcagaattggtcaaacatgggaagcggaggttgcagtgagctgagacagcactccagcctgggcaacagagggagaccctgtctcaaaaaatagtaataaataaatttaaaaagttcggccaggcgcggtggctcatgcctgtaatcccagtgctttgggaggacgatcaccactttgggtgggcggatcacctgaggtcgggagtttgagaccagcctgaccaacatggagaaaccccgcctatactaaaaatacaaaattagccgggcgtggtggcgcatgcctataatcccagctactggggaggctgaggcaggagaatcacttgaatccaggaggcggaggttgcagtgagctgagatcgtgccattgcactccagcctgggcaacggagtgagactccgttctcaaaaaaaaaaaaaagtttaaaatatcattggtctttaaagttatacattcattctttgataattgctatgttgaacgcaacctcctaactgctttacaatgattaagcactaatgatttgaacccaggtttaaagtctgactctcaacacatgtgctctgccttctcacgaacatgatttcaaaaatcatagccccgggatttgggattggtggcttatgcctgtaaacccagcgacagagcaagaccctactcttaaaaaaaaaaaaaattaaagaaaaaaagaaaaataaatcatagtgttgaactggcaggtttcactgagacgaaacttgggactcttcctttttttttgtttcgaataaagccattctagaatgagacaaaattctaaaatattttatagttaacagtttaaattgggtttaatcttgacaagactatctagggctatatacacaaatctcttttggagaaaataccacaactaaactgaagtctattcctgaatatgacagaccaggtcaaatggttatccttgccctcccgggggatgtcactcataaacgtgccaaaagtcacagtctaggccccattaccttacatgctcatgaccttcccagggaggcccctcgcccttaccaggcactttcatcttgggaagacacatcagtcctggcggagaaagcagcaaggcctttccccggctcacaaaaattaatacaaatctcagaggctgcatcccacagccgtgaccaccgtgacttggcatccccttttctgcaaacttaaatgttatctagaaatcgggcctggctctgaaagccaagggcctggcaggagcccgagaaaggggagaaactttctgcggccccaagctaatggcagtcactgcaccgagacccgtcccctggcatccctttgctccagctggccaagacagaccaccaaggtcagccagatttccacccagtctggccgggcccggacccagctgggaatgaaccgagaagcaccgggacccggatcccggcgtgaaaggccgcgcgcggggcacggcgggaaaagacgctgcgcgcagaaacacccgccccgcgccgcgctctagtgggcggccctgccgcgggcggctctgattggactgccgaaccccgcgcgctgattggccgcgtgggcgaggcggaggagagccgtgcgcagcggcgtatgtggggccgtgtgcagacccgcgtgtggcgcaggcaaggaccctcaaaataaacagcctctaccttgcgagccgtcttccccaggcctgcgtccgagtctccgccgctgcgggcccgctccgacgcggaaggtgagggctgggggaggggcccggcgctgacggagccgcagtgcgggtcgggtctgtggcggacagagagggtagggagcggcgaggtggcgatggcggccgcactttggcctgcgcctctgctgcgtcaggcgggaagctcggctgctgccgccgcctcggacccgggtttctggcgcaccgctgtcggacgacacttctgtcctttcttcgtcctggaaagctgggtcgccgagcatgcgggtctttcggcgccacggccgcaccccaggccgcaggcttagggcagaggaggcccgcccgtgcgcccttggggccgaggccctgacgcttcgagggtcgcggaatgagggaccgagggtggatttggcgggaactcactggaaggagtccgtgtggtggggaaaggctcccggctgcggatgaaggggggatggggtgggtatagtcgtgcaggccatgtgctggggtcgtgcgcctggcgggccatgtgccaagggttttgggggccttagaaaagggttcttaggccgggcgcggtggctcacgcctgtaatcccagcactttgagagtcccaggcgggcggatcacgaggtcaggagttcgagaccagcctgaccaatatggtgaaagttggtctgtactaaaaataaaaaattagccgggcatggtggcgggcgcatgtagtcccagcagctcgggaggctggacaggagaatcgcgtgaaccccggaggccgaggttgtggtgagccgagatcgcgccactacactccagcatgggcaacagagagagactccgtcttaaaaaaacaaacaaacaaacaaacaaacaacaacaaagggttcctgaagaagcctttgtgtttggagtggcgagactgctggaagacttgggagcttt

SEQ ID NO: 9998 - DNA, 6000 bp, Homo sapiens
caacattgtgaaaggtgccaatagcgtctcactgttaagaaaataattttaatttgtggacctcctgaaagagttttagggactcttaaggaatcgcagaccacattttgagaacctctagttcatagaattatctagtaaataaatttactttttttctttttgagacgaagtctcgctctgtcgtccaggctggagtgcagtggcgaagtctcgctctgtcgtccaggctggagtgcagtggcgctgatctctgctcactgaaacctctgcttcccgggttcaagcgattctcctgcctcagcctcccaagtagctgggactacaggcgcatgctaccatgcccagctaattttttgtattttcagtagagacagggtttcaccgtgttagccaggatggtttcgatctcctgaccttgtgatccgcccgcctcggcctcccaaagtgctaggattacaggcgtgaacccccgcacccggccaatgaattttaaatattcacaaatcacaattttgtgcccaggtcaatagtgtcatatcaggaaatattctgaagaagtgttattcatgaagtcctagtaaccataaagcataatattgagttctttggagaaaaatggtagatttatcttgtcaaaaatactagtaaatgctaggtaacataatgtgtgatcaataagggttatatccctatgcatgatggcctttggtatcaaatgggaatgtctgaaatattttaatggatttaaattacagaaacaatgaaaattggaaaaatttaaaacaaaaataaaaacattctctcaagtcagaaaatatgaatagtttatactagcattttcaagccaaattcttcctttgaattacagaacagataattatttgaataactattttctccattctccaaaaaatgccattataggagaaaagttaattcaatatatacaatgatccttagggcagtgggcttaattctctctaggaggcatgctgagaaaagactgatttaaaatatatttccccttcaacaggtcttaaacacaacctaaaagctcatttggcaagttgagttactgtcaaatctttattgctgtgatcttctatgatgatcatgaatgggacagaaatttaaggttacttttgaatataaaaagaagatctagcagagacaacttcctgagacaaaacacctcacaatgcttttactcatcttttttggggatttttatcaaatttgggtcattgactacttcaagtcttgttctacccacgcctccttcattttcagcaacaacctttacctcttactttaaaagatcagagttctctggctcttctcttcaatctcctcaaaaatgttttcactgtcatcagtcccttcctctctccaattttctactttcttgtttttttttttgagacagagtcttgctctgtcgcccagactggagggcagtggcgtgatctcggctcactgcaacctccacctcccaggttcaagggattctgcctcagcctcccgagtagctggggactacaggtgcctgccaccatgtccagctaatttttgtatttttagagacagggtttcaccatattggccaggctggtctcgaactcctctcctgaccttgtgatccacccacctcggtctcccagctccaattttccactttcaaatcatcatcttaacattccttgctagttcccaaaatcaaggctttttacttcatttctgaattctgccccataaattactattacaaattttaacttctttttaaatctctatggagtcaacaggtatgaagagtctattatgtaccaggcaggaaccatggtgagggttttcatataagccagcatgtctcacaattttcctccagtaatgaggaaattggacacttacaaattgtgaacattttactttaaaatattttaaattattgattattgagtaaaagtgatgctccataagttgggccaatgaactctgagcaaccccagtaaacctctacatactcccaaagcacaaatctcagtttaaaaaagaacaggcagccaggcgtggtgactcatgcctgtaatctcagtactttgggaagctgaggcgggaggatcacctgaagtcaggagtttgagaccagcctggccaacatggtgaaaccccgtctctactaaaaatacaaaaaaaaaaaaaaaaattagttggacgtggtggcacgcgcctgcagtcccagctactcggcaggctgaggctgcagaatcacttgaatctgggaggtggaggttgcagtgagccacgattgcaccactgcactccagcctgggcgacagagtgagattctgtcaagaaagaaagaaagaaagaaagaaggaaagaaggaagtaaggaaggaaagaaaagaaaaagaaaagaaagaaaagaaagaaagaacgaacaggcaagggttcttgtgataatatttctcccaacagttaagtgactattttgaataagacaatgtactaggtactttgggacaaagatgattaggatgctcacactgtatcctcaactttaaatatatccctccaccttccaaaagctggatgcatttaggactcagcttaaatgccactgccaccagtaagacctttctagttaccctagcctgaagcattctttcctagggaatcctataggatttcattttaactgttcatggtacacttgtgtacacatcttttcttgctttctagagtagatcctccttaaagccagggtcattgcttatacatgtctttatctccagatcaccttatatatttgagtatgggggtttaagaacagataccataacacaagactagaaagccatgatggatttaaatttcagttccaccactcatttcagatgtgcaatagtgggcaaatttacttaacctctttcaagtttgacttatgtaaaacaggaatattattattatctacctcttagtgctgtaagaattaaattcagagttagccagttagagcagtgcctgacctacagtaaccacttcacaaacatataactctatctcccagctgctgtgagaattaggcagccatgtttagcaaagtgcatggcagacactaaatattctatggtaaatgtacaaatgaatgaattcacgttttgtattttccacaaaggatttaaaatatataaagaatgaaggcaatatttcattatagaaatacactggtaaatgtaaagacggcaaaagaaaatgaaattaggcagatccaagagccttttccaaaaacgtccattactgcaaccacagcagacccaaactacatcaggtagttagtaatacgaagtgctctaattaagaggcttgaggtcttgttcagggactgtaacctgggtgcccaagaaagtccacggatagtgctagcttcggcagcacatagagaggagattagcgtggcccctgcgcaagtatgacacgcaaatccgtgaagcgttccatattttttataaaacaaattaaaaaaaaaaagaaggtccatggattgtgggggggggtgtctgtgaatgaatgcactgaattttatgcaaaaatgtttgtttctctgtgcattttccctgggagtattcctaactttttcctagttccaactttgccacaattaaccttgtagaaacataatttaaaaaaattttttaacttaagatgagggacttaatccctagcgtcttcaagctccaaaatgtttgattctgtgcttcataacaagtttttttttttttttttttgagacggagtcttgctctgtcccaggctggagtgcagtggtgcgacctcggctcactgcagcctctgcctcccgggttcaagcgattctcctgcctcagcctcctgagtagctgggactacaggggcccgccaccacgcccggctaatttcttttttttttttttgcattttcaatagagacggaagatattcttatactatcgttttctttccttattattataacactcttgtgcaaactagtctagggcgttttttagggttacggtgataataacaaagtgctctaacaattactattcttaccagccactggatttgcaaatgcataaaagcacaccagccagtgttataaacagcacccccttcctcccaacccttcttctccccttagaaacctaacagctgagatatcaaagcatttgaaattccatttttgactccatatacatttgtttttggcttctttgcttgtttatagtttgtagccagcacacactatccccagaataagcccaacaggagtgtagattaactaccaccgttttaaaggcaaactttagttttaccaaagcctcctacggagttcaacacattcggcttctgtgtttccctacaccaccgatcccgctgcagactgcaggagctctggcaagcgccacaagcgccaggggagacaaaacccctcactagcaggctttgcctccccaaatcaccccggtcccctaggccccaccgccttctcccttcctggaatcaaacgaccaagaccccgcaaggcctgaggcggcggccgcagcgggagcccagaccactgcttaccgcggccctcagtccagaagctccaggaatcggccgtaacctatgggaccccgctcccttctacgggatctggacctaccatggctgcgtcggtccaatcccgggaaccctcgtttgttaccggctactcaggccttgagataaacccaccgatccactgaccgtcagactgactgacgtggaacttccgggagccgattctcgcgatagtcagaggccagggccggagcgcctgcgcaaactgcgcgcagggccgtcgtttcccaagccccgccccagtttcctaggcaacgtggccttccagaccgctggtagtggacttgaggctgtcgggaaggaggggtgtggcctagaccactaagggccgtgacgtggtgccgctgagcttggaccccgaccagaagatagagattgaaacgatgaggaaaacgaagtgcctaatccccgctggacgctaactgcagggcaagctccccagtgttgtagttgtgtttcggaggccgagaaccgctatcgggcttcctcggactctggccctggaggggggaaacggcgagggagaaggcgaaacgagtctccagtgtgttcttggggcctggtgcgaggcccagagaattctctgcaggcctttgcccgggcactgattaaggctgcgaagagacgcaccgggctgcgggcttagtagcttcaggcttctgaagtcagagggagggctgagagcttacacttctggagctccccgggagacggcaactacccaaccgtgtgggtgtgtttgtgtatgtgtcttttgttgagcttcggctggctgtgttattcattcaacaaatatttatcgatcttcggcagtgtgtcagacataccttcttctcaaatcttcacatcaaacctgaattatctccatttaatgatgaggaaactcgggctcaaagaagttaagtgttctagccaagactgcatagtaagtggcagataaaacctcaaagttgggccgggcgcggtggctcacgcctgtaatcccagcactttgggaggccgaaacgggtggatcacctgaggtcaggagttcgagaccagcctggccaacatggtgaaaccccgtctctattaaaaatacaaaattagcctggcgtggtggcgggcgcctgtaatccaagctgttccagaggctgacaggagaatcgcttagaacccaggaggtggaggttgcagtgagctgagatcgcgccactgcactccagcctgggcaacagagcaagactctgtctcaaaacaaaacacctcaaagtttgtgctctttctactacataaaaatatctcttcattaatgtggctgaattctaagggcctgtgccataggggttacactacacaataaagttcg

SEQ ID NO: 9999 - DNA, 6000 bp, Homo sapiens
ctccatctttttttggctaggtcagatctctttcactgtctcagttataattttgcaatggtggtttcaatcacagtgtaattagttgtcaaaagcctaacacagacaaggtctgaatttagagagagtgatgtattttagctaaaggaggtttggcacgtttcacagagaaacacttgagactggctttgaagaaactgcataaatggactggatagagagattaaacactgtatttattttaggccagtatgtttactagttgccttcatatctaatcatgaacttctcgggcaggtgcggtggctcatgcctgtaatcccagcactttggggcaccaaggtgggcaatcacttgaggtcaggagttcgaaaccagcctggtcaacatggtgaaacccccatctctactaaaaatacaaaaattagctgggcatagtggtgtgcatgcctgaaatcccagctacttgggaagctgaggcaggaggatcgcttgaacccgggaggcagaggttgcagtgcgctgaaattgtgcaactgcactccagcctgggccacagagagactctgtctcaaattttaaaaaataaaagaaaaagaaaaagaaaaagaaaaaaaaaacatgaccttctcaaaggggaagtttatcacaaatcctttcatttcccttcccaaccccacattctgaccacattaaatatttttaagatgctctctatacctctaagcctttgcacaagctgattcctctacttgtgagagtttccctccctttccatccccttcagatactctttcctagctaactcctcccattttttttttcaggtttggtttttctttttttacactgagtcagaacattattttaatagttacaaaactttttttttaacagaatcagtataaaatagcagttgatttctccataattatcagaattatttatatttgaggtcttgcctaagtggggctgaaatcaacaaaaggtcttggactactggctcagaaatcatcctaggaagcccgccctgttgacatttgtcatgcttagctcttatgagatgacccggtcctttaaaaaaaaaaaaagtatctccgtttattctgtttatttggaggtttgaagtgaattcggcagcattcattaaactccttccagctcctgtcatttatcattctgactacatccatttcaactttgcctgctctgttctgagttgctttaacaatattaaatcgtccaaattcttttctctctcttctcagaggttttttactactgctgaggtctgggctatatagttttttatgactctgtccctactggcatgagctgccatcaaagactcaaagttgtttacaggtttggctggcatcaatcttccctgcaaaggaagctgttggaactgtagtgtttaattaatgtactagtctgtatcaactgtccacatcaccttgagtaattcctggaactcggcgaactcctcacagttcacactgccactgggtgccaccatactggactcaggttcacatcttaattgacctcctctcagaaatttttgtctctttaagttcgtaagtgctttggttatgcagtcccataggaccttgtactttccttataacccttataagcaccagtttgtctgtttcttttgctagaatccttcaagtcagggaccaatacctgctctgcttgtatccaactccactgcctggtgcaataccctatatataatatgtacactacaaatgtttcttgaatacatttaaaagttacatttctcaacaactgaaagcattcttaggttattcagtaatattgagtacaaaaaaataacaatcatacagatttgtagagtttaatcagtaagaaaaatgcctaactgtatgtacctaagtgcttatttcttttatgtttcttatattgtacctatgaaaagagaaataacctgaggtcttagttccttgcaacacaggggacaaaactattatataccataatccacttttaaaaactaaaaacttctgcagatataaaagcatgttttccccttttttgcctgaatcatttctaaactaaaaaatcatttgggaattgtctttaaaagcaagaaagttggtagccgggcatggtggtgcacacctgtagtcccagctcctcaggaggctgaggcaggagggctgcttgagcctggaaagtggaggttgcggtgagccatgatccagccactgcactccagccggggcaacaggcaagacccttgctgagggacccaacaaacaaacaaaaacaggacataaatcgttttttaaaaatagcaagaaagttggtagtttttcttataattatctcacatctggctgactctaattctccaacaggtcaatggagcaaaaggtttttttttttttctcctttcaggagggagggggttagttgtctctttcctgtatataaatcaagaacagaagaaaacctatttctccgttcttcatctatgatacagactctgaagcttgtatggatagggcatttgacctgggtttcagaaagtagcccctgcggtaagcatcagggtgtggggaacaaaatggtcattatttgcttgaaacgacagatgataatctgtctgtgattccagaataccttatgtgtacatttcagaataaaattagtaaggattaatatttaaaaatccaacacatatcagttatttgttattctgtagtcaaaatattataattcccatatagtacatatctaaaatactctctgaatacaaaattttgataactgtctaattaccacgtagaagtttccaaagtattcatggtttatagccacctgaattgaaaactggttaagtatcaggaacaataagttctaatcatataatttgagagtaacaaatcagatgaataatccaagccaatagccttattttacaggtggggaaagggttgtgagagggttatacgaattgctcagtacaaggaatacatgtctggtggggtaggattagaatccagctcttctgatagagagtcctgggttcttttgattgacgatatattgccaaagcatcaatcttacgctgctgatgtaaattagattaaattggcagataagaattctgattagaaaatttaagaatccattactcaacagaagcccacgttgttctctttgaatgatatatataaaaaaatcatgcctaaggtaaacggaatcttcttcagtgacttaactcatctaacaatttcaattgtgatttgaaaagacttttttcactacaccactgccagactttccttcattatcgttttctcatccacccacagtagttgtcccagatttctgtcagaaagttgaatagacgctaaaaaaggcaccagtaaccagatatttaaagtcagtttggagagcacaaattaattctgtacgcttagtaagacacgactgaagacctttccacagggaacctaaagaggcattaagggaagatgagccgtccagcatcaggagacgtaacaggttgaatgaaggatctttcttcacagtcattttgtcacgggaattactatctaaagcaacgctggcttcaaactgattttgcatcagtcgcccatcagcttgtttaaaatggctgccaaggccccagcatggagatccggattcaggtggtctggggcagagctcaaggaatctttaagaagccccttcaagtgactctggtgcacaaagagaactcctagtatacaggactccaaatatgtgtgtcatgctggagcttcatgaccaggttgtcaccgcttcaacctgttagaactttccatccaaacctgtcttactccaaagtgcctttgtacttccggaagcagggatccctgtcgtggggattactccgaagagggaaatagctgcttcccactccgggaatttaagacaaaggcgaatatcactgctgcatcatgtcggctgctcctaattctgcccttacgctgtgctttgtaatctctaacccgccgactcggcaggagaaaaatttaattcggtcacagaagcactacacaggaccctaggccttatcactttcccagggtggaggaaacaccaggtcggggagaaaagcaagaccaggactggaaggtcctctgctagtacgccctcccctcaacctcccgaccttcctcgccgcctctcttcctgtgaccttgtcgtgactccgtgaccggagcgctcgctctcctatcccgcctcgcctgccgcttagcccgctcttcagaatgttccaagctccggggaagctcccgctcctcgctccccgccgtcgggcccagtcaacaccctcctggcccccgtctctcattaccaccccatcagcgagtcttccccgctcggcaactcactccacaagcttctgctccatctcctcgctggctccgtctcccctcacccgaaggaccctaggcctcggctcccgactcctctcatccgcccatgctcgaggccgggcctgagccccggcaactccacctctcctccctcattcgagacacggactcccagcccccacccccaaagtcctttcggcctggccaagcgctgccccacttcttcccgccccgcggcccgagtccctggctcgcagtcccccggcttgtttcgcttacctagagcgagaaaacctctcacaccccaaccggcttccgatccctgcaggcgcacccagtcctcccggcttctccccacccacagccgtcccagccaatcagaggccagcggccgcaaaaggacgcgtgcgtgtgcgcggcgggtggggcagtgcagagcgggtcctggattggctgggccggtgagtgctggcccactaccccggctctagcgtactggcggagacagacgtgagagctcggcgcctggggttcgcgcccgggcacttgaggggctttggctcctggcccaaggactcctcagatttctcctgcccttttcccctcgggcagcggaggcgagcaccgcgaacgccgtgtcccgagcgccgccgcctgcggacgcctcacgggccgggaagggatgcgggtgaggggtttcggctgcgggtgaggttgtgttccccgacccacccgggtccgactgcttgttctcgccgttcagtaacgagatgcagacagactgggaaagaacggagtttatttctgcaacaggttacagggagaaggtcggagtaactcaccagaccaactcaaaattattaatacaagtttttctagtgcttaaatacattcagtgcatttacaagtcgaaagccaaagtgtttcactcaagccaatctttaacggtaatagggtcaggtgtctagacaattgcttcagagccttggaaataatctaaagtgggtcctggtacaaggtgtgcaagaacaactccattattttaattaaactctaggggttgaaaaagctcaggcgggatcctaatggacttgtctttacattctagcctttctcctaaggcaccagtttctccaatgtttaacttatacatgcatcagaatgacagtgaggcgttggtgagagctgctctggttgctaatggagatctggcctgccacagtgggagcagagcttgcccagtgcgccgggacgactgcgggctccatccattccgctcccagggcggttgtcggccaggaccgtgagctgtcaggtcccccgcgggatccttcctggagcttacactatagtaggaggcagccagtacttgcaagcacggggtcgcgggaactacgacctcacccaggccaggcgacctttctctcaagaaggagatgtcagaggcccctcgtgacagcgagcttccggggacagggctcctaatgtgtttgtcaagtaaataatgagtaataatccggccaattggtgggtcaacgaaaaaagtcaaactctaagatatttgaagagatttattctgaaccaaatgtgagtgacc

SEQ ID NO: 10000 - DNA, 6000 bp, Homo sapiens
agacaggtcttgctaggttttctattaccattagctcatatcctttgttgtccaatcacatttctacacgactgtccctgtttcatcaaacctaagcatataatgagacagagtcacctgtatctttgggtcttcactctgaaggctcctgcatcatgtaaaactttgatcaataggaggctgaggaaggcagatcatgaggtcaggagatcaagaccatcctggccaacgtggtgaaaccccatctctactaaaatacaacaaattagccaggtgtggtggcacacacctgtagtcccaggtacttgagaggctgaggcaggagaattgcttgaacccggaaggcggaggttgtagtgagacaagatcacgctactccactccagcctggcgacagagcaagactctgtctcaaaaacaaacaaacaaaacaaaccttgatcaaatacagtacatttataatgtttttctcttgtttttgttttgtttttatcttttcttttttgagacagggtctcactctatggcctaggctgagtgcagtggcacaatcttggctcactgcagccttgacctcccaggctcaagtgatctgctcacctcagcctcctgagtagctgggactacagaggcacaccatcacacccagcaaatttttgtattttctgtagagacggggttttgccatgttgtccaggctagtaattttctcttgttaacctgtcttttgttataggagtgttagctgtaacgcttatgatgggaaagaaagggatcatcccctttccacccctacactgcctctgtttatgttttctcccttaaactgacagggctggtacacttttgtcgaaagatgggacttttttctcctaaattcaaccgtcattcaaactgggtcagactaatgacaattctaccaagtagtgtataccagtagcctcaataaagagattttgggggacaaatgtgcatcttccacacagttgtagccatagagtgcatatctaacttccttaaattatctatgtggatctgtcatcctataatttgtctaaatccttattttttaatattatgaatagagtccagcttatatataaaaatgtatttcctttctatgtcttaaaaattacttgctgttgagcgatactatattcctaaaatatagcggaatcaaaattcctagtttacagtcctctacctctattacttactagctatttgacctttataccaatcaatcatcagagatgattgaaccagagcaactccatcttgaataggggctaggtaagataaggctgagacctactgggctacattcccagacagttaggcattctaagtcacaggatgagataggaggttaggcattctaagtcataggatgacatgggagattggcacaaggtacaggtcataaagaccttgctgataaaacaggttgcagtaaagaagccagctaaaacccaccaaaaccaacatggcgacgagagtgacctctggtcatcctcactgctacactcccaccagcaccatgacattttacaaatgccatggcaacatcaggaagttaccctatatggtctaaaaaggggaggcatgaataatccaccctttgtttagcatacaatcaagaaataaccataaaaataggcaaccagcagcccttgggggtattctgcctatagagtagccattcttttattcctttacttttctaataagcttgccttcactgtactctatggattcgtctagaattacttcttgcaggagatccaagaaccctctcttggggtctggattgggagccctaatagtaattggtttaaaaggtgcttatacttacagcttcaagggcaaggtctgactctttttgcacagtacacagcaaggaatttttaaagcaatagctaacatttttcatgccaagcatggggctaacatgctacatatatttcctctttaaccatcattcatgttaccccccattttacaagtgaaaaaagtgacactttgagaaatcaaatccaaggtcacggctagtatgttgccaactagttgctctccgctgatggggcagtatatcttattctctggaaattaacaagttagctgatgttagtttgaggcatatacattgccttcagaaatgaatatgctttggtcactgctgccattagcctttgtgtttacagaatcaagagactaatgacttccggttgaccttcatattgaaggcagtggggtttatcctatagttcctgactatccctacttatcttttaaaccctccagttattgcagcatttacatctttcttcatttaccattattgaatttctattgagcacacaggcagcattcaaggagataccaggatcatccagacaaaatatgtgccttcaaggagctgaaagctaccatataatcaaagtatgaagttctctcttttttttttttttttttttttgacagaatctctctctgtcacccaggctggagtgcagtggtgcgatcttggctcactacaagctccgattcccgggttcacgccattctcctgcctcagtctctccagtagctgggactacaggtgcacgccaccacacccggctaattttttgtatttttagtagagacggggtttcactgtgttagccagtatggtctcgatctcctgacctggtgatccgcctgcctcagcctcccaaagtgcttggattacaggcgtgagccaccgtgcccagcgaagtatgaagttcttaatcatccatagcatgaaatgtttcttacatgtatcttaattatgagatgaacgattttcaaaatcctgagcccatgacatttagttcctatctgtatgacgagcacttggtagtctgccttgttttgtggttatatcaagaaactctaacttaatcacagatttctccatggtgcagttgtagatgctttgcatctgaggactaagctctgattttttttatcatgcccaaattcctatctaaggggtctggggagtcatgccccacaaataataagttatcatcaaatgggttttatttaactctatatatcgtgacttactttccaacttgactctggcataacattataagacaaggaagaaaataaaaatattttaccccaaaacatatttctttgccatatcttgaaatggccatacaaagctgtcctttgcggggaaaaattctcatctgtaaagaatccctataacatagctagatctttttcttccaggccccccaatcctaaagagattaaaagtctagcacctttcaaacatctgaataggaaacatttgtcatctattgtctctaaaggcagccactacaagacttcaaaagaaccttggtctccacaatcttttatcttaacttgaacattccctttctgttgatcccaggtcttcagacaaactcaaccaattatcaaccagaaaatgtttaaatttacctatagcctggaagccccctcccctctcgcctttgagttgtcccccgtttctggaccaaaccaatgtatttcttaaatgtatttgattgatgtctcatgcctctctaaaatgtataaaaccaagtgtgcctggaccaccttgggcacatgttctcaggacctcctgagggctgtgtcaggggccacggtcactcacatttggttcagaataaatctcttcaaatatcttagagtttgacttttttcgttgacccaccaattggccggattattactcattatttacttgacaaacacattaggagccctgtccccggaagctcgctgtcacgaggggcctctgacatctccttcttgagagaaaggtcgcctggcctgggtgaggtcgtagttcccgcgaccccgtgcttgcaagtactggctgcctcctactatagtgtaagctccaggaaggatcccgcgggggacctgacagctcacggtcctggccgacaaccgccctgggagcggaatggatggagcccgcagtcgtcccggcgcactgggcaagctctgctcccactgtggcaggccagatctccattagcaaccagagcagctctcaccaacgcctcactgtcattctgatgcatgtataagttaaacattggagaaactggtgccttaggagaaaggctagaatgtaaagacaagtccattaggatcccgcctgagctttttcaacccctagagtttaattaaaataatggagttgttcttgcacaccttgtaccaggacccactttagattatttccaaggctctgaagcaattgtctagacacctgaccctattaccgttaaagattggcttgagtgaaacactttggctttcgacttgtaaatgcactgaatgtatttaagcactagaaaaacttgtattaataattttgagttggtctggtgagttactccgaccttctccctgtaacctgttgcagaaataaactccgttctttcccagtctgtctgcatctcgttactgaacggcgagaacaagcagtcggacccgggtgggtcggggaacacaacctcacccgcagccgaaacccctcacccgcatcccttcccggcccgtgaggcgtccgcaggcggcggcgctcgggacacggcgttcgcggtgctcgcctccgctgcccgaggggaaaagggcaggagaaatctgaggagtccttgggccaggagccaaagcccctcaagtgcccgggcgcgaaccccaggcgccgagctctcacgtctgtctccgccagtacgctagagccggggtagtgggccagcactcaccggcccagccaatccaggacccgctctgcactgccccacccgccgcgcacacgcacgcgtccttttgcggccgctggcctctgattggctgggacggctgtgggtggggagaagccgggaggactgggtgcgcctgcagggatcggaagccggttggggtgtgagaggttttctcgctctaggtaagcgaaacaagccgggggactgcgagccagggactcgggccgcggggcgggaagaagtggggcagcgcttggccaggccgaaaggactttgggggtgggggctgggagtccgtgtctcgaatgagggaggagaggtggagttgccggggctcaggcccggcctcgagcatgggcggatgagaggagtcgggagccgaggcctagggtccttcgggtgaggggagacggagccagcgaggagatggagcagaagcttgtggagtgagttgccgagcggggaagactcgctgatggggtggtaatgagagacgggggccaggagggtgttgactgggcccgacggcggggagcgaggagcgggagcttccccggagcttggaacattctgaagagcgggctaagcggcaggcgaggcgggataggagagcgagcgctccggtcacggagtcacgacaaggtcacaggaagagaggcggcgaggaaggtcgggaggttgaggggagggcgtactagcagaggaccttccagtcctggtcttgcttttctccccgacctggtgtttcctccaccctgggaaagtgataaggcctagggtcctgtgtagtgcttctgtgaccgaattaaatttttctcctgccgagtcggcgggttagagattacaaagcacagcgtaagggcagaattaggagcagccgacatgatgcagcagtgatattcgcctttgtcttaaattcccggagtgggaagcagctatttccctcttcggagtaatccccacgacagggatccctgcttccggaagtacaaaggcactttggagtaagacaggtttggatggaaagttctaacaggttgaagcggtgacaacctggtcatgaagctccagcatgacacacatatttggagtcctgtatactaggagttctctttgtgcaccagagtcacttgaaggggcttcttaaagattccttgagctctgccccagaccacctgaatccggatctcca

SEQ ID NO: 10001 - DNA, 6000 bp, Homo sapiens
acaacagtttatgcagtcctcgaccctttactaaaatgtgtaggtacatcttccctttcctactgtagtaggctggcttagattattggttcctaaccatttcatgtgggctaaactcatttcatgggctaaacatatttaatgctaaatatgaacacaagaatgatgcattttttatcatcagattaaataacaattggacaaaaaagttacaatgaagtcaataatgcttttaaataagtgcatttttctagaaaatcacaggatgtttgaaaaagaagtatctgggacattggtacagccaggataccatgcttggaatatatgtgtggtggtccctcgtgatgactcaagcccacagattgagaagcactatggataatatgatcttctaaaaagccttgcaatttaaaatttttttttaattcttcaagtttaaaaaaattactgaagcaaaatggcacatcatggtagattttataatagttcaaaatggaatatgatctaatactttaagcacctcagtcttagacactatcaactgtgactaaatgcttttcttcagtgataccccaatattcccattaattaaaacaactatgaatatcctttgcacttcctttacaagtttttgctatcccagaaaaaaggtaattgtgcacactaattgtaaaggaaaatctccaacccaatagacagaagtccagtaattctatcagatcattttacattaaggtaaacataagccaaaagacaaaaatacagattttccattctattttctgatatcaaaccctaaacagacaatatttgtctatttattcattcctttaaaaactgtagctattgctcaggtggagaaaggacagttagggcatcaggattctgccaggtttccatcagtgaaagcaaatgcttctggttgcgaaatccaccgaggatgccaatttagaggtgctattcaaatgtacagcagtttatccaaccacagataagaaattacaattactgatcaattaattacatttagatagtctaataataactctaaggaccagactattaaaagaagacaaaagtagtctttcaatatttactggtcaccaacagttaagatataaatttccagtttaaaaaaatcacaaagaccttcctattgttgctttaccaaagaacaatctagtaattcaaagattacaggtgtaggcctacatattccacaagatggacaatggtaagtgcaaatgttttgccttattttatttggggccaaaaataaatcattttaaagcagtttaagttacacaaagagtccaatcttaaattctaatttttaacagcagtcaggtgaataaaaagttatttgtggtcaggggcagtggctcatgcctgtaatcccagcactttgggaggccaaggcgggtgaatcacgaggtcaggagtttgagaccagcctggcgaacatggtgaaaccctgtctctactaaaaatacaaaaattagccaggcgtggtggtgcgtgcctgtaatcccagctacttgggaggctgaggcaggacaatctcttgagcccaggaggcagaggttgcagtgagccgagacctcgccattgcactccagcctgggtgacagagtgagactccgtatcaaaaaaaaaaagttatttgtaaaactaaaaaactctgaaatatcatgaaattaaaaaatcatcagtgttgatccagacaacgtggaaaagaggaattaggacatctaaaatgtgaaaaggagatggctaggttttatcaaataccaatggtacagatcccctgggatgaggtggggtggctgaaaccacaatgaaatgttaaaatctagtttcagccggtgaggtggctcgtgcctgtaattcctagcactttgggaggccgaggtgggtggatcacctgaggtcaggggtttgagaccagcctggccaaccaggcaaaaccttgtctctactaaaaatacaaaaattagccaggcatggtggcgcatgcctgtaatcccagctactcaggaggctgaggcaggagaactgcttgaactcaggaggcagaggttgcagtgagccaagatcgtgccactgcactccagcctgggtgacagggttagacgctgtctcaaaaaaaaaaaaaaaaaaaaatttagtttcatgtatagaaactatctttatttttaatgtttacagaactgagaactttttggatcttttattttacctactattcttccatgattaaaactaaattaacaaacgaaatagaaaatgactggagaatttcagacatccaaaattgatgtaagacaagtgataattaattcaaataatcctcttgataactacttttaatagcagcagtgagctattataaatgatcataatgagaatcatcaatttttagtactgaaagaaacagaagagatctaatattttaatcctcttattctacagggatgacgctaaggtcaaggagacaaaatgactttcccaaagtgacaatgctggagagcccactataaagcttacaaatcctagttctaacacagtccataagttcttctactatccagtcataaaccttttagaaaataggtaatgcttcactctcccataggaaagatcatatggctttctcatggcctagcacaatgcctcacacactgcagatactagtttgttcattcctacaccaaaacttcctttaaagctaatttgacatcctagtaaaaatatcttcgcccgggcgcggtggctcacgcctgtaatcccagcactttgggaggccaagatgggcagatcacctgaggtcaggagttcaagaccagcctggccaacacagtgaaaccccgtctctactaaaaatacaaaaattagcggggcatggtggcgcgcgcctgtagtcccagctattccggaggctgaggcagaactgcttgaacccaggaggcggaggtggtggtgagctgagatcgcaccactgcactccagcctgggcaacaaagtgagactccatctcaaaaaaaaaaaaaaaattcaacctgaatagtataatatggaaatgacttgcatacatatttaagtgtatacacttggatacaattagaagttacttgaccaactgtatatacttatgtataaaactgggagatatttgaccaaacgtttctctgacctcgacttactctggtactaccattgaacaactccagacccagagaaaatccaccacacccaatcccagtattgtcaaatgcagccagactaattctctgcacagctgtcagataccaaaaggatttaacagtcagttcaccaaaaccatacaaagcagttcactaaataatccaatgcttggcctcacatcagagaaactgtatcatgcatattaggcttggtcatgtacatttccaggtgaaatggaaaaactgaatttaagatgcttccaatcaaaaagtttaagaagtcactcccattttttttttttttttttttgtatgtgtgtgtaggcctggacctggggcagggggctgtgtgcaaccaagcctggtgagcattgctgtggccgctactcttgtgcagcaagaggggacagtgcagtgcagagcgttttctgacaaaggccaaggggtccggagtgcaaaaggacaccttggggctggggcatggcaggagaggttacgggcgctgagtgcttgcagccaagggggcttcggggttgctgagagaggacgagccttgggagcttgacagttctgcttacagttcagaggctgtaaaacaaatgccactgaacaccatttcactctttagaacctgtgtagtctttctttttctatgtagaaagccatctaatcgtttttgtttttgttttgcttttgtcaactaaccgtcactgtagttgcccacttacccccagcaaaaacacactccaaaagggggagtggctcattattaaaaggctcttagcgattaggttgtaggctttggaaatcacagaaacagttcgtatcacgatgtaccaattgttaatcgaatttagcttccttcacttattaaatacaatcatcacatttgcaaatgccccactcccatctacaacactagggataaatgctgtgtcactgagaagaaaagcaaaggatttttctgaaaccaaaagcaaactgtcaaagaatgccagtaacctgtcatcgagctactctatgccctccactggcagccagaaatgagtctccctaaacccaagtgttgtgctgccgcttggcagcttccgtctgatgggaagccccctcactgacacaacccgccaaggaaaagctgcacgagccagtttcctcctctacggcctggggctgcttctcaccatgtccaagtgagcaccgggaccttcagggtgtccgctgcccggggccggactggccctgccctccggggtcttccgttcgctgttgcgcttcaggccgctggcgtcgccccggcctctggcctcccggcgccgttgctgccgactccacaggtatatggcacccgcgcccagcagcaggggtgccccgaccgccagagccagctgccatcgcggcagcccccccgtgcccgggcccgcagtcccgccgccgcccaccccactcccggagctcggtacagcggctgcgaccaccgctgcctccacaggtttagaggcggccatgacaagtgtcctctgccaccgcctccctgtctgtcgcgagcgccacaatcaccaaacagcgtgcgaaggaagaccgagggagggaaggaaagcaatgagcgagcgagcacgctaggcagagagagcggacgacagaaaagggccagaggtcaccggaagcccagggcatgccgggccagacctggccgtccttctcctccagtatcaaccgaagagggagaggaggggcggaaatcacttccgggttaagggaaagcgtgggtgtgagtaggagtcttcggaaaccctttttctttcttttcgccccgctgctgttcgggagatggacttctggagtccccgtcgtagctggtgttgtcccctctaccttcaggaaagaagggcagatggccctcttgcctactgaagccgaggaggggcgcgtatacagcgggctaagggcgctcaagagatccgagtggaagaaaaagcagcggcacagcactggaatgggcgggagtggcagaagagttgtgaaggctattggctagcaagggtggtgggcggggcgtagaccgagctacccagtttactggtcgatttcggatccagttttccagttatagccacgttggcacctcttgaacctctgtggccgttagcacggttttctgcccgcgtgcccgagaaaccaacggattagaaggacttttaaagatgtgtgaggaaagagctcaccgctgaagaaggctgctgcatcactgaacttcttatcactaacatagcgagattttagtttggacgaatttgaggttataggggagatagcgatggcagaagactaggtggaaatggcacatctaggttggctgcagtcgaaacggtttgagcgtggtcgctgtggctcatcgtcggcaccaattaacgaagcgatgacatctgcgttgttaggggtttcttaaactgagttggtagaaatgcgaagcgtcagggttcccgccggcttcgagcctttcttggcgtatttgtatcttgagctgatttctgcgtcagcccacatctcgctctgatccgcacgccccccgggttgttttgcagtagcagtctcagccctcttctcgtctcattcccaaatcgtaatttcagttcacagctttttatctataatagctttatcaactctttttccgatgctctgcaccagatctcttaaaatataaaattaccttgcaaggtattgtttggaatacacggtattttcatgaagacaactattaatagaaaaatcagagtccagaactatggttctccat

SEQ ID NO: 10002 - DNA, 6000 bp, Homo sapiens
tcactgaaagaactcatatggtgccttgcagcacaatcttggggaaatgccaaaagcttcgtgacgtcatctgggaagtggaaaagtaatctatctaagccagtgctttccctaaactgaagtggggtggggaaaatcatctctcgccttaccttatcttcttccatgaagtacatacacagaaaagtacacacataagtgtaccacttgatgcatcgggacactcatgcaaccagtatgcaggttaagaaactccctcaggtgtgctcctcatacttccttacagttattcctaccccagcaggaaccactaccctgacttttattttattttattttattttattttgagacagtctctctgtcacccaggcaggagtgcaatggcacagtctcaactcactgcaacctccacctcctgggttcaagttattctcctgcctcagcctcccaagtagctgggattacaggcatgtgccaccatgcctggctaattttttgtatttttaggagagatggagtttcaccatgttggccaggctggtcttgaactcctgacctcaagtaatctacccgccttggcctcccaaagtgctgggattacaggcatgcgccaccacgcctggtcttttgcttttttttttttttttgagacggagtttcactctgttgcccaggctgctggagtgcagtggtgcgatcacagctcactgcaagctccgcctcctgggttcaagcgattctcgtgcctcagcctcccgagtagctgggattacaggtgtgcaacaccacatctggctaatttttgtattcttagtagagatggggttttgccatgttggccaggctggtctcgaactcctggcctcaagtgatccacccacctcggcctcccaaagtgctgggattacaggcgttagccaccgctcctggctactatcctgacttctaaacactagattggttttgtttgcttggcactttctgtaaatgggatcatatggcatgtatgcctgcaggcatgcacacagatataaatgtacaaactcttttgaatctgccttatgtttgtgacattcatccatattgttgtacgtagttacagatcattcattcttgttgctgtgacggaatttatctggtgattcctttctactgttgggcatttgagtgctttctaatgttgcctgttgtaagtagtgctactgcgatcaccctagtatgtggcttttggtgcgtgtatgcatgtatttctgttggttatgcgtagaaggggaattaatggttcatatagtctgcacatttctgatttagtagacactttgggccttatctctgatggatgcaaacttaccatctgcccggagtacccagcttacattcatcaaaattgaatagtcccctgttgcaacactagttgtaacaggttctactcggaggtccctcaagtctccggggattagatcatgttgtagcatccactctggagatggccctgggaaaaagcaagacttccatgacactgtctttcccagcccagtctgatgccatgccatctcctctcagtgactcacaccaaaccttcccccattcacaattcctcacttcttttttttttaattaaaaaaatgttttttgtagagatggggtctcactctgttgcctaagatgatctcaaactcctggcctcaaatgatcctcccacctcagcctcccaaagtgcttggattataggtataagccaccacgcctgacccaattcctcagttcttcctgctaaggccaaatgtttcttagcgctggctgatttatagcccagataattttgatctaacagaagtactctcaacctcctggctttcacctacagagcacgtgggaccactccaggtacctgtgtatgtacacatgtatatatttagtgtatttgacatgtttattagagtcaggcctgccttcctcaggctttggccctggattccagccagctggcccacacagcccccactttcccacctcctaacctttgctggtgccatctctcctccagctcactcttcctacccacattttttgggcagaagcctacccattcttcaaatgccaccatctcaaacacccgctctcctatgaaacatttgcttctcggtcccaactctaagtgaccttccttccacggccttgatctccctctgcagagtggcaggcatcactttccaccttgtatggcaagtcccatcttgactggccaagaggctagcctgtctgaaacacggcctcattcccacagagccccagagttctgcttcgagcagacagagacttcatctgcatcagccaataaagcaatgggtcaccctgtgtctggtcttcgatgacctattgcctatattaggcttcctaaaagtccaactgtgctttcaatgtaaagccccaaatacccattctctaatgcacctaccagtttcagagccacattgaacggtctgtgggagagaaaaaaccaagcgtcacgttgaagccggcaaaccacaagctttcctttgccaaattaggcagaacaccattttccccttaaatgcatatacaagtgacaaactttcaaagaaaagatgaactggttctgcttcacagcttaggggggaactaagctgtcccactgtaggctatgacggaccatggattagccatcagtatacctgatcctcaagccagtgcataacctcacttgaagaccacaggtgggtctccatctgtctctggatgtcatccttccctgctgcaagcaggggatgacttgggaccgatgtgaggccccttcacactctaatgtttaactctaggtttttaggacggcctagagtatttactgggctaccccaggttaaggagtagctatgctaaggagataaacaaaagaaagctctgaatgcagtccatggtactttcctcaggttctttaaaatgttccccttctaacacaaaaggactcactgagcaattcacgaaaccataagcaattattagtgttcaagaaaggctggtactaaatcgtttgaagttagctgctcgtgttttttcataagaaaaaataatttgtgctttggttctggaataaaatactgaacctaaaatattggggctttaggcagcagcaagctcaaatgacaagactcaatgtgatacgtccagcagctctggaatatgctgctgagcatccacatttccaaacaccttctaagatctccttttgatggtttgaatgatttgagtttgggcaaaattgtcaatcatttatttgtcttttaaaaaatgaactctaagggatatcatcagatttttttttcctttttctgagacagagtctcactttgtcacccaggctggagtacagtggcgcagatctcggctcactgcaacctctggctcccgggttcaagtgattctcctgcctcagcctccggagtagctgggattacaggcgcctgccaccatgcccggctactttttgtatttttagtagagacggggtttcaccatgttagccaggctgttcccaaactcctgacctcaggcaatccggccgcctcagcctcccaaagtgctgggattacaggcgtgagccaccgagcccggccagacttgactttttttttttttttttaacaaatgagccatcataccaggagctgagttcttatcaaacggccggtgagaggccaagcaacaaccctaaatgctaccaagctcaaattgttggccttgcagcaactacagcaaaagggatgaattcttccctttagtgcaaagagccaagagggcttctgaactgacacagaggggaaggataggagctgaagacatcaggaaacagtgaatggggtttgtccaccagcaggtgactacggagcttgatgctatatgctattctaagagggcagcggtatcatttcaaaggttatttgggggatgagctattttctcttcagtgacccagaagattccctcgatcattcagggtactggggaagaaaggcaactgccttcacgagtgaacatggcaatcaatatggccaaaaagggagggggtactaatggagaaacagttcttgtgccccaacaggtgagcagaccccaagtaacaataactacgtgccaggcccttcgccgctaattgcaggccatgtcgttataccttaagagaccctggtgggttcggtactgcccttcgttttaccgttcgggacttggaacttggtgagcataaatgacagaaccaacagtacagggtggcatctgagaccgggtctgtctgattcccacgcccctgactcaagcaacctgacgccgatgtccggggctgccctgagggtgcaggcatgccccttgagccggcagtccgcgcacgccttcggggcagcctggactggcggatcagacgacgtcaggatctgggctcgagggccgggagatgagggaagaggtgctggcgggggcttaccggctctcggggtacggcgctcctgcacagcgcggccaggcttagcagcacgagcgacatcgccgggccactgcgcgggatccaggccacccgcacgctgcgcttttatcccggcgccgccgggccgccccttctcggctccgcctctcgcagcgccgacccattcccgccacccgaacagagggcgggcccgctggccccctcccaggctggggcaggtcgcagcgccctcgcctgctggggctcggagggatgggccgtgtccgagcgctggcggagcacgggccgccgcggcgcgcgcctacccccgcgcacacgtgcatgcagtgagccaggtgcatcagctgcacccgccctcgggcttcgcgcgcctccgctggagcccagctagcctcgcggctccggggccgaccgggtcggaactgctgcgtccccattccggacgcagagagcgcgcggggcgccggcgccgccggttaaagtgccgcggggcaggggccgggccgcggccacccgctcctcccgctccggtcccgactgtcgggctctcggccgagtcgccccgggtgagtagccgcggaggcgccccgaccaccccgcagcagcgccgcccggccgctagcccggagaggcctgggggccggaggtttggggccgggctggacgccgagacccgggcccgctttacacaatcgccccgccgcgcgaagcgaaacgggtggaacgcagactgccgaagctcactgactcctttgagggagcgaattctttcagctacgcggggttagagcggtaggagtgcccgctgcccgaccccaggctttctggtaaatgtctgtttccaccaagtgagttcggacagcaacacctggggctcccaaagcggaagccgtcagcactggcgatttggagctgcggttctcaagtttccctggcccgggatctctagcgccgcctaaaatgagatccagacggcaggtccgggtcaggcccgggatctgcatttaacgagcctccacccacgcccccgtaattcgtgggtgggtggcccagggaccatcctttgagacacagtgggtttgggggaaagttcacaaaaatcagctgggctaacagtggagtcacagaggctggaactgctgcttcagccccctcggtttgcaaacgacagggttgtggtgaccaactcagggccatttaaacttgtaggcagaattagctccattctacagatgagaagacggaggcctagagaggggtatggaacttaggggtgtgttgtcagctggtgagaggctgtactaagtcaagcagctgttttagctgaggccctacttgtgtgccaggcctggcccacctgccagcttgattaaggcttgcatggactggggatcagccaggggtttgggctctggcatgcatacgtgtggagttgcaggtagcattttcagagaattgctctgtttcctgaccaaggaactcagttgaggttgtggccg

SEQ ID NO: 10003 - DNA, 6000 bp, Homo sapiens; identical to SEQ ID NO: 1086

SEQ ID NO: 10004 - DNA, 6000 bp, Homo sapiens
actttagccctgtggtcttccttccaaaagcatattacattcttggcctaaccacaatgaaaacatcagataaatcccaaagaacgttctataaaaatacctgaccacggctggacacagtgactcacgcctgtaatcccagcactttaggaagctgaggagggtggattgcttggttctaggagttcgagaccagcctgggcaccatggtgaaaccccatctctacaaaaagtacaaaaattagcagagcatgatggcacacatctctgggcccagctactccggacattgaggtcagaggatcacttgaccccagagtgttgaggctgcagtgagatgagatcgttccactgcactccagtcttggtgacagagggagatcctgtctcaaaaaaacaaacaaacaaaacctgaccagtaatgttcaaaactgccaaggtcactaaatacagggaaagtctgagaaattgtcacaaccaagaggagctaaggagacataattactaaatgtaatgtggtattgtggatgggatcctgggatagtgaaagaacattaaggaaaaaacctgtggaaacctgataaagtatggtctctgtgataatgtatcaatactggtttattaatacagacaaatgatcacagggatgtaagacgttaataatatgggaaacagtgtaggataggcaggaactctgcagtatctttgcaatgtttctgtaaatctaaattttaaagtctatttttaaaaattataacaaatttatgatcaacggcatccctggaattttactcagtgcatctaggacacaaaagatacttaaaatatggtctttgccttcaagaagcttgttgtcgcagagtgaagacaaatgctcatgaaactagtataaaatacaaaaataagaaaaaattaaattgaagagtaaagataaaactatattaagaatataaagaaggtctagaattatcaggaaagatttggtcaaggagataaaacttgaatttgtaccttaaaatatacttcagagtagcaaagttaaaaaaaaaaaaaaagaataaactaagctcacaacaaccagaagggtgaagaaataagaaaaagctaacagaaattaaaatggctggggcatggtggctcatgcttataaacccagcacttttggaggccaaggcaagggggatcacttgaggccaggagtttgcctaggcaacatatgagaccccatctctctccataatatctttaaaaaaaagaaaaataaaaacattcagctctgaaaagtgaagacttaaataggagacataatagcagtgctcaaacactttaagggtcatgtggcagaactaacagagttacacctatacccatttaacttacaagccaacctctggcaaaatgtgaccaatgctcaaggacaaagagagtgacagctgttcagtggagccacaacaggaaatgccaatatggatagacaggaagcaggtggctaagttctctacaacttttcaaaggacagtatgtatgtgagcccaaagaagtaaaaatcagattctaattctgcaaatgtttactgactatcttaagtgccgggctctttcaaatacattatcttgtttaatattcgcaacacatctatgagcatgtattaatgtaatagaggcttaacataaaaatagaattaaaccctgcatggaaacaggaacatgtcaaaattctataccatcccccactctctgatagggactccagagcagttttaaaaagccaaacagtctgaaggcccagatacctatataacaatttatttcctcttgctctttccctcagtcaagctctgtggctctcagcctttcatattcgtaagaattttatacaactatacatacaaaaacatgcagaccatactttttgagcaatttatggaattttccagaagagttttcatcttacatgatttttgcctcatgcactaacttgaggacctaaccctgggatgaggtgcaactccactgcagtcttactccatgggtactgtaaggcaggatcaggaagaggaaacggaaaggtaccatcctattacatgaagaacaacattctaacaaagacataaaatgtatttacataaaatgtaagaatgacatgttatgtggggaagttcaacactggaaaacaagagcagctcatctgcacctgcagacctttgcactcactgtttcatttaccaggaaagcgctaccatttttcaggtcacaactcaaataccttctccttaatgaggcctcctctcactaagtaaccctccacccacctttcagtcattcacttgtcacatcagcttgttttattttcttcataattcatattaggggtcagcaaacattttctataaaaggccagactataatctataggccaaatccaccttgccccgttttatatggctaagaatggttttacatttttaaatggctaggggaaaatatttttaaaaactcattaatattctgtgacatgtgaaaattttatgaaattcaaatttcagtgtcccaagtttaactggaatataaacatatttgttcacgtactgtctgtggctgcttttgtactaaaacagaattgagtagttgcaaaagagatcatatggcccaaaaaccctggtatgtactgtacttcctggtcctttaccaaaaaaagcttactaaccactgatttatatcattatctgaaatgatcctatttgcttgtttgttgtatattcctcattcccatacatacagaataaagcttaattagggaagaggccttgtctgttttgtcccaacaatgtagcccagtacttagaaaacatcctggaacaaagtaagggctcaataaacatttgatgaattaatgaatgatccataaatgccactctgaggagcttaaacctaagccctgagccattatatgttctgcacatttatgagaggcataagcagtcttgcagaaaaggggaaatattctactatcaagaaggcccagtttaaagtaatggtggttggtcaccaactagtctagggcactggggttcttcatcaaattgtagactacaggtcttttgtgctcataaaagagtccttctgcaaggtgtcccaacactgtcagcggtctgtgcttctgtttatcttaagatgcaaatgctctgagaaatctcattcttatacacagtacacagcacctacaccataccaaatcttaatcaatgctcataattataacagttctacatcacatgctaatgaatttttaacgtctaaaattttcctatgctgctgatcagcaatctataagcagctcaaaactcttcagaaattaaaaggttaccacccacagaccagaagcagctttttaatctttctacactagccagagagtgggtgattgcaaaaaaatacaagccaactctgttggtagaggacagggttattaagttaaaatcccatctataagcatcgttttgtcacatgacactagtaaaactaccacctactcacaatttgagtttcaatctcctaatatacagagaaaaaaatgtatctacctcctggaacaaatcaaagttttgttttattttaaagcagctatctgatatttatgccctggattttttttttttaagaacagaataagctaatttaggaattcacacctttcgtagagatgcttatggtacaggtacctctgacggctaggctctaccaacactaacgtgtaacgtgtcacaaaagccaacgggcgttgcgggggccgggggtagccaacagctcaagtgggctgcttcactccgtggcagattcacctggggattcctcaccaagaatgttgttaagggacgaaccaaaccaaccacaaatgatacccctttaccgaggctgaaaaagcagagattcgcaagctataaacgaatctctggccctttagggaaggtgcaactcgctgcacctctttcccctatcctacaggggttaacagggggcatcctgaggccgagaccaagcccagccagctcctcctcacatcccacctcccactacatattctccccagtacgccgggctccctcctcccctcgaaagacagttcaaaatcaaaacaataggtgcaaaactggtttcaggtggaaatggctgagtcctggtggctaacttctgggacgccatggcgatcgagggctcctaaaaccccagattccgacgggaaccggctcctaaacagtccctcgggcctcggcccgacttctcacacgcccctccctcacctcggccctgggatgctgggaagggaacgaggcgaggggctggaggggaaccccaggtcaaaatgacagcggaatgagccgggaaaggaaagaggccccgtgggatgctgggggtcgagtcctaggcccggggcttcaacctcgaacgggggcgacggcaggtcccagccccgacaggccgcgagcgggaggccaggcccgcgtccgctgcgccgccaggccacgctccctcacgactgtccccacccaccgcggagggccgtgagggggccgcgaccgccgccagcgtccggggcgggggcgctcactcaccggcggggaggggaggagcagccggcgtctccgccagcgccgtcgctcgagctcaagcgcctgctccttccactgcggccgccgcacccggtccatcccccacaaccacccccccctcccgaccctccccccgcgccgcctcagccgccgccgcctcagtcaccgccaccgccgccgccgcctcagccccggcgcgggagggcgaaccggcgcgagagagcgagcgcgcgcgcgcccccgccacagccgccaccgcccacaacctccgcccccggccggcggcgcacgcgcaagggagcgggcggacgggcgcgcgcacgccgcaggggcggggatgggccctggaaggcgtggcccctcccctagcccgccttcccacgcggtctctgggctggttgagctgcgccgctgcaggtagtgctgagttgctccaggtaagctcctcctctcaaaaagctctaggaaccgagccaccctcgccctaggagcaacgcccctgagtaatatggggtttcgtcggatttctgcccgccgctctggatcacacgtttgttctccctatttgagtcgcaaggccttccttcattccacctagcaggctgcttggaaaagggcagagactcattactttgcaccaggtattaccactgaagggattgtaagcagccaccagcccatccctttataattcccattttcctaatttattttatttttattacttatgtaatgaggcttcttccgtgttcaaggagctgggagtaccatatggggtcaacggagtccctggtctcatgaagtttgagatctggtggagaaggaaaacattcatgggagaatcagacaaaattaagttttcaattagtaaaaatcttctgagaggtatatggtactaagagaatctttatgggggaattgatttagttgaggatgaagagggtagaatctgaggaattgagttgggaggagttagttgctccaaggggtgaggtcttggcatggccagaatggggagcgctaaagaatattgaatgtggagtagactgcgagtgtgggaagaggtaggcgagaacaggtgaggattggggacctatttatttatttatttattgagacagagtctcactctgtcacccaggtcacccaggctggagtgcaatggctcgatctcagctcactgcaacctccgcctcctgggttcaagcgattctcctgtctcagcctccggagtagctggactaccagcgcacgccagcgcacctggctaatttttgtatttttagtagagatggggtttcgccatcttggccaggctggtctggaactcctgaccttgtgatctgcccgcctcggcctcccaaagtgctgggattgcaggcatgagccac

SEQ ID NO: 10005 - DNA, 6000 bp, Homo sapiens
acatcagctgtgggatggatcacaatggaaagaactgtgattaactcagtatcctcctttctctttttaaaatctaggcccttgattaccaaatccagcctccgggttcatcgcctttgctctctgacatggtggggactctcactctgcacaggaagaccccagacattttacctcattggtgaaaattaggtagaaggagagcaggaaggccatgagccccacaaacatcccacccgaggtctcgctcagccgttccaggaagcctggctgggagctggttttaactttgacatgttctctccgggtactggtactggaatactgaagaaaaagaaacagtaacagaatgaaaactagtttttaaaaataaattaaatttgctatttatttatactcaatttttttttttttttttttttttttttagttttaactgtatgtggtaaaaacacacagatattcaatgtacagtttggcaggtttccacaaacgtatattccatctgaccaacatctaaagcaaggtacaaaatatttccatcaccccaaaaagtttctttgtgcccctttcctgccaattctccccctctccaccaaccagaggtaactggtggggatggggagaatctgaatttgaatttctcctaccgtagattagtttgtttcttctacaacttgagaaaaatggaatcagggcaccaactcctttctgcccagcttcttggactcagagcactgcttttgcaattcattcatgttgtggtgtttatcaggaatttgttccttttcatggctgagtagtattccatttatgactataccacagtgtgctgaatcattcgtcagtggatgggtatcttgacagcttccaggttttggctgttatgaataatgctgctgtgaatattcatacatgaacctttatgcagacatgtgctttcatttcccgtaggaatatacctaggagtacaactgctggctcgtgaagaagatgtacgtttaactttttatgaaactgccaagctattttacaaagaggttattagagatgtatttttaattaaattcagcaaacagtggctgagctttctgagggcagtgctagcccttgtggggtcagaagtagacagtcttagggcagtgaggtcacaaccataaacaatactagaaggtcacacagagggtcctgtgatgggggtggacttggtgctcaaggagtgaccccttccacctggggtatcaaggaggctcccttgagtggaatcttagaggcagatcttaggggaagagcatccctaaagggagaaccgtatcagcagtgatgaggaagtaggaagtggttctgggggagcagctgcctgtctgctttggctgggtgggagcagtggaggaagaaagggcttggaggtaggcatttctgggcaggttcacagtgggcctcaaactcaagggtgagtggatcaggctttggtcaataacagaggcatgatttggggtgcatccactgctgatcaaaagtgtcatcgtctagggcaggattctggagccagaagaactgggtttgcatttatgctctgccacataccagctacggggtcttgggcaagcaacttcaccactttgtgccttccatttcctctgtgcatagggttgtggtgagaaccaaagaacacagttattgggtagctcagggcctagggcgtggtaagcactggacacgtgttagctagtagaaatgttaccagatttccctacaactgatactgggctggcaccaggctgggggtgagctgacaaaagtcacaaagatgtaaagtggggcccagctaagacaggccccatcctggtattgggggccagaggagtgatttgactcagaatctctgcttgaacaaagctgatgtcgcattctgattgtctttgagtaccaccagccaaggcctccagtgaccagatgtccatgaatccagaagtcgtcttgactttccatgccatttggaaacattaggtgagtgaatcaccacataggggcaggtgaccatcacaatgatgacaatggcaaacacaccgggtctatcacaggccagcccacaggcaagcccaaagagcgggatgtcataacgaccccatttcaccgataagaaaatcgggctcagggttacgtcatcttcccagatcacacagcttctaagaggaagagttaggattcaaatccgggcagactggaggctactctcccattactcattccagtctgtgctccccatctcttgggctacaatgtgagctgaatgttgggagccagctgcaggcagcaataggaaaataaggcgtgtcttcctcttgggcctcccctcagccagcatcaagataaggggctcaaagacggccttggagggaaggaagagaggtacaggagggtgcccctcaggctaggggaggggtgaggtgggcagtgacatgacaaacccagcccacattctgaaccaaaattcccagtaaacatggaggatcataaaggatctatatatccacacatatttatatatacatatagtatgtattacatgtatacacacattatataaacacacacacacacgcacacacagacggacatccccagtgacacatcccctcccagtcctagcactcaggacttagaagaaatgagcaatgagtggtgggaacagaggctgacacataggccctggaaatggacagaactggatttgatgcctaggttcaccaatcgcttgctgtgtaagcctgggtaaattgctctacctctctgattctgtttactcacttataaagtggagaggggaatagtaccttcaccacaggtactgctgctgctgtactgattgagaattttgttgcctccctgctccatcccgctatcttcttcctcacccagcctagtggctgctgtaaatgtgtactcagctactggatgaatcaaaaaatgcttggcagcagagaatactcaaatgcatgtatattccttggtgaggggtcaggtctcaatgtacccaagatgatctctatccactgggaccatttgtgctaccctgcaaggacaggcttgttttcaagtattaagtacctaccacacatcaggcactgtgctaagcagtctcccttaaatatcacagtaactgatccatgaggctacataaacctggagagatgaaagccacacagctactgggtggaagaatctggattgcccccaggtctccctaactccaaagcctgcccttttcagcatatttccgtgtcacagcatgccaagccggccacgagagcttgggcaagtgccttcccctgctagggaagttccccatctgtaaaatatggtggtggtagtgatgggagcagacaaagagtccacatactacagacaggctggtctcctgactgccctctcgcctggccgagcctgagtctctccgaatacctctgaggcttttctaggtacaacattcaaggcttctaaccctcctgtgggcccgaaatgtcctgggagtgtggatgatactaacccgagacaaagtgtactagggctgtgggtgatgcacaccctggcctctcaaggggtgtgggaggcagagaggacgcttggggacagaggcggtgtctggaaatagggtgtgacaggcaaggggagagctgctaggacactctaccaaagcaggagggagggtgtgtctggggctggctgggctcctaagcgggccctagaagcactttcacagaggaggggagaggtgagtcaccagcttctcccacacccagcgccctggtaggaggcgctgcttgttgaatgaatgttgggcttaaatagtttcccgagaaaggctagttgcagggagaagaggccttgagggaacagccctcagccaggcctcctccaaccaaatccttgctagggggaggaggggccccgacagtagagaaatgctccctctcccccaactccttcgctcccagcccagcctaagctttttggagcatcacagactcggtttacagagactccctagggcggagagctctctgcccgcctggacagccctgtctgtccattgctggacagctccacttgggctggatcgccttcctccctcccaagggactggcgccctctctgaggtcgcgtccagctctcataatgcgcaagtttcagggccccaaggtacaggagggaactgggaatgcaaggaggggccgcggagaggcgtacaagcagatcccagtacgggagcaacacctccgagtccgcctccgcacgaacgccgaggacgaggcgagccaaggaacacggacaaaagaagcctggacaggccgcgagatgagcagagggatgagctggcgaaggcacagacacggcgagcagagggagatgcgggcctagccgcacggaggagctccaggcggcgaaatggacctagaggaccccggggaaaagccccagggcgacggggaagcctgggtgtggcccggctggcccggggatactcacattcgcggccatggtgggacccggctcgctgccgccgcctcgcgctgttcagctaggaagtgggctgacgactggagcgtggtgtccagcggcctcttgccagccccagcttcgaaaatccgcgtggactccagggccaagcgggacttactgcagttacctccccctgtgcccagtgtttctgcgcatgcgcgcggcgagacgtcctggaaactatacggtccgggacattgcagtacctcattgatgcgcctgcgcactgcaaagctttcggggaaatgtagtttctactgcctggagagctgtcgaggagcgcgcgacctgctgggaaatgtagtttccggctgaggttggcctggccgcggttgcgagggcgccgaggcaggcgcgcggcgggcaggcctgggagggggcgggtccgcgcgggcttcggaggagcccgccctgccagaggagagggaggtcacggcgtaaaggtgcagctgccgccaccgccgcttctgcaaggtctcagggacgggctgcagccatgtcctattgccggcaggaaggtagggagggcgggctgccacggagaccggcctacgagggcctgcgggagacacgcgggccccggcgccccgcgaccacgccgggcgcgggccacctgaggcgcggcccaggtgcccaccctgggacactcggaggcgggccggctggggggtcgctactcctgttttgcggatgagaaaaccgaagctctggggggaacggggctggtccaaggtcacagtgaagcccgaaccctgacctcagaggggcctgtgcgtaggaagtcgtaaactaggtccggttggggcacgggaagtgccgagcacgttgcgtgtggctcgaaactgggaatgtatggtggttaattatcactaccgctcctgccataccccacgtgtttacattttgcacgcgcctttaaaaggcgcgtcccgaaaagttgccactcggggtagcgtgtgctgtgctggagtgctaggagttccactaacgggaatgtttttgagccccctgctacctgtcaggcactgttcaaggaaacttgcctggcttgtctcacagatctcgctgcgacctttgtaagtcaggctctgttgttggtcacattttactgaagagtaaagttagacacaggagacatggctaaagccactcagccagcaaatcgtggagctggggtttgagcctgggcattgtgaccccagaagagccttatccaatctagtgcccagtggattgcagggagaaccctgcctacctcccaccccaaagttgagctccgaccacctactgcttccttgatgttactctacccaagagctcagaagtacccgagccacaggtcggagggcctccccacacactgccacaaactggctccttggccctgagctcccacctaacccctccaggccctggtatccagtgttgtaaaatgag

SEQ ID NO: 10006 - DNA, 6000 bp, Homo sapiens
ccctgacctactgtggcccttatacaactcaaagcagcctggagaggagccgagagccactcacttcctcatgaggaagcgattgatggttttctgcttccgcatcacctggacaatcttccggttcaggtagacaaagagggctccaccgaagccactagcaatactggaaagggaagaggcacctgagtgaaaaggagccttctagaaacccccctcctctctgatacccccagccccctcagctcctcacccaatgacagcaaaggctggcagctcctgcaggtcaaaggggaagtcgagccggaatcgggttttgaagagggctgtaatagtctctaaagggaagaacagcagagggaggcaggcctagcctcgtgggccccctacctggcaccatctcgggctgccctcatcccctgggtgcccccaccttcatcccggttccagactgccaagacccggaagatgaaggcactgaaggtggcagcgaagaagccccgccagtagttccgcactgcaaagaaggtggaggtgacctcgatgctgaagaggacgcctgtgagggggagggagaccagcacttgaggcctgggcctggcctaaggcctcagacccagataagaggggccaaggaggagaggccaagggcagggttgtggggctggactgacctaggagccctgcctacctccaataggtgccgcgaagcagcagcccacccccacggcacaggcggcagccagcatctctgtgttccgggattcattctggcgagagtggtggcaagagggggtcagctgtgggctcagcagcctctgccccctacttgccccagggttccccttacctcatagatacccccaaagagggagaggaacttgctgagaagggcagcacacatgcttgcgatatgcacaaaagggccctgcggggtggggcaggcggtgagtcgggagggggcccgccctgaccttggcctggcctcctcttccaccaggagggactccttcattccccagcctgcagttacctctttgccaagcggcatcccgctgcctagggcgcaggtcagcccaatgaccttagctataaaggtcttgagtgtgaggtattctttcagcaccactccccgcaagatggtcttcatctcagggatgccagagcctggagagggaacagtctcaggagaggcattcgatgcacccatttcaggggtcccgcctctgccctccccttctcttctaacataccgacagcctgaggggccaggatctgtgtgaatccggctgagaaagtgatgaggacaacagggtaggtgacccaggccaggtactggagcaagatgctggtgttcaagccccgggacatccactgctgggctgtgggaagaggacctgctggacccccagtgcacacacccactgcctgcctggccagtggaccacgctgatacgacaggctgtcccagggagtaccacacagagtcagggcatgggtgaaggaaagggtccctgagggtattcactgggacaaagcgcaatctaggcaagaggatcacttggagaggggatgcaagaagctgtgccctgtgggagtggccgagatgatgcctgaatctgggcagtcagactggctggggaaagtggtcagtggccaagaagccaagacgccttcctccatgtctagacgagtgtggcatggacgcaggaggtttattcccagtcctccccctgccagctgtcaccctcaccttgcagacaggcagcaatggcatagtccatgacccagctgaccaatgccatgagaagccccagcaggaccaggaagatccaatcttcaccaaccctggatactaggaacttgtggcagcggacagaacagactgggtgcagggaagggaagaagggggaggatggcaccaaagtgctcctaccccttttactgccccctcaactgtcccctctcccccatcagcagctctaatggcctctgcttccctcagcacagcacagccaggtcccctgcccccaccccagttctcaccgcggcatcgggcgcaacggctccgtccatattccaagagctctggggcagcccgagaggaagggggacctttccagggttcaggccctcccaggcgaatccgagcagcttcctctttggcaaaggccccaaggtcctgagtgtaccggccatacatctggagcaacagaggggatgggggcattcgaggtcatgggctgagtgggaacgcagggagagttcttagagcctccactcctcttctcccagcccccacactggatatccctcttgaacgcacagttcccactctggcccgaggtgtgggaacaatgcacattgcagactgtggaggctgtcctggccagagtgatggggacagccaaggtacagggacacagctctgggggtggcagaataatcggtcctcttctcacaggcctggggctggggcactgaagaggagtgagagggaagccccagaagaggaaaaggtggaaaaacctgtggcacagtctaaaagtgggaggcgggaaggccagggagtaagggatgatcaggggcacatgggcaacaataagagcctcgtggagctcggggcagctgagttgggcccaggagcaggcgcagccccaatccttatcacgttcctgctgggcctccggcctgtgaccaactcagctgcacctctcccacccaccctaatccccttgtccccattctccactgccacccccaccagcctgccagcccagctgggagtggaaagcctctcacttagggtgggtggagagggcttggtggcctcagccccattctggagctgcactgagcccagcggtgggttgggggacagcggaggctgaggatggctgggctgtgactgtggatgctggggtgatgggacgggagagtcgcctgaaccatggctagacctgccaagctgggcgtgtgttggggggcggggaggagtagattctggctgccacccgcagagcttcgggacacaaagggctcctgttggggctgggatgggggggagggagggagggaaagatagagacagagagagggtgagagataggaaagggaaagcaaagagaagagagggaactagagaggagaaagtagaagagaaaagagagggaaggcgaagggatggagaagagaaagaaggggatgagagaggaagaagtacggaggaggaagagaatggagagtattaagaggcaagcacggtgtaggaggagggaggtgagagtgggagagaaagacaaagggataggatggtgaaggggggcgggagcaggctggagcacagagtgcccgggacagagctcgaccctgagagctcattccagagacagctggaagggacggagatggagaggtggctggtgttaagaggcaccatttcagaggccaggtgcctggcttccttgaccatgctcctatcctggtctgggcagattggcaagtgtctcctaccccatcccaagggttggcccctctacccttgctctactcccacctctccctgacatcctgattcatccagctactttctcctaactgggcacctcccagacttatagcctctcctctccaagacgttccctccctgccaccttcctgggcaaattccagcccaagctggtaaaaaggaaccacgggccccttcctttccctagggcttgggtcttccaccccagtgacatgaggagggtcacgtggcttctcaaacaccaagtaacaatgggggcgataagtcagctcagagcccaggacccctgcttctaatgaggtcaggggacacaccctggggtgggtgggggctggataccccgcatcagcatagacaaaggtcccaattcccacacccattcctgcttcacccaccctccctaaagctcctgtcccccagagtggcaagccacctttttccagagtcaactgaggggctcctggagccaacgctgggtgtggagcctccagaggtagggtctggggctgaccatctttctacacactcgattctatgcttagcatggtgccatgcacatggcagggacacagagaatgtcttgggtggtggagatagtggcgtagagaaagttcaatggtgtgaatggtgccgcggaaggggcagtggggtgctgagacttgggcccaggtggtgaaggggaggtgcaaagaaaacgtgcatgttgtggggtgaggggaaggacacctgagacaagtacctggtgtccttgtcctctgcaggccctcagcctcagccagaaaccagcatgcagttttccatcccttcggccctgcagcctcagacttccaagcctcagtttccccagctcaaaatgctaggacaggattagggtaggcccctggtcctcgcgcttcccagggtaacctggagcaggggtcccggagcgcactcctggggctcagctcagcttcacttaccagggtctgctcgtactgcagcgcccgtggctccatcccttcctccgccgccgcggccgccatctccgcgcactgccctctcgcctccctcggcggttccggctctgtcctggactcggctcccggcccgcaaagtccgcgccggcagccgtcccgtccccgcagcccgggaggccgagagcagagtgcggcgggcccccggcgggcgccgctggcgcagcctcccgctcgcgtcccctccccggcgggcgggccgagggcggtgccctctgcgctgctccgcccgccggcccatccggaggggacggcccagccaggctggggtccgcgcggggcctcccgagaggcggcaaggggcgctgggaaggcgcaagcccgcgccggctccctgcggatgcccgggtcggagaggggcgcccgggaggggcgggtctactggcacgtggaggggccggcccgggttcgcggttccccgtgcccaggcaggaggggctgcagacgcctgagctccgtaggggttggggctgggggctgcggagctgtctacatcggactcctccgggtcagcccgttaggagccgcctcccctctgcccctccgaagagacgagcggcccagacaggcctgggaaggcccctctgccccgtcaggggtgaaaagcaaagctggaaggattcggagagggttggggccgtcttcctcatccttccttttctcggggctcccgtgggtaggtgcacttggagcaaccgggcctgcggggtgtgcgggggtggaggttggggagggcaccggaaggggtaggccggagggaagggagctccaggtgccgggaagtctactcctgggacgcgggcgtgggtcgcttctccctggctgggcccaaggaggaacccaagtcgctgcttccatccctccgctttgggggaactgcctgctggtgttctgggttctctatcaggggctggggaaggatagaacagagggcggagcgcgcgcagggtggatgggcagcgtagagatagtgtgagaggagcgagggcagcgcccaggaaacgcacaagtgtgcgggagagccagcaccaggagtaaggggcatttgggaggcagaggcggggctcagggggcgggagcagtgcccgggaagggggggccttgtgatagaagccagcactcaggaggaagggccagtgtgagggaagagctggtatccaagggacagggcagtgccaggctgaaggggcacggaggggatccgtgtccaggagaaggcagtggagggggaacgcgcagcactaagctggaggggtaatgcccgggggaggggggtggcgggagcccggctgaaggggcggtgtaggggaagagagcagggcctggggggaagagggagggcagtggtgggagggtgcagtacgagaggaggggacaatgcaggctttcctcttctccatagcgacgtcatggcaaattcccaaactggacggatccggctcgggttacgtccagcag

SEQ ID NO: 10007 - DNA, 6000 bp, Homo sapiens
atttaaacagacatatagacatatggtccttctacaaaactatttgacaagatatcaaaagtcctaaaaatgcttcttttgacccagcaattccatgctagaacatacagacaaagatctatgtacgggaagcctacattgcttcaagtatagtgacaactgcgtgggagggtggggaagttgtgctaaattaacttcccaaataaataaaatgagcaattttaatgaaatcttccctaaatacatggtgcctgtgctggtacaataagtagagtactgtggacacaactaaccttttttttttttttataatttttgattaatgtaattaactatcaaagtacatgttaatagattcaccaatcctaaaagctgttggggtggccctttgcacctccccactttctgctacatagcttgtttctctggctcttttggttctcgtttcctttagttggctgttatttcttgctactctcacctgcacactcactagaaatcttgccttcccccatctaatcagaactttaaaacataaaaataaaaaacccaggtagccaagtttgaacgcatcatgtctgaagtaaatcatgtctgaacgaagtcctggaggtctgtctccaaccacctgaggaacctgttgaaatgcttttccccaggacccaactcaacatgtcctcataagactctggatcacacagacacttaatttgtatgaatgttagaatttgagaacctctggcttatgaattctcatatgacaaaatatcccttgaattcaaggctatgtcaggccaacacgtcacctctggtgcagctgagctgctgcccaaagctggagtggctcaggagtcagccatgatgggctggttcctgtgccatgccaggtgggaaaatcacagagacttggtgatctctgttttgggggcttttttgagacagggtctcgagagctctgtcatccaggctacagtgccatggcacagtcatggctcactgcagccttgacctcatgggcttaagccatcctctcacctcagcctccccagtagctgtgaccacaggtgcacattaccacacccagctaattttttgattttttgtagagacatggtctcgctatgttgcttaggctggcctcaaactcctggtctcaagcaattctcctgcctcggcctcccaaagttctggggttacaggcatgagccatcgtagactggttcgacctctatttggaactgagatcacttgggcaggtggagggttagatgaggagagaggtacttctgggctcctctatcttggggttggctgaggtttccgatcagtggcccttggatgattgaggccaacctggattcatgatgtggggagaaatagggtaactgtctcatattttccaagtgtgagactgtcttcacagactgattaacttccacaacaaaataaaatcatgcagcctatttaccagagatcaattaaattggccacactctttttataacttattcccattggactgaacatttaatagtttatattatactcagctaaatttcaatataatctaccacccccacttttacctagtacttttatcaaaatgatcgcttgtacttgagtttgatatgtttacttaaaagcttttttatgtcatttaacgaatagtcattgaaatgttgtcatccaaataaaaaaacagttttaaagccgtatatatgtctactgcttcttccctttaaagaaaagtttcgcagattttatcttgcattttaaattaagcctccacttttcttggatatgctgatggtcaaactatgaaacctgtaactgaagaacacgtgctaaaaggatcatagagcatgttatccttacataacatacttagaggcatgtaacatacttcgacgcatgtattattacagcctcaaacaccaccaccaccacaacaaaacaaccactccagaatgaaaatactggtatatttgtataatgcaaagagaaatacagatataaatcctcaaaacggaaggtacattaataaaaatgtagcattataagccaaaaatattatatagtacttgcagaatttagtctttcagtttaacattataatgtctaacaaagaaatattatttaaattatagttctcattattaatttaaaacaaccatcagtagaacagcacagcttaacctagcaaacattttaaggaaatgctttgtttcctagaaggaggatatcattatattccattcatttataccataaacaacagaagaacaattttcaaagtggaaattagtttcataagacagaataaaactgggcttctcaaagcacaagccatttccataaaattaattttttattggcaaaaaatacttaaaacaattttgatgtagtactctgcttctcagagccctcccaatcctcgaaccacaatctatacacacgaacacatgcaatactgtatttttctccacatcattactaaccaaaacactttactcttttaaaacttacaacttgacagaaatgtttccattcaagattgctataatacagagagcagttgtcactgacgtggtttttagcagcagaaagtaaaccgggaaccaaatcttacttgttacttactgctttaaaaaaatgactgccttgctactgatctccatctctgctctttaagttcaatatcaacactgagactttcaaagaaccagcgcagcacaaggaccctgcagccggcaattcagagggcatttcggacaacttccccccaccccccactttctcctgcttccaacagaagatcctcaagaaatctaacttgtgaagaagtccccctaggttcctctacttcactgcaaaatgtaatgccacttgaggttgtcaaaaatagcttctgtagaaaactggccatggtctttaggaaacgttgcatgaagaaaattagtacagcctttatagaaaaagaaaaaaaggaaccacacatggaataaaagacgtcagtaccgctacaaaaagactgcagggcctattgtcaggaagaaagtcgagttaggaggacgaatgtgcggagctggagtgggctgagcatcctactcctcacccaccccacccccaaaggagtcagtacaatccaagtgtctgtccacttcgagtcattttgaaggcagcttagaaaattaaacaggggccagaaggaaaagatacaacgtcaccgtccgagccaaagggaaaggctgggttgggggtctatgtggcggggcctccctcataaaccaatgcctttcaggtcgcagggatgggtcgcctgggtggtccgggggctctggcagcaggggaactgggccctgaagcagtccctcagctccctgttgaagaggaagcacacgacggggttgatgccggcctgcgcgaaggtcagccacacggaggccgtcaggtaggcctgggggacggcgccgggccgcaccaggacccgcaggtagctggccacgacgtagggcccccagaggagcaggaagagcagcgtgacggcgtagaacatcttgcacagcctcttctccgtcttgaattcttccagcacgaggaggcggcgcgcgccgcggcccggccctgcgggccggatgcccacaagcgcgggcggcgtgggcccgcggccgaagcccgccgtccagttggcggccgcctggccggtggcgcccgggccgtggaaggtccagtcgtggctgacggcgggcaccaggcgcgcgggccgcatcttgcggcggtcgtggatgaagaagagcaggcggaggtagacgaggtgcgtggcgcccaccaccacggccagcagcagcaggaagcccagcgcgccgggggcgccgtcgggccgctgctccagggcgcacggcgcgtcctcgtcgtcgccaccgccgtccagcactggcgggaaggccgcggccagcgccagcgcccaggcggcgcacaccagcatggcggcgcacggccagccggccaggcgctctgcatagaagcggtggtgcgcgatggccaggtagcgggtgacgcccacgcccagcagcaggaaggcggcgtggaagcagaagagcgcggccaggaaggcgagcagcttgcagcccagcgcgcccggcggcgcccccgccgcggccgccgcacgccgcgccgccagcatgacggccgggaggcaggcgagcgcgcgcagcccgtcggccaggcacaggtcgagcagcaggtagtacggggcgcggtgcaggctgcgctcccgcacgatcagcagcgcgaacagcacgttgcccgctaggctcacgcacagcagcaggctgagcgtggccagcttgaggcccagggcggccgcctcgccgccgccgctgccacccggctcgctcgcgttcgccatcgcggcctcaccaggccgtgcgctccgccccggggccgtcccctgcctcgccgctcccgcaggccgcccggcccgagctccgccgctccgccggccctgggcgagctccccgtcctgcggggctcagcccgctcccggccggcccctcctgggctccccgagccgccgctgtgccgccgccgccatctcaggaatggtgcgcgcaggaggaggcggccactccctgcgccctaggcgccgcgggcttcactgcggacagggcctcgccaccgtccgcagccccccgcatcctcctccgtctcctcctactcctccgctgctgccgccgcgcctcttggctctgccccccgccgggcccgccgccgccgctgccgccgctgccgccgccgccgccgccgccgcggagccccctcccctccgccggagcgcgcagcgcggccgccgccgccagccccgccgaggcatcccgcaccgcctgggcccggctgggctgggggcgcctccgcagcagccgcggggtcgggaggcggccgggagggaggcagggcccaggacgcaaggtggcgacaagtcgcgtttggccccaggtaacgggggtccggcggcggcgcccgcgctggggtcacggtggccgtgcgcgggggaggttgcctgggctggcagggtcgggaggcctcagaggggacaggaatatctggaatgagccttctgcccgaaagctgggagtaatttacgatagtaatagtcatcgtaatcctaaaaccgctgatactcaggtgcgcactgatgtgggtggcagtgtgctggggagcttggcaagcattatctccctcaacagtaatcacgaagttgttgccatccttaatcccactttatacctcaggaagcagaggcttggaggtcaagggagttgagagccgggaagtagcggagctgggattcaaatttcgcttggtctgatttccagtgctggactcacagcgactccgcagcatcccctgctcgctaactcatccgtgatcccggtgaaggacctatatcagggaaaagaaatgcagcatttcatctttaagtgacttggaaggtgaaccctatgccaccttcctcccaggatatctattttctgggtaagcctgaaagggcagcccctgttatgattctcagacacaccgcatttgtctcgcaggaccttgcatgtgctggtacctctgcctggaccagccccacaacaggctccctctccgtagggcctccttctaacccgtctgttttactctgtatccctgccctctagtcatttccttcttagcacttataatttgtcattatatactttcatttctttttaaaaatcatgctcttctaactaggctctaagctctttgaaggcaagggatcatgcctggtttttggtaccactgcatccccagtgcttagcatggtaaagccagaattaagcaacgcattgtttctcacccacactcatttgttttttcttctgtgcagaaaattatttgttgcctactgattacatgcaaggcaggcaccttgatgggcattttcaggatagtgcaagatcatagagggcctta

SEQ ID NO: 10008 - DNA, 6000 bp, Homo sapiens
aggagtttatcctgcagtcacactcacacctatgcaggaggagggtatgcaacaacattcatgtcggcactgccacagaaaaggatccaaactaacctagcatttaagaccagtggaacaaaagcagcatgtcatcatggatttatggttgattccctctttgcctcagtcccgcagaaccagctctggaggcaaggatggagtgtgagtagtttttgtgagaggcaatcccagttagcccatagagaagtagggaggagacagggaagggacggaaccagacaaggaatgtacccttgagctggcaaccacggcttagtctgctgggaccaccgtagcaaacaccacaggctggggggagttaaacaatgttcattttctcccagttccaaggaaggctggacgtccaaggtgaaagtgctagctgccttggttccctgatgggggctctcttctctcttctgggcttgtagatggctgctttctccctgtgtgagagggagaggcggggagggagagagagagaactctccagtggctctgcttatgaggacactaatcccaccatggagaccgcatcctcatgacctcatctcaacctgatcacctcccaaaggccccatcgccaaatagcatcacattgtgggtgagggcttccacataagactggggagaacataattcagtccacagcagccactgagggcatttggtgcccagtccccgtggggaaatctggggcaccatgcagattgtgtctcaatgtccttcatgcagggataaaagctggagcatttatcgcccgacttccaacagatgtaggtgaggactgcttccagggggcactaactcctgcacacccagccttcttgtgcccaggccaagaggcctggtggtcagagggagactgcgggagggttgcagatgctagggagcgcattgaggcacccgacctaaaactggctgtcagttcccagactcccttgccactgggaatacagtgggctaggttcaggccaatggcattgcactggaaatggaatggactgtccagtttgtgtctttaaagccagcttgggtgcccttcttttccctttgacattgggatacttgaaaagtgaatggctcactctcatggaaaagggccaggccctagggactagggagcaacaaaagagaagggtcctgggctccaagtggcccattggagcatctgtcccaccagccctcagcccccttcctctggataacagaaaacaccttaaacgactgtcatcaagcctttgtcccaggcagccgcacctttatcttcatgcaggagccacagcatgatggggaaaggtggcatcctgagatctgggcccactgaccccttggagtgtgctggtgacacacatttggagctgcatgcagcagccctgggccttgccttcaccctgctactgtcttactcgttgctgaagcccacagatgcattcggctgtgcttccaaaacaataatgcattacatctcgctgtttgtgagaaaccagggatttattttaaattttaagcattggaaacatccctctcaggaagctgcctgaatgacaaagccacagaataaaactgaaaagaaaaacaagccctaccccataactgcagaaagttggttaacattttcctgacaatgaaagccagaaaaaagcaaaagagcacttacacttattttaaagaagtctgtaacccaaaccagcaatggcaccccatcctgggaggtgtcctgccagcactatccaactttaagagactgaaaacctgggaagtaaaagacaatttcaaggaagttaaaatgccgcgtgaccttgggtttgtgccatcagcccttgtgggcactggactatggttttaacaatcacttgcctgaaggaggtgccagatggagaatcacctgggcacccccctgtgttgtccagctctgcacatgtgaccctgtctttcttgtatcctctagtgatccagctgggatcccacagggtggtcagcctgtgatctgtgaggacacagacgttctggcaccagccagagaggaaacaggccacagcaggccagagcaggtggagttccccaaggacagcctccagagctgccccagcgccctcagtcctcgagggcctgggctgtggccctgcacatacagcagagggtacagagctgcatgtggtgggcacagcgtctgggtgacactgggtgcctgcagcatgtacacatgggggcatcagtggggaagcagtggagtagctgcccacacaagggactgtgagtgtgataactgccagcatgtccaggtgctgagggcatgacagcaggaggcagggcacatctaattgtgagacacctgggagtgagacatccagatgggtgtcagtttcagcaaacaggtcccatcgggggctgtgtgggagctgagtgagctgggaacaaaggcatgtgtcatcaaaatgggtgtgcaacaattgcacacacagtggcctagaacacagcatgtgtggcctctaagggagcatgtgagggccagggagcccctcacaaagacagtggccccagtgtggccaaggccccatccttccctcctcagcctgtctctaaacagtggggctctggcccagtaccttagtcccttttctgttacttgtaacagagctcctgaaactgggtaatttataaagaaaagaaatttactttttacagttatggaggctgaaaagtcccagcgttagggactgcatctggtgagggccttcttgctgacaggggctctggacagtccggaggtggtacagagcatcacgtggtgagggggctgagtacactacctcaggtctgatttactcttcttataaagccaccggtcccactcccatggtgactcattaatccatcaacccatcaatccagtaaactaccaatggattaattgatccgtgagggaagagctctcatgacccagtcacgtcttaatggttgggtcatctctcaagactgccacattgtggattaaatttcaacatgagttttggaggggacaaatattcaaaccatagcacccagggaacgctggaaatggtgcaaggccctgggctttgtatgtccctccagtgggggaagggcccaggctgggggaggcctcatggggaaaccagtggcagctgcagccccttcccaggtccactggagttggccaccccattcctgctggcagggcctctggacacagccctgggggagctcagagacaagtggcccaagacacacccacactcacacattcacacatacacatacacacaattcctctcacacactcatgcacacatgcacactcttacactcatatactcacttatgcacactctcactcatatactcacacactcatgcacactctcacagtcacacacgcacaaaggtgggaggcagcacaaggcccagggcttggctgagctggtgtgggcttcagtccttggcccaggtcagggtgaaagagtagattttccccaagttgtcagtgccagaatttagcacctcctacacagtgcactctcttcaccttatgccccatgtagcccctcactcctatatgcaccactaggaggtacccaggctctgtgggcactctcatctgatcttcttatgccacttggcaacagggaaacaaaggcttggagacggagtggtttgagatcagacagctgcagtctcccagagaaaatggcccaatgaagcagataaactccaaaaaatcagaaagtaacaaaatacatttatttcaaaaccatgaccgcccagctcaccaaagtcccataaaacctgtgaccgcattgcaccaggggctctgttggcatggagcctgaagacccagcgtcttgccagactgagaccgaaggtggcgcctgggtagggccagccgcgtgggagaggagaggagacccgatggcagtggaaggcagctcccacctggctcccgggacggccccatcgtgaggccagccaagggagggctttcgtccttggccgcagctgtccttgccagggtgggcgaggtggggaggacacaggctcgggccacactgacaccggtgtcagcattatgttctgatgcaccatgaacaggttcaggggcagggctgacccccaaaatggcctttaaaagcctaaaaccctggttatcaagtccttgcccatctacggggcctggagaggtgcctgtcagctggagcaagtggaggaagcaggcctcaggcgacaggccgaggcaggcacacgcgtgcagggccacctgagatgggctgcccccaagcctggccaggtgtgccctgcgcccgctggcccggcggccaggtgagtgcacgcagtggctcttgaagaggggtcctggggccggcagcacctgcattccccgggggtcttgtcggaaaggcacttgccccgcgtggccacaggacctccaggaccgctagagcagccgcaggtaggagggggcggagtagttgaaaagcaggaagtccatcttgtagaggtcgaagaggcgccgctggtagaaggggctgatgtcccggaagaggcgcgctgccaggtcgcgggaggcggcggctccccggggccgcggcggcccagggaagctcaggtcggatgcgcccgccaggcccagcacgaaggccgcgtcctccgccagcgtctcgaacttgcccacgacgtcgtagcggaggcgacacgggtggcagagcgcgtgcgcgcgctcccagtgctcgttgaagggctcctcacgccgcgtgcgcgggtccagcaggtaggccaggaactccgcgaagcgcacgtcgtggccgcgggcccgggcgtcggggagcgcgcgcggccgcaggcgctgaacgatgcgtgcaccgtagcgcctctggaaggcggcgctgtaggggcgcgcgagcttgttgcggtaagccgatgccaggcgctcgaagggctcccgcacgaacaggaaggccaagtaggcgcgcaggcgccggttgatctcggcggggctgaagtcggccagtgagggcaggcggccaggcgcgtgcgcctcttgcgcggagatggcgcgcgggtcgccgcgggcttggccgctcagcgccagcagcacgcgcttccagttggtgcaggccaccttgggcacgtagcagtagagcaggccatgcgcgtcgtccaccagcacgtgccgcaggtcctccggctgtagcaggcgctgccggcgtgagtggcggctacaggcgctgttcagcaggtcgcgccgctgccggtgcaccttcgccagggtcgagcgcgggtcctgtgggcgacaggagacgggacagggggacgcgtcagggcagcgcgggctccctgactctggcgctgccccggcgggatgcgcccgggaattgggagcaggagctgcgccgggcacccaaattcgaaccccagggctgtcactgatcactgtgtggtttagggcccgggcatctgtcctgggccgagatttgggagaaacggattctgactttgctgaggctgggagaaggacgcgctgggtatgtatgccgtggggcactcagaggaggagtgataaggaattgtggcatcagagtgcgctccgtgtgagtacgggcacacatggactcttcaatgtttactaaaagcaggaggctgcataagaagcagcgctgtttaattccacacccaattgaaaactgcagccgcttgtgggctgtcgggctgctttggctcaataataaatgggctgattctgtacttaccaatcagcactctcctttgcaccttcactccttttattcccccagcaaattcttatctcagcgctgggacaggaagcctgccccttctgagcctgtccctcctatgagaaggaacaacgactggctttaacctagcacctgctgcgggccagcagcctcaccgctctccgaattaggtccggagcccctcgca

SEQ ID NO: 10009 - DNA, 6000 bp, Homo sapiens
ggttgtacatagataatggactgaattcttatttataatttgtcctacatttcaaacagctgaacacaataaagtaaaactgaattttaatgtggcaaaatggaaagtgtgaaaaatattttaaaatatatattgttctgattgccacattaccttgaaatgtgtaataaacctggatagttccgtgcaaatggggagattcaaagtaaatattcacttctaaaacatcaagaaatttaataaattcagcaaataaactgtatagtttaacaaatcatccctggctttgactagtgtatatggtacctatttgcaaacatgaagtgaagccaaaccagttttcaactagaatgtcctcttgtcattattatatgtggtctacaaaatctaagatggaataggaaagaacagtggacgaaggaaaaggcaaagggaagaggaaagtgaatcctcattctctctgggacatactgggtgctgaaacctgtgtggcaaaaagtgtgtcatctcactgtactcatgcagcataatcacctgaaaaatgatatgggtataattttatccttaagtggcctctccttaaggtcaaagacaaaggacaagaagagaattctgtctgtggacctggaagaacaacaaaaaattaaaatgacaaatttggtgttttagttattgttctcaaactcattaatccttgctagaagtcttcctcctgaaagttccttctgaaattgaggtcccattttacaaagaaactacataatacgcttcaccctgtttctctagcttccaaaccaatgttctttggggctctagaaaaaacaacaatgacatgcaaataaatttgcatgtggaaatatcctgatttccacagttgtccttgaatgcatctattgaattaagttacagctgaggaataacatctgttgtaagtacaaattagcctctgtaacctaacaggaatctccttgcacttcacaaaggatgagacactgacactcgtcaacaactgtgcaaagtgtatttacaatctcagtaagagattctaaattaaatatagacatatataaatttaacttctatgtgcaaagtaacacacacaaggataccggttcctccagggaattgtgctgagcttctctgtttacagagaagtgattaaaagcataaacaaaaccagcaattgttttagaagtgccagcctaccagtgctgaggtaagtgttcatctacctcatatgcatgatctaagttatatcataaaatcaagatgcacctgtgggacatgatcatcctgcccaagaccttcaactaggcagtggagatcaagcccaagataagccaccactacctgggcaagctctccatcacctacaagccagtgaagtacagctggctgggtatgagggccacccactcctcctgctgagccagtaaaggcacacatgtctccaaacaaaacaaaacaaaaaaaactcccaatcaatgacttatttggcttctaacaaaatgacctaccaggaagtgtggtaagtatttaaacaagtcatctcagtggtttgtgttaatctagagtggccatctcaattacaggttagcatttgtaagaaatgtctaaataacattggctaatctgtttgttagaaaggatctcagggacatgctcatgaatgtttcaaggatttagggtgactgcccatcatttccatagtctggaaccaaatcaaacttcagcgtttaactaggcaagtgtaatcttatttaactcaaaattttcagtgacaactcaataatgtgctcctgcctttcataataaaactgccttgtttattcttggatattatgtttttaattttaagcaaggatggatggcatcagtctagaacttctcccatggctgcattagaaacacatctacattagagggttggctctttgtccttgttgggaacccaaatgctctgcacgctcctgtaagctatctccaatcccaccaaaaacttgaaaccaacaccatcttctgccctcctggatggaccatgaaaccttgattttcagtcaggtaagaaaagcttattcttactactctccccatgtaagaaactgtgtttgaggaccagtcatttggactttgcttcaaaaggcacatttattccagtggcaatttaaataagtagagaaggaaaaaaaaagattaaaaacaaaacaaactaacaaaaaccaggatgggttttgtggaatacattaaagtaaacaaaaatctggggtctatacaaaccactcgagctcctcaccaatagtttaaccagagtccctaaggtagaattcacagttgtatcatgacacacgccttcagaaaacactgtttaagaaagtaattgagaactctcaagcagcttcccctgatgtccagttcaagtgtatgcaatgcagaaggctgtgaaattcaaaactatgtgacaaagaaaattcagtgcgtaccacaggctttgataaattatgaaaaatcaatgtatatattactatttaaataacatctgaaaaacattttgaaataattaacttgtgttcacattccatgcattttctagcaggttaagccctgggtttgcgtctttgtgcctgtttcctacaaagctccattcttttgacaaatccaagcattcctcagactgaaacagaagttcccaaggattctatttaccctctttactgtgtacctgacctcacaggggctactccttattaccaatggcacagatgattggaaaagcaaactctttggggctttatttgggattttactcactgcctttgagaaatccctggatgtcaaagacatcacctgaattttttccaggggcaagaacaagtgactatctccctcccgcttgaccacccctgccaacctccctacttcaaagcctccagtgggttgggatccctttgtagcagtgaactttttccctatggttttgcagcaccttccttgagcaaagaagaaaacacaatgaaatttgaaaacaaaccaacaatagcaacaacagaaactccaaacagatgggcgaaccagtagtctcctccaaggcggaggctcactttttactgcagaattcggagctgtttaggaacttcctgattaccagccccaggcagaccaccagcagcagcatgtagcccacagtacccgagaaagtgggtgcggcaggcggcgcctggaggaactggcgcaggccctcttctacgtagtacacctggtcgtagatgctgaggaaggtgaagatgtggaagagctggtggctgtggccgataatgtcgaaaagacccggctggatgcgctcggggatcttgctcacgttgaagaaggcggccaccaccagccagaagtagcggcggtagaagtgcacgaagagtgtggggttctccccacgcaggtcgaagagccagctctcgagcataatggggcaggccatgctgagcggcatgacgaagacgaaggtgcgcagcgcgaacgggtaggtacaccagtcggtacggctcttgcagcaggccacagtgcaagccaccgccagcacgaaggccacaggcagcaccagggcgcggtaggcggcgataaggcgcgtgcagtccacgtgccagcccaggcgctgctgcaagtatggagtcatgactctggcatccagcaagctgaggcctggcaacaggtagtagtagtaggccaccgtgctgccgaagccgtagtagctgatggacgcgtagtccaggtagaagaaggcggcgcgcagacgcagcgacaggcagctgaacacgtgcgccgtgcagctcatggcgaaggtcagcagcactcccgacgcgtagcaccacaacggtagcagccacgggtggtggaagggcacgtcgccgccgctcaggaagaacagacggcagaacttgctcaggaacagcagcagcgggatgaagtgcgtccagaagttgagcgtctcgttggtaggcttcagcaccgaggctaggcactcctgggccgtgcacggcagacgccggtagcccgacaggatgaagcactccacgaagtcgtcgggcacctcgtcccagcgcagcagcggcttggcagacgctggggggtcccgggaggcggcagagtgggagttccgggcggcccccgaagctgccggggccggggccggagggccttttgtgcccgcgccccggggctgcaggcgccgcggcatggtgcccggggctcggctagggcgcgcgcaggcgacctctggcgccggctcccgggcgctgggcagcccccgccggccgccgtcggagcctttgtgcccacgccgggggcgtcgctgcaggtttaggagaagacccgtgcctccgagcagccgctcctaaaaattaaataaatcaataagagaatcaattaataggcagcgctgcgaccgccaggagcgcggagcgcgcgaggctcagcggcttcctcgccaagcccctgctaccggcgcgcggccgcccgcgctgcggcagcggcggcggcgcggctgactgcggcggcagcgcggcagcggtgactgggcatcgcgcggtgcgggtgcctccgccgccgccgcccccggagcgggaggtggggatgtgcgagccgaggcgcggagggagggacgggcgcaccgaggaagggcgggggcctcccaggctagggtttcgcggccgcttcgggggatagagttgtcccctgtctcgagttccgtaccatccccctcctcgggccgccgcagcccgggccgccccgttaatgattgatgcgggggccgcaggctggtcggcgacgcggcggcgcgcgcgccgagtactagagtcggccctggggttcgaaacccgacagccacgcgggcgttctggaggacactggggagccgcgttcgcggggggcggggagctgcggctgcggggggaggggagggcgccggagccgggcagggcggagagatgcgccagcggtaatctccggaggtcgccggggaggggggcactccggaagtcggggggctttaagcccgcgtccggatcggggccgtgtcattgtcagctacctggggatgcgcctctcgctccctcactgtctttgcgtgtgtgttagtgtgtgtgtgtgtgtgtgtgtgtgtgtgtcggcctgtctacgcactacacgaaggcttagttggtcttctttcgtctagtgggcgcactcaggtgcgtcaccattctgccgtttccctcgcccttgtcctgtccgaaagaaccgtccgcaagctgccctgtggtcgcgctcaccagctcttcgagccgcagctaacccatcttcttgtttttgtgtctttaactaggacttctatttggaactgagtccgacagctcaggactggctgctcaaactccacaatttaatgaaaaatctcagatgatgactcagaaaacctctaatgatctgaggaatatattaagggattccagagtcaaaggctgatcatggagggcattgatgagggaagacttcaggtaggaggtgcattctagcaggaactgaagagaatgaagtccagttggtagaaacggagggggtggcttggataaatcttatatgtaattaatcagaagtacctggcaggtggctggagaccagaagaaaggaacactggaagaatgaaaacggttgtgatgcactgcagtgtgaaaatatgcccttgagccttaaagaaaggggcttaaggccgggcgcggtggctcacgcctgtactcccagcacacagatcacgaggtcaagagatttgagaccatcctggccaacacggtgaaaccccgtctctactaaaaatacaaaaaattatgtgggagtggtggcgcacgcctgtagtcccagctactcgggaggctgaggcaggagaatcgctggaacccaggaggcggaggaggttacagtgagccgagatcgcgccactgtactccagcctggcgacagagcgagactccg

SEQ ID NO: 10010 - DNA, 6000 bp, Homo sapiens
cttaataccttaacaatgcttttcactctgtacactttaacaaatcactgaggctctttcaaaacaacaaaacagctgatcaatttattaaactcttgccaaccaagcacctttttttaaagttcaagctgacttcatattttatgtttgtgtggataatcacaagtttctaattatgtagcattttaatattcttttatatttagggtaagttgttttcttaaagttgtgtttttaaaagatctagttatattttatgctctatttgaacctagacactcagaactttcataaaaagtatgcaggtttattaggaaatctacaagaaaattcccctctactttaaaaaacataaattatatgagcttaatttactttatcctgacaagttttttatttcaagtttggtcactacccatttcctgtgttgcactgtatataccctcttttctatggttactattctcaaactaagactggggatcttctacaacactgtaagaagcagccacgccatggtgaatatcatctgatagttcctgataattattttaaatggatactgaacatatgccttctttggtgcgtttgtgtttcaagaaacttaacatgaccacattttagaggagtcagaatggtagagagaggtaggaacaaatatcagattgaaatctatgaataactttcaactctaacactcagaaattacaactttaaaaggatcactaatttggtgtgcctaaactgcccttcaatgagcagctacatgtctctgtattaaaacctttccctattacttgttcaatgtaacaagttatacaagcagagagaaaaaacagccactgaaaataagggagtaagagaatcaattatactgaatcttgttaaatcccttccctcccccaaaaagaaaagctgaaggtgataaaacgctcagagaattgccaggcatcttcctaacattacctattaatcttcacaacactcatgaagcagatgtcaagtacctctagttttacagatgaaagaaccataagactaagcgattttccccaaggtcatacacaaagttagagatcaaattaaactaaactctaggactctgtattcttcatcatttctaatcaaataaactgttagatcataatatgctacaattacctctccctaaatgctatactctgtacatgggctgttccaataaggtagccactaaccacatgtggctattaagcacttgaaatgcagctagtccaagtggaggtatgccataaccgtaaaatacaaactggattttgaacgtatgaaaggaataatatgaaacgtctcaattattttacacaaattagatgttgcatggtattttggatatactggattaagttaaattcactggtccatacttctttctgaagacttcccatgaaatagatgtcatcataagatccaaatcaaaaagcaattattttctcagaatttgctgtattctacagacattatgtaacacaatgtagtaaccatatctaaagggtgattaagtgtttagagagatacagcatatatgtaagtaggctgataagtgcttagagagatagaccagatatgtaagtaacaaatacacaaagtagaccactgtactgttctctaaatataaaaaagaatgtttctatctcattacaagcatatgtgattttgagtaagtcacagtgtggacaaagtatgactttctattagaatcatatgttatttccttaggtggaagtgaaaatattcctacccctaatgtatgcacaaggatatcaaagtcatcagaggacaaccataaggcactatgaatttctaaacaaaacaaaacaaaaaaacctggctaatgtcaatatatacttattttttaaaagtcacacatcacaatattcttctaatacagcctcaggacttaatctgattttgactaaagtgccaaaagatatgaggtaggaggaaacatcaatttaaaaaataaggataacttcagaaagtctggcaattccaccaaaggttcaaagtaagtttccatatgatctagcaattctattcctaggtatatagccaagagaaataaaacatacatccacacaaaaatgttcttagtagtattatgtaaaatagctaaaaaagtggaaacaatgaaaatgttcattaactgaagaagggataaataaaatgtggtatatccatgagctggaggatcattggatcattcggccataaggatcattcggccatgaaacattgatacattcttgttacaacacggataaaccttgaaaacattacactatgtgaaagaagccagttaaaaaagagcacaaattgtacaattccatttatatgggatgtccaggataggcaaatctaagaagacaaaaactggttgcctggggctggggtagttgggaattggagagtgactgttaatgagtacaggtttctttttggggccgtgaaaatgttctaagatggactgtggtgatggttgcaaaactgcgaatacactaaaagccactttaagtgggtgaattgtatggcatgcgaattacatctcaatgaagctgccagaaaaatgaagccagaaatgtagaggaaaaaagggttatagggatctgtcaagcacctaattgctatttttctggattctgtaattttgtggtacttaccagtttttaagttttatcatttgtgattttttctcattctaagtattcatattagtaaaaaacattttcaccacattctttcataaacaagtaaatttactgaaaaatcattgttatttaagaagctcatttttatggcatgcaaattatctcaataaagatgtgacatctttgcattaaaaaaagggatcacaatggtaatatgttaaccttaaaagaaccacagaattaacatccctggacacttagtcgtccctcaaattatgaaacccactaaaacgcttgaactactttaaagataatattaacagctttgtaaaaagcccaaaaaatatctcagtcaagcagactctcaagttcagaaatgccatgggaagttgaagatttcattatgaaaacgtaccgagaacaacataaaaaatactgcttgaccactttccctaaaagctaaactcgtgattaagatgcagaagggaagtattaaatctatttatctaaactcttaaaagctgaagggaagaagtcttctatcaaaaatctcagtggggtgtgtgggtatgcgtgtgtgcatgtgtgtatttaacccatacaccttatgtagacaatctcgggagcagctgtatctaagacaatgaagctttttttttcctttttaaataatcaaacgtgatggtgccattccctagcccaccccatcccccactaccaccaccagcaggtggagggaaaggatactgtagactagaggatgacagctttgtataaccctttagactttatatgtaagaatgcagctggtggtctcctctcaggagggggtaaagagatttgtggacaagctgaaataaggggtatcctttgcctggaagagggcacaccgtgagccacatcttgaatcagctatatccagagtaaaacacaggccgctggaaggcactgttaggatcaccaggatggcctctcacgccgggggtgtttttttcaacggagaagttgtcctgtagtttggatattggggggaggcaggggtaaagcgggagtcgggaagaccagaaaaaatgcctttaagtggagacgcctcgggcctcgctgaggaagttcagagccccactcggtcgccacacgctcaccctcccattcccaccgccctccttcccgcggcgccagacgtcggtgcccgagcgagagccggaatctccgccactgccggggaaggggccgcggcccggccggggcagcaccggccgcacacgcacgcctcctccgcacgcgccgcgcccggcctccccgccgcgcggcccggcccctcgcacccgcgccgggccggctccgccgggcaggcctaggccgcgccggccgtacccgggcacctcgctccccggcggaggcggagcaggcccgacataaacttcccggcgcgctagcagaggcgtcacagacgggccggcccctagcgccattccccgaggcctggaggcggctcccgcccctaatccccacactcggggtcccggcggagaccggccccaggcccacagcccccacccctccggcgtcgtccccgagtttacctccaagtcgcggcctttgttcttgaaattcttgagccgttggttgtccagtttctcgttgtccgccatggccgggccggtgactccttcccccgcccgggccccgcgggatccgccccaaccaacgcgccgcaccgacactcccaggaaccgggccgccgcctgagctgctgtgcccgccgcgccgccgcttccttcctcctctcacctgcctccgccgcggccttctcctctccccgcccgcccccccgccctaaccccagcgcgactgcagctccggcaaagacaactgtggggccgggcggcggcaaggcgacggaatgtgctgccggctgagagggggaggcagcctcgatctgagggccccggcgctgcggccacgcccatcgcctccagcccggctcgcccattggctaaccaggctccggtgcgttcgaccaatcagaaggggcgatggagagccggggcggaaagagcgaacggaaaggggaagcgaacgacgctgggaggagccggctccgggcccggaggggtgcggcgggggcaggcggggaaggaccacgtgccttcggagagaggggttggaagcaatagagaagtagacttaaggggaaaccagcaaggggaaggagaggcccgggaacgcagcagggcgagttgttttgctccactcgtccaggaagccctagatgccgggggttcagggtcgaggctgcgttaaagtaacgttcttttctccccgggcgcgccctgtcttcctgggcattccttgcgctctccgttcgctttgcagagagatctgagcttcgctgtctcccggtcggacgctcgcagctgcgttcccgggctggggctccgtgccgtccagggccgggtctgggggccaggacctgctgggatgacgtgagttgaggaggctcagcggaaagcgacaggaaaggtgggtggaaaaggaaagggcccattagacgaatctgattcatcttctgtgactaagcacccgcaacagttaggaatttaggcagagctggtgatcctgggacaatagcacttcctaggtaattcgtcttaaaaagttaaagaagctgcttgaccacaaagtatgaacttctggagggcggggcccgtggcagctgacagggaatattgtgtgttgagaaaggaaatgagttccaaggataccaaggacaacgttaccagaggcagaaatgacacgagatacaaaagaacgtattcaaaaatttaacaaaacagaaatggaaaattattttaaaatatattgaaatatcaacgaataacacctcaaatgtacagggatatgtaaagcagcaactcgggtcggaagcaaggaatcgaggcgttgggtgtgtttaaacttgacgaggtagggagaagagaccctgatacaaactccttcagaatcgttgactctcggtcctttctagtatatttttttagtagaacaacgtgcagataagtgtttaaaatgcagatcttcctaaggaaacacttttaaaggcaacagaggggaatttttttttaagttaaaatggaagaagttagtgggtttaacagatatgaacaactgagtttcctttgggggagaggcaatgaaaagagccggagtactttagggatcactttggagaggatattgtagtgggggaaaggaaggtaaaaacttaggaagcagagtagtacctttaaagtcgtcagtactttatataccatca

SEQ ID NO: 10011 - DNA, 6000 bp, Homo sapiens
aaaaatcataaaatatgtgtccttttatttctggcttgtttcacttagcatgttttcaaggttcatccacattgtagcatgtgtcagaattccctttttaaggctgaataatattccattgtatgtatatttcacattttatctgttcattcatcagtagacttgtgttgtttctaccttttggctactgtgataatgcttctactgacacaggtgtacaaatatctgctcacgtccctactttcaattttttaaagtatataccttgaagtggaattgctgggacatatagtaattttatgtttaattttttttagtaactgccatgctgttttccacagcagcttcaccattttacattcccaccggcaatgcacaagggatctaatttctccacttgttattttctgttccccctttaaccagttttctttttctccatagcttttactacctctaatactataatacttacttgtttatttatattggctgcctcccaccaactgagatgtaagcctcttgggaacgggatggtttgttcattgctatatcctgagcacctggaatacatcttagtacatagcaggtgctcaagaaatttgttgaataaagaataaaacatttgaatcgcacacaacttgaacaggtcttagagtctgttaaatagatttaccacaccatgtgccttaaactacatccaatttagaaatctcaaagttgaatgggtgacggtttcagtggtgtatctggcttattctcattagcaatcatctcagaaccacagaaaccaagagaattgtaaggaatcatagaagttatgtcattcacatcaccgacttcaagccttaattgcattcatcaattgagctatgcacaaacttaaaacagcaaaaatggaaaaaaaaaaaactgcatggacttctggttaacagacagcctgcaaatgcaatgtgttttatttttaaaaatcaaaccaatagtaaacaagatagacactggccctgtggagactccttaattagatgtagccaaagacagcttgacctagaaacctaactccaggcctacttttattttggctgtttttttctgttgttcatatttggtgtttgttttatttttgtttgttttctaagagctgctcatgaagaaatcagacagtttccatgatatctttataaatgagttgaaaagccatgtgatattcccccctctggaagtcagttggttgcacaccattggattaaaggtttcttttttatctttctctctgcccactctcctccctccccgcaataccaacaccctgatcttcctcacttaaaaatattttgaagaaaagactcttgatctttctgtggagttcatctatctctttttttctaagcaaccattccacttctcattcctaaagaaaagatgccaattccctccaaaagacaatcacttggtttaaatagataccattgtcaaccccaaatgactttcatgggtctcaaggcaagagccagagtaattcacttagaacatgaagaactttccctgcctgataagaatgatatcttgaaaggattttctgttctgatttgaattattcaaagagcagattgtactttcagtgtacatatgcatacacacacacacacacacacatgaacttgaaagaaaaaatggagaacaaaaacgtctgcacaactggctgcaaagcaaactggaaggtatatgaaaaggtatcaacatttcacattgcagtctaactgcagtttaaactttcgaattattcagatggggaaacgcctgatccttttaacctactcagattctttgatgtaaacaatcaagatgtatttcagctaggaggtgagcctaatgcttaacttacataatgttccttgtggttttgtttctttttactctccccattcaggctttccaaaatgaactcattacagtatctaatacctcctcaaatatctgcactcttttatccctatgtttgtggctacatcctttccttcttacatcaatgttatgtattatttcatcattggtgggaggtatgcaagttatttcatcagtagcagtaagtttaccatttttcctagcttccctctcaccaccagcatccccaaatcaactgaggtccatttgtgggatgcagtacagcctcaccgcctgaggttacaccctgctcctactttgtactagctactgggcaagtgatttcactctctgcacctcagtttcttcacctgcatctgacgcacagggtttctgagatacatggctctggacctggcttacaagtacttaatgtgtccatcttattatttttagcaaccagttagaaaagagtctgtggaccagtttttccttgctgtacagctaattctgaaaaggggaactgggcctaatccttggctctatgagcacccacacagccatgtgagtcaacagaactccaagaagaaactagagttctcacatccaaatgcttctcactccgccagtactcctgaggatcttatcaacaggaaacaaaagcactataccactataatgaagtgtctgacttttattttctcattagaaaagcccaaagattgtagcccagggaacagctaaatatttagaatgttaaaaaagttattaagacccagccacccacccccacctacctctgttaccctgttatttaccatgttcctgaacatttcaggagaaaaaactcctgatagccaaatctgcagcaatagtgatgtacgtgcacccgttgaaacctcccactcttcaaatgcagtctgaccattttggggaaaaaataggaactgttgtgtttacagataaatgctgctctcagctcatattccaccacgggccccaaaacaacagggacctgccagattccttgacactcaggtggcttgagtcaagggctggatgctaccaccttaagcttcaataactcacttccctttttaaagttctaattctttcaacttgcagcaaccactttcatttcttgcaatccaacctactctgattaagcacacgttcaaaattagaaaagagtgactatttcttgaaggagagaggcagttaatactgcttacacattttggcatatgaaatgcactgtatccttcagaatttaaatcatcagcatgcttttcagaccggcaatgggccgccgttttattgctccatttaatggccttttcccctcctctctcataaactttcaggctccttcaattctcagctacttccaagaaacggactgtccactggacctctgctcccaaaagccctcaccaaaggcagaggcaaattttgaagactgagccacggagtttctttttctttcttactccccacctccttggcggtttagatagaacttaaaataggcttaggacaaaaactcattattgactacagcactcaggcttccacactcacctgacctgggtcaggcactctgttgccaaagcaagcccagcgaggggtgcaaatcctgctcctctgtagtcagctcctaaatatttagaaagaaagaagactgagtaccagaccgcggaagatgagctctaacagaaatgctccaaattacaagtttccaccttctttagcctccttcactggggacagcccccccgcccccaaacttggtaggcaggttggtgggatcgcttgggcgaagattccaggtaactacgcttacttatttccaggatgtaactgacaattgagactaggcacgcacaaacttcgaacgtgcgggaggctggaactaagggaagtgtttggcagatcccaaagcacttgtttcccggcgagaaggccaagtatccgaagcccgcatcctcattggacatgagcttcgtccacacttcatccctcaccgcttctccggttttcttccgtttttaaaaaccctccccacggggggcccctacacatgcattattctcccaaccacggagcgcaagagagggatacatttttagaaagattatttccttgagcagactcacatatgacacccccacaacctctcttcaaaaaaaaaaaaaaaaaaagaactatttcctgcagctgcagcaacagtttccaacttgggggaatgccacatcagaccagaatggggagcccccaaagccacgcactagagtagaggatatttgttttttaagcttcaaatgagctccccccaaaacaactgcccgcagtaaaggaacccccaaatgcatgccaagtgcatgcacatccatcaagatctccccgagagcggggcaaaaacttctgcgcccggggagccagtgccaactccccgcgccctctgcccggccccagccgctaccttggtgcccggggagccacgccggtttgggggagcagggcgaggagaggggttagcagccgctgggtaatcccatgtccgcgaagagggagctcgttccgttaggatggaagcggaacacccacacctcctctcggcgtgcgctttctctctctccaccccctgcctcctcctccaccaccacctcctcctcctcctctcctcccaccccagcgagcttgaggaaacgcttcagcagcacatccacatggttactgcactttaaagcggctccgggtggcttatataggccgggaagctccctgggcaatgtagtccaagtagcgggtcgtggcggcgcctgaggctgcggggagggactacaagtcccagaatcccctgggcgcccgggctgggccctaaatagacgcgtgcggggacaggggaggggcgtcctgcgaggctttcaggctgctgagcctgttccttggctggggtcggtagggcttggagccagccgttcaaagtcacccctgggaagcgcccgcaacccttggggacgcctctcctccggctgccccccttccctggaatccaggtgtcactggggccggggaggggctaggagctcggatttctgctttgggaagtttttacaagcccaccctccccctgccttggttccccgagccaagaatttcagaaatccggggcacaaaaacgccagtgtttgcggtcaaggattaaaggcgcgaggtgtctttatttaatctgctccgccctgctcgggtttgcacgagaaaccaagcctgggagcgacggtccacgcaagcggagacacaggcaagtcgcgtgagagcacttttctgagcccgagttgcttgtcttttatcgcccgtgaggaggtaaagaaaggcagacctctccggtgcacaaataaaggagccgtgttgtgacttgccggctctgagattgggaggcagaaaataaatacaaaccgcgacctcagtcctgaccgtacctctagcagcccctctgctcctgggagctgtaaatgcttaagtaaataaaccgcaaaccagaaaaataagggcttaggaaagagccgctcacacagagatgcgcatccaggcggggcgctctccaagagctccgaatggggcaaggtgggtttcacccgctgccaagtaatgcctgggctcccgggctacacgctgcttagggctccggcttttgcaaggaggggaagagctaagcccggaggcagtcagccgactgccctgtcttgcctcaaatgacgtatattcattcctcaaacgtttcctgagtgtttactaggtgccaggcgctggggcatagtggtgagccaaacgcattatagcatcccagacaggcacttcctgacgccgcctaaagatctgttataacaatagtaataataatgataataatcaatggggaggctgattttattgagcccagaccacatgcagttttcatgcgtcatgctattgagttttaccaactgtaggtatatttattatatctatttggcaggtgcacaatccagggctcagagaaatcaggtaacttcccaaatgacccctcgagttaagtggtacagcctggactcccgttccagactctacgtgtat

SEQ ID NO: 10012 - DNA, 6000 bp, Homo sapiens
atcacgaggtcaggagtttgagaccatcctggctaacatggtgaaacaccgtctctactaaaaatccaaaaattagccaggcgtggtggcgggcacctgtagtcccagccactggggaggcggaggcagaagaatggcgtgaacccaggaggcagagcttgcagtgagccgagatcgcaccactgcactccagcctgggtgacagagcgagactcccaaaaacaaaaaaaaacacacaaaaaaaacttccagccatcctcataaagtgaggaggttgttacgcacagggattttctataaaagaatgatcacgaaacaaaacttaaaagtcactgtgaatacaactactgaaagcaataaataacttaacgatgtaagacaacatatagctgttttactaaactagcagttctttggttaccctgagtaattagcttaaggaattgaacaagtgataccaaaaatctttgagcaagacagaaaaaaaaacccaaaaataaacagttaaactattattatttttaaaataccataacaatatcttattttaaaagttttacaatataaaataagttaatacaaatgttttatttaccacactttcgagtagaaacttgatgtatacttaacaaaatttgcttttaaccttggtaaagcaattaaaaggtgattttcaataatttcattaaatgaatcaatttatctttagaaagataaatatcccgaattaatggctacagagactttcaactcccaattccctgtgaacccactggaggcttgttccttctctccaatcccctgtgatggtgagacaaaaatcagaatatttgatttcaagaaaatcatggtagcttagtgcttcgtttcttcagctaaagtaaataacataagttatgtttgggctatttatttcttcacatatgaacttattaactttcatgcacttaaacttgtaattcaatcataaaaaaatgagtgggaaaaactattgaaatgggtcattttatccatatttatgtctccagaaagtggcatatctgtcagaaatcacttgctaaattcaaccaaataccgtaacaggcttattattgctggcagtgctatctgaattgccaaagaggctcacacaaaaggtatccatcaatgtacagcaacttagttatcagtgacatcataaattatcaacaattcattcaacaaatagtgccaggcactcttctaagtgctggataagtaatggtaaacaaaatgtattcctgctctcacagcttacagtgtggtaaggacagacattaatcaaataatcacataatagagtgtgtaattataaagtgagataaagattataaagaaaagaataaaaagaatctgatttagactggcaatgggaattaggacttccctgaagaagtgatgcttgagccaatatctgaggtagggtgggggtggggggtaagcttacactgtaagctacactggtcaaggaagttgaaggtaggccagtgtgtctagagcacaggaagctaggggtaccacagataagaaaataatgaaaagccttggaaaggtttttaaacatggaacaggaagcctctgccattacgtgggttctagtggcgcctgaacaacatactgcctgtaagagagttctgtaaatcataaagcaccctatactttggttagtactatttagttccattattttgttttccaaacttttgtcctggatgccatgtaactagctgcaagcacagagccaaaactagaatctcggtgttcgaatctattgtttttgcccctacaccacactgcataaaaatttcattatttatatcacttaattagtccaatgtctataccagtagttcataatgacaacaataactctatttacacagtatttgctacatgtcaggcacttttctaagctctattatttacattaactcatctaatcttcagttcaggaaggaaggctctattattgtccagatgaggacagtgaggctaggaaaggtagcttacacaaaatcacactgctagtaaaagttggggagttgctaaccacaacactaaaacattttatgtctgtgtatgtatgtgtataaatatctctatctcgagagagagaaagagagaactcacacacagagaattatattcaactccagcctgggcgacagagtgagaccttggtctcaaaaaataaataaataaataaataaatcatattcacatgtttgaggaccagtgtcttacttttttgtattcccagcctagcacatagtgcctggagtattcgtagcactcaggaaatacttgatgaactgaaaatgtatataagaggctgacgaaggatttgaatctggaagtaaagtgagtttctgaggccctcctcccaagtcatgtattcatcagtaattcatatgaaggctgtattttcctcgactttcttattacattgaagatttgttcctcactaccgttgctatatttcacagcctttggcttggaaacaaagtgggataatggacaattactagttccaaccaactctccagccacaagcagccagttctcgatcacatcaaatgctcttcctccagggccgttacacgggatgtcctgtctggaatgccattcctcccttgggttcctctgttcaaacatcacttactcagagaggccaccctgaccattccatctaaattaacgcctcaggtcttcttcagcaggtcatttggcttcttttctttcacagaacttatgactctctggaattatttgtctattcaccccccagcccccaactctagtgagggcaggggtcttgtacagctggttctccagatgtgtccccagtgcctaaaaaactaagtcaacatgtattcagcgaacgaatgagaagagaatcactcccgaattgtgctctctcaaaccccaaatacccttaacgcttgcctctcctggtggctgtaatcccatttttaacaataacaccattttcaagtgactctgaagctcgcaaagtagcgttgcctccattttctgagtagagccccacaaacaatgctcagaagggaggtccggcctggcaagaatgcgcatgccccccatttacagtcgataaaattgagcctcattaggggattcgccaaggccgctgcgaaataacgagcaggagccctgaaaagtgtcctggttccgaaaacctcttcccacgagagcgcatcgtggactcgaaatgcttcatcacctttattactattgttcctcagtactcattcgagacgcgttccaggcggagggaagcagcccacctgctgacccaagaccaggcgccggcctctccacccggccgcgcccctcgcgccccgcccccggccccgcccccgccgacccggccccactcttcgccccggcctctactcccgccccgccagggctcccgcgccccataaggaccaccctcttccgcctcagccaatcagcaaagcttaggggggcggtgccacaggccccggccctcctatctgggcgccaattagccagcccatccgtcgctcacgaggtcgcgcctcgcacccgccttcctccttttcttttaccctccccttcagaaaaaacggcggttgggctgcgacggccgccaaaggcggactagaagcggaggggtgaaaatcccggcagagaaggaagaagggactgcaggcgggaggaggaggaggataaggaggaagggagcccgcccagccggagccatctccgtcgagaacaaaatggcggcgctggcggagggccaactataaggcggggccgcggccattccccctccacccccacccttgcgccggccgggccggtcagggggaacccgctcgcttcgcccggccgcgggcggggaggggaggggagcggcccggcccactatgcaaagcgccgggcgccgccgccgccaccccgtggcaaaggtaaaagggtcgggttcagccgccgccgcggcgcctccatgtccgcgcgccaggcccgccccctccgccgccggcccgagcccgcccgaccctctttcaattttacctcaggatttggcgccaaagcggcctcgaagcgggtcccgtgtctgcggcgggcggcccccggcgcggagggcagggcgcggggagcccgggctcccggtgtcggcggatggcgggagcccgggggccgcgggctcgcggggcagcgggcgagagacgagacgccgaggtgggagcggggtggcggggacgggcccgggggcgccgccggggtcgcggagaagggggggtttgttattgtttttgtcagtgaaaggtcagagttcgtgaccccggtgccgccgccgccgccgcccgcgcgctggtaggaggagggcgaatgttcttcttcctcttcccagcgccagcctcgccgccgcggcggggggcgggcgagaacgcgattggctgaggcgcgcgcgcgcaccggaacgccgcagccggcgctcggtccatccggcccgtgggctgtggggccccgggcggcggcggctacgtagctgccgccggccttggccgcggccgggcgggcggatatgtggcttaaatggcgcaggcgtcggggcctagaggctgaagggctggtcgtcctaaaaactcgtggacgtcgcgcacggttacccggacgcaggcccgcccctctggggaaccgcgagctcctcgcagctgggtggggaccgtcctcgcagtggcggcctccaccctgccttctcgcttagccaaggcttctggaaggctcgcaaagtgtctgttgttggaagaagccgggccctgactggcgcgacggattctcccagccgctcagcagagcgtctgtaggtcggaagtgggggttgtattgggtgggtattgagctcttcggcccttcctcggtactgatagtttttaatttaggttttaaaggtctaaagatgcgcccgttctggccatctcaggtgaaatgttgaaacgccccagaacctataatttttggtttcttagtaaacatacgatccagatcttgtgtaattccatgcccctcctcctcgaaatttggaagtagtacatggtaatagggatgtgtaaagcagcttttagcagcattgcttaaatttatttgaagaaattggcctgtcttgctcttaaactcttgggctgtaggttttccttacatatttctctgttttatgtcgtggttttgacttgcctgggaaggtgcaggcgcttatttatcctaaatgccctgaagtgtttaggctacaggctgtagatcttatactgattttttttcttcagttttcttgcttattaagaataaatattgactccagaatggatgggttaactttttttcccacacagtatccatttgggtttttatcaggatgactccaacatttagtatttttttttccataatcttataatatttctatttggtaaaaaatgttttaaacacagctatttccccttcctcctttttctgacgttgcaaaattgggaaaagagctaggttcgttttgtcatggtaaagcacagctcttgaaattggaagaggccttaagggaatgtggtcaaatttttttcttgcagaaagattttccgattttaggggtgaagtgggtgagaactagaaaggtcaagtgatgtacctgagaggcaaaagcaattgcgtttttgcatttttgaaatttgctgtttgatattggaatacattcttaaataaatgtggatcattttaatgcacatttctcactttatttttttgctaatgacttattgctgtttattttagaatatgctttttgtctaatgatgttagataaaaagcaaatttggagcagttttcttattcgagttcaaaatggttcataaagcagcgaagacaactcaaaacatcagtaacacatttggcccaggaactgctaacaaacatacagtgcagtggtggcttaagaagttt

SEQ ID NO: 10013 - DNA, 6000 bp, Homo sapiens
aactcctgggctcaagcaatccactcacctcagcctcccaaagtgccaggattacaggaatgagccactgtgcccagccctgttttcagtttctataactaaaaatatatctatctttgaaaattacacacacacacaaatactctaatgaaatgttccctttacagccacttaacaatttttttttttttttaagacacagtcttgctctgtcacccaggctgaagtgcagtggcccaatctcagatcactgcaagctccgcctcccaggttcactccattctcctacctcatcctctcgagtagctgggactacagttgcccgccaccatgcccggctaatttttttgtatttttttagtagagacagggtttcaccgtgttagccaggatggtctcaatctcctgacctcgtgatctgcccgcctcggcctcccaaagtgctgggattacaggcgtgagccaccgcgcccggcacacttaacagatttttatttagagtttactgtgtgccaggttctctgccaggagctggggatatagtggtgaataaaacaatacttcctgcccttttacagtgctcacagcctggtttctgataactcttattttcactttgaagggtttgctagaactcaacttgcaaaaccatcaagtcccaatgcccagttgggaacaaatctttggcaaacttggtatccttgagctattcacctttccgtgcatgttttggaaatccacatcgttctggagagtcatcagttttacttaatttttctaatgtattggtataaagtaggtattttattagaattaaaggaatctcacccatatcttttttttttttttttttttttgagacagggtcttgctctgtcacccagcctggagtgcagtgaggtgatcatagctcactgcagccttgacctcctgggcttaagtgatcctcccacctcagcccctcaagtagctaggaccacaggcatgcaccaccacacctggctaatttttaaaattttttgtggagaggaagtctgtgttgcccaggctggtctcaaactgcattcaagcagtcctcctgcatcggcctctgaaagtgctgggattataggcatgaaccaccacacctgacttcccccatactttcttattaattaccatactgtatatttttattttgtttaaacatcttttcttcccacttttatcgtttttacttgagtgcttaattcatcttcctaaattaatttaaaaactcatctttaagactgtgaattttcttccgaatatacctttggccacagttcagagactttgatgtgttactcttttggcattggttctaaaatgtcaatcattcttttttttttttttttgagatggagtcttcttgttgcccaggctggagtacagtggtgcgatcttggctcactgcagcctacgcctcctgggttcaagttcccctccctcagcctcccgagtagctgggattacaggcacacaccaccatgcctggctgattttcgttatttttagtagagatggagtttcaccatgttggccaggctggtcttgaactcctgacctcaggtgatctgcctgccttggcctccctaaatgctgggattacaggcttgaggcaccatgcctggcctaaagtgtcagtaattctgatttcggttttctcttttagaagttttgatttccacagacttacaaagctaaggaagttttatgtccttgctctggctacactgcagtgttactgaatatcacctgcacaacctttactgcttgcagttttttttttcctgttgctttgtacatgatccgttattcaaatggccttataggcattcaataaaggtgaaatgttaaatacaaaatcacttgtctattaaattttattcaaggttctatataagatctgataaatggaactttgtgatggaaatgttttatatggtagccactagtcacatatagctattgaacctttgaatcatggctagttttagagttttatattttaattttaattaaatagacgtgtctagtggcaccatattgtacaatgcagttctcattcaataaatcttaagtacttaacaatgcatcgtgtactcttctatgtactgggtagacagcagtgagcaaaacaaagtccccgttctcatggaactaatgttctaatgacaactattaattacataccatgaaatgtctcaaactcctgggctcaagtcatcctcctgccttagcctcctcaagtgctgggattataggtgagagccactgcacctggccagaagcacgaacttctaacttaggcttttattaattatcttccttgcagaataatcaacagaagaccctttagacaaagaacttgcactatgaggtttaattggaaacattaaaatggttaactcataatgaattataaaactttgatagttacattgtactatcatttatgaggcatttatttttcattatttacacctgaaagaaacttcatacttgtgtgttctgttccccatctcagagcaagattatgaagagaaggtctaaactacttatataaatcaaaacccaactgggctagaaatgaagtataaagagaactaaatctatacacagctgtgccataagagcattaggtggttttagctcttatctggggtatgaaagcaatttagctcatctcacagaaacaaaagcaggtgctgaatcatgaaaacctcaattatttttagcatgcctcttaatttttctttcccctggtttcttgtcgtctgtgcttgattcttgaacaggtaaccacttgagaggatgccggcgatagatgggccatggaggaagtgtcagctgggccagaaaagaggaaatgcataaattatagctattaaaagtttaaaaaatcattacgtataatgccaggttcccaaatgactcctatgctgagggaacaaaaaaacaaaaaaaaaaatccatattcctataaaggctctgtgccaccatccatgcaaaatactgtatgatgatgggaacaggctcactgcctatacaaatggctttaagacctaaaagaaaggtgggggccaggcgtggtggctctcgcctgtaatccaagcactctgggaggccaaggtgggcggattgcttgagaccagcctggccaacacagtgaagccctgtctttactaaaaatacaaaaattagctgggtgtggtggtgggctcctgtagtcacagctactcgggaggctgaggcaggaaaatctattaaacccgggaggcagaaggtgcagtgagccgaaatcgccccagtgcactgcagcctgggcaacaagagtgaaactccgtctcaaaaaatttaaataaataaataaataaaaggtgaagggacaacgtgagcaccatgaaaactcctgctggctttgaccttaagattattagccagagtagccgccaaaggaaataagctgtgtccttttatatagttcgcaccatctgacactattttggcattctacttttccaatgatagcaaagggaaacgctgtttggaaggatgagggaaacgttggctttgggtctcactactgagtaggtctaaccaaaccaacccgactcacaaaacccaagctgccactaatacccacaaatttcttaccaaacatgaaaaagcaaatccggccataactatatagacagtccacccgaactgttcagccacgtacccgtagataaatccaactatctagagacaaatgaagtatattaaacacactcaaactgagggttgggagggaggcgggggcggagattaaatgtaaaaccaatacttactgcagaaaaaagaataattccctgaaacatctgttcagctagcttctggcccttgtaatcctggggtgaagcagaggaaaaaaagaattggttccaccgccgagaacatacaattcctgccctgacctcacaactctggcacagggtaaccccaacatcagggtctcccgctctcctaagggcctgggcaagatattaaattctgggcttcccgggaggaactgaaacaccctcacggagaatggacaggagattctcgcggagtagaagagaaggggacccaggaggcaattcgggaaagagggtggacggtaaccatccgggcccggaacagcgcagcaccgggtcggtgctccaacatgggcttcgaagctgccaggcacaagaacggcgtgcagaggtccccgggttgcgccctcaccatctgcgtgggcagcgagctcagatgctccagcatggctggctgaggaggcgggcagctgagcgcgggtggcaggctgcgaggcgagggcgaccgagacttaaggaccgtgaggggtaaggtctggcactgcgcgtcagtagccgggccttctaagcccgggagagcgatggcggcggccccggaagcggaagtctccgacgggccggtacagcccgtgtccccgccccgcgccatcgctaggcgacgtgcgcttttgccgcgccgtgctgcccgcgagggcagctgaggtggtggtggcggccgccttgtcgaggcatcgcgcgcccgtgaagtgttcgccgtcagtgctgttgggtgcctggagccgcgtcccccgtcccgaaaactgtccttgacagtacttgcgcggcccaacggccgccggcgcccccgcgtctccatggcgacggcctttttccctgcgaggaccccggcggcagggctgccccgcggcgcctgcttggcgcgacgctctagcggttaccgctgcgggctggctgggcgtagtggggctgcgcggctgccacggagctagagggcaagtgtgctcggcccagcgtgcagggaacgcgggcggccagacaacgggctgggctccggggcctgcggcgcgggcgctgagctggcagggcgggtcggggcgcgggctgcatccgcatctcctccatcgcctgcagtaagggcggccgcggcgagcctttgaggggaacgacttgtcggagccctaaccaggggtatctctgagcctggtgggatccccggagcgtcacatcactttccgatcacttcaaagtgtaaggggggccctactgacccttggaatttaggggggctaccctaggcggcatccacaacagagagaattcccttggagaggggaccctggtgctcggctgtccctctcatccgcgtagaaagtccctcatctgggggctcccgaactcagccctctcacattgtggccggctttactgaccctcacagacccaggctgggccctcccgatagaggccagccaaaggttcactcagcctctctttcaaggctggtgtatctctaaatcttagaccctcctccgttaccgtcagccaggtgggatgcccacgttttggagagaaaccgttctgaggaacccgggcctctgggtcccagctggctctccggcccccaggttatgtattctgggttggccacaaacagtggaattctaggcactcccgggacagggtgggactgctgtcctcattcatgcaaccagcaaatattcacggcaccttgtttgtgccagacagcagaccgaggacacggttgttaccaagaccaggctgttgccttggaagagcccagagcgtgtcaagggagacagccacatcacgccagaaatacatgacagctggattagccctgggagagggaggcccagatgtgggagctcaggggaggtgcagctcaacgtggagtttggaggaggctaccttgacctttgaatgccaagtgggagccagccagatgaaagggtaggagaaagtgtttgtatatcctcagtgccctttcatccttgcacgtggcagagaccaaacagtaaaatgcagacacgtttgacacttttctgacctcagaaggactcaggacgtgtagaaggcagaaagagggatgggcaagagtttattcctgtttccttct

SEQ ID NO: 10014 - DNA, 6000 bp, Homo sapiens
gcactatggataatatgatcttctaaaaagccttgcaatttaaaatttttttttaattcttcaagtttaaaaaaattactgaagcaaaatggcacatcatggtagattttataatagttcaaaatggaatatgatctaatactttaagcacctcagtcttagacactatcaactgtgactaaatgcttttcttcagtgataccccaatattcccattaattaaaacaactatgaatatcctttgcacttcctttacaagtttttgctatcccagaaaaaaggtaattgtgcacactaattgtaaaggaaaatctccaacccaatagacagaagtccagtaattctatcagatcattttacattaaggtaaacataagccaaaagacaaaaatacagattttccattctattttctgatatcaaaccctaaacagacaatatttgtctatttattcattcctttaaaaactgtagctattgctcaggtggagaaaggacagttagggcatcaggattctgccaggtttccatcagtgaaagcaaatgcttctggttgcgaaatccaccgaggatgccaatttagaggtgctattcaaatgtacagcagtttatccaaccacagataagaaattacaattactgatcaattaattacatttagatagtctaataataactctaaggaccagactattaaaagaagacaaaagtagtctttcaatatttactggtcaccaacagttaagatataaatttccagtttaaaaaaatcacaaagaccttcctattgttgctttaccaaagaacaatctagtaattcaaagattacaggtgtaggcctacatattccacaagatggacaatggtaagtgcaaatgttttgccttattttatttggggccaaaaataaatcattttaaagcagtttaagttacacaaagagtccaatcttaaattctaatttttaacagcagtcaggtgaataaaaagttatttgtggtcaggggcagtggctcatgcctgtaatcccagcactttgggaggccaaggcgggtgaatcacgaggtcaggagtttgagaccagcctggcgaacatggtgaaaccctgtctctactaaaaatacaaaaattagccaggcgtggtggtgcgtgcctgtaatcccagctacttgggaggctgaggcaggacaatctcttgagcccaggaggcagaggttgcagtgagccgagacctcgccattgcactccagcctgggtgacagagtgagactccgtatcaaaaaaaaaaagttatttgtaaaactaaaaaactctgaaatatcatgaaattaaaaaatcatcagtgttgatccagacaacgtggaaaagaggaattaggacatctaaaatgtgaaaaggagatggctaggttttatcaaataccaatggtacagatcccctgggatgaggtggggtggctgaaaccacaatgaaatgttaaaatctagtttcagccggtgaggtggctcgtgcctgtaattcctagcactttgggaggccgaggtgggtggatcacctgaggtcaggggtttgagaccagcctggccaaccaggcaaaaccttgtctctactaaaaatacaaaaattagccaggcatggtggcgcatgcctgtaatcccagctactcaggaggctgaggcaggagaactgcttgaactcaggaggcagaggttgcagtgagccaagatcgtgccactgcactccagcctgggtgacagggttagacgctgtctcaaaaaaaaaaaaaaaaaaaaatttagtttcatgtatagaaactatctttatttttaatgtttacagaactgagaactttttggatcttttattttacctactattcttccatgattaaaactaaattaacaaacgaaatagaaaatgactggagaatttcagacatccaaaattgatgtaagacaagtgataattaattcaaataatcctcttgataactacttttaatagcagcagtgagctattataaatgatcataatgagaatcatcaatttttagtactgaaagaaacagaagagatctaatattttaatcctcttattctacagggatgacgctaaggtcaaggagacaaaatgactttcccaaagtgacaatgctggagagcccactataaagcttacaaatcctagttctaacacagtccataagttcttctactatccagtcataaaccttttagaaaataggtaatgcttcactctcccataggaaagatcatatggctttctcatggcctagcacaatgcctcacacactgcagatactagtttgttcattcctacaccaaaacttcctttaaagctaatttgacatcctagtaaaaatatcttcgcccgggcgcggtggctcacgcctgtaatcccagcactttgggaggccaagatgggcagatcacctgaggtcaggagttcaagaccagcctggccaacacagtgaaaccccgtctctactaaaaatacaaaaattagcggggcatggtggcgcgcgcctgtagtcccagctattccggaggctgaggcagaactgcttgaacccaggaggcggaggtggtggtgagctgagatcgcaccactgcactccagcctgggcaacaaagtgagactccatctcaaaaaaaaaaaaaaaattcaacctgaatagtataatatggaaatgacttgcatacatatttaagtgtatacacttggatacaattagaagttacttgaccaactgtatatacttatgtataaaactgggagatatttgaccaaacgtttctctgacctcgacttactctggtactaccattgaacaactccagacccagagaaaatccaccacacccaatcccagtattgtcaaatgcagccagactaattctctgcacagctgtcagataccaaaaggatttaacagtcagttcaccaaaaccatacaaagcagttcactaaataatccaatgcttggcctcacatcagagaaactgtatcatgcatattaggcttggtcatgtacatttccaggtgaaatggaaaaactgaatttaagatgcttccaatcaaaaagtttaagaagtcactcccattttttttttttttttttttgtatgtgtgtgtaggcctggacctggggcagggggctgtgtgcaaccaagcctggtgagcattgctgtggccgctactcttgtgcagcaagaggggacagtgcagtgcagagcgttttctgacaaaggccaaggggtccggagtgcaaaaggacaccttggggctggggcatggcaggagaggttacgggcgctgagtgcttgcagccaagggggcttcggggttgctgagagaggacgagccttgggagcttgacagttctgcttacagttcagaggctgtaaaacaaatgccactgaacaccatttcactctttagaacctgtgtagtctttctttttctatgtagaaagccatctaatcgtttttgtttttgttttgcttttgtcaactaaccgtcactgtagttgcccacttacccccagcaaaaacacactccaaaagggggagtggctcattattaaaaggctcttagcgattaggttgtaggctttggaaatcacagaaacagttcgtatcacgatgtaccaattgttaatcgaatttagcttccttcacttattaaatacaatcatcacatttgcaaatgccccactcccatctacaacactagggataaatgctgtgtcactgagaagaaaagcaaaggatttttctgaaaccaaaagcaaactgtcaaagaatgccagtaacctgtcatcgagctactctatgccctccactggcagccagaaatgagtctccctaaacccaagtgttgtgctgccgcttggcagcttccgtctgatgggaagccccctcactgacacaacccgccaaggaaaagctgcacgagccagtttcctcctctacggcctggggctgcttctcaccatgtccaagtgagcaccgggaccttcagggtgtccgctgcccggggccggactggccctgccctccggggtcttccgttcgctgttgcgcttcaggccgctggcgtcgccccggcctctggcctcccggcgccgttgctgccgactccacaggtatatggcacccgcgcccagcagcaggggtgccccgaccgccagagccagctgccatcgcggcagcccccccgtgcccgggcccgcagtcccgccgccgcccaccccactcccggagctcggtacagcggctgcgaccaccgctgcctccacaggtttagaggcggccatgacaagtgtcctctgccaccgcctccctgtctgtcgcgagcgccacaatcaccaaacagcgtgcgaaggaagaccgagggagggaaggaaagcaatgagcgagcgagcacgctaggcagagagagcggacgacagaaaagggccagaggtcaccggaagcccagggcatgccgggccagacctggccgtccttctcctccagtatcaaccgaagagggagaggaggggcggaaatcacttccgggttaagggaaagcgtgggtgtgagtaggagtcttcggaaaccctttttctttcttttcgccccgctgctgttcgggagatggacttctggagtccccgtcgtagctggtgttgtcccctctaccttcaggaaagaagggcagatggccctcttgcctactgaagccgaggaggggcgcgtatacagcgggctaagggcgctcaagagatccgagtggaagaaaaagcagcggcacagcactggaatgggcgggagtggcagaagagttgtgaaggctattggctagcaagggtggtgggcggggcgtagaccgagctacccagtttactggtcgatttcggatccagttttccagttatagccacgttggcacctcttgaacctctgtggccgttagcacggttttctgcccgcgtgcccgagaaaccaacggattagaaggacttttaaagatgtgtgaggaaagagctcaccgctgaagaaggctgctgcatcactgaacttcttatcactaacatagcgagattttagtttggacgaatttgaggttataggggagatagcgatggcagaagactaggtggaaatggcacatctaggttggctgcagtcgaaacggtttgagcgtggtcgctgtggctcatcgtcggcaccaattaacgaagcgatgacatctgcgttgttaggggtttcttaaactgagttggtagaaatgcgaagcgtcagggttcccgccggcttcgagcctttcttggcgtatttgtatcttgagctgatttctgcgtcagcccacatctcgctctgatccgcacgccccccgggttgttttgcagtagcagtctcagccctcttctcgtctcattcccaaatcgtaatttcagttcacagctttttatctataatagctttatcaactctttttccgatgctctgcaccagatctcttaaaatataaaattaccttgcaaggtattgtttggaatacacggtattttcatgaagacaactattaatagaaaaatcagagtccagaactatggttctccatttctggtatactggtttgcagaagccttacattaagatttcataaatgattgttttgctgttaagtgcaacaacatcacagtagagctacataaagattgaaaggagatattttatcaagtggcaccagaatggactgattaaaatagaatggcctaattggaaagaatttcaggatcaccggtttctcctgcttcatgtaagttcctattagtaaattgccttcaggcaatagggtttcttagcaacagactaaaaaaatgggctaaaaatagcagtggaattgagttgatcgttgcaggcaataggcttttctcccctcctgatcccccaatccccaaaggcaaattttctgccccttaatataagc

SEQ ID NO: 10015 - DNA, 6000 bp, Homo sapiens
cgcttataatcccagctactagggaggctgaggcagcagaatagcttgagccctggagggggaagttgcagtgagctgagatcataccactgcactctaccctgggcgacagagcgagactccatctcagaataataataataataataataataataataataataataataataacaattcactgcctagaaatactctgtgaatgcatactgtctgttatcagtttgttgcttttttcttttttgagatggagtctttctctgtcgcccaggctggagtgcagtggcgcgatctcagctcactgcaacctccgcctcccaggttgaagcgattcccctgcctcagcctcctgagtagctgagactacaggtgcatgccatcacaccgggctaatttttgtatttttagaagagacaaggtttcaccatgttggccaggatggtcttgatctcctgaccttgtgatcctcctgccttggcctcccaaagtgttgggattacaggcgtgagccaacgcgcccagccagtttgttgctttttatgtgtctgcttttcattttgtcctgagactgctgtttatatcaccacagaggattaaggagatgatgttacttaagatgagaaagcctcagtgaaatcaaggtttaagaggccatggaaactaaattgctaattagctaaattggaactttctcttaatgtaagagtgattggtaaaacatcattccagagaataatgttatgagttcaagagttattatatttatactcccttagccacaactgttccctaatggatcaaaattatgccactggattttaatttacactgacttattctttttttttttttgagatggagccttgctctgccgcctagactggaatgcaatggtgcgatctcggttcactgcaacctctgcttcctgggttcaagcgattctccccacccagcctcctgagtagctgggattacaagtgaatgccaccacttccacctaatttttgtatttttaatagagaaggggttttgccatgttggccaggttggtctcaaactcctgatctcaggtgatctgtccacctcagcctcccaaagtgctgggattacaggcgtgagccactgcaccagccttgacttctttattttaattttatttttaattaattaatttattttggctgggcgcagtggcttacgcctgtaatcccaacactttgggaggccgaggtgggcggatcacaagatcaggagatcgagaccatcctggccaacacagtgaaaccttgtctgtactaaaaatacaaaaattagctgggtgtggtggcacatgcctgtaatcccactactcaggaggctgaggcaggagaatggcttgaactagagaagtggaaatcgcagtgagctgaggtcctgccactgcactccagtctagtgtcagagggagactccatataaaaaatacatatatataattttaagacagggttgcactctgttgaccaggctggggtgcaatgattggatcatagctcactgaagccacaatctcccgggctgaagcaatcctcctgcctcagcctcctgagtagctagggttacaggccttcgcaaaacacccagctattttttttttttttttaatttttagtagagatgaggtcttgctgtattgcccaagctggctctacctcctcagctcaagcagtcctcccacctcagactcccaaagtgctgggataacaggtgtgagccactgtgcccagtcgtgacttattttttattttatttatttatttatttttgagacagagtctcaaaaatggggtttcgccatgctggccaggctggtctcaaactcctgacctcaagtgatcctcccacctcagcctcccaaagtgctgggattacaggtgtgagccactgtgcccggccagcagtgaattattcataaagcaggagtggaaccccagaacactgagacaaatctacctgggtgcaaagcaattatctctcaaccaaacaactgaggaaaaagtactatcaccatcatttcaccagtaatagtggctcactcattagcagtttgaggaggtgtacataaggttagatgtctgtgagaataagattgcaggaaaatagtgtagttgtgacacctcctaccaccaccacatacctggacatttactctactgtgaatttccaaggtagcacagaagctgagaagttcagttgcttaaatttcaaaacagaatcccctaaattcatcatcactgacagaatgaagaatttcactatattcctgacattgttattcctgatattggtcattttacttgttttctagttgttacaaaagttaaaaacaaacaaacaaacaaaaaagcttaggccaggtggggtggttcacacttataattcccagtactttgggaggccaaggagggggagaatcacctgaggccaggagttcaagaccagcctggccaacatagtgagacagcccccccgacccccaactatctcaattaaaaaaaagaagaaaaaagaaaaaagagaaaaacttacatgtgttttactcatgcagagaaacagggaaattttttagaacttaccctccattacttacaggacaaactttaaactcttttcccatagtaattaaagaaaatcttactaatttagtcacagcctttctcagcacgatttcccaaacccagttccacaatttaggcaatgtcctgtacttttttgtactttcctgcctcagtgcacttttactttgtgttgtgcattctggtgtgccatttcctggcctcgtggaatcttattcaagaacaaagtcaaatgttatctgcaatgtgaagcctgactcccaaaggcagttactaactggcaactctgaactctcctaaaatgttcatcttccttatttcttgagtgcagaactctgccttattcattagaggccttagaatcccgtcccttagctggttcaataatgtttgaacgaataaaccctgttccattcactagaaggctggattctgggtacaacggtaggggtagaaatggattagaaagtatagagctagaaacctaaaaccaacaagacaaaaggaaaaatgtgaaccatatgagccacactttttaaaagtgtgcatttgtgtattaagcaagtggcatgaatccctggactcggttgtgttatttgatgggttgcctctccctgttaaccgcatagtgatcatttgattgctctaatatcattcattttggctttaatatttcaaagaagctcatttggacgaaacagaaaacttaccttgagttatctcccatacaatgatttccagtaaattaatgagcttccctccaacgtcacacactctttcaaaaggataaataaacctaacaccataatagcttaaatacactacctgaaagagtaacgattcctctgggttgaggctgaaaccgcaaatatttgttacaaaagtcggcagattcaagggccaaaaacaaaacattgcccaaaaagtaacccgctgtttggcccaccgaattgcaagtagaagcataacccacattttccctggataacatagttaacgcccaaccatcgacggcaatgtcctgagtggcggccaagaattcaaacaaaaagaacgccacagtgagagcaatcacgtcgggtgttctgtcatcggtattcccaagcaaacggtccacctgagtggataaatagatcatgaagagtcctagtatatactgtgtcgggacaagccaagatttgcgacgaccgaagttcttaacgtagaccgcatcaaccaacggggcccagagtaatttgagactgaagggccaaaagacaaaactgaagaaagcttggtctgtatagctaacatttttgctttgcaaaatgagtgggatgcttcccgccaagcccaggggaataccctgaagcacgtaaagaaagagtagtagcaaaatgctgcttagttcggcccggaagctctgtggggcttttaagaagtcgccagtgccggtatcccccagaagagcttctctgtccccttcccggcccgctgagtccaaatgactgtcatcccaaccgcctggcggcaggggaccgctcttcatatccagagagtgactgaaattccctggccgccgttgccggctgctgtccttgtgggagatggtgggtgacatatcagagacgatgcagagccccgtctgtggggggccgaggctgagcgttttggatccgtccagtcccaggtccaaggctgtcgcgctggaccagggtttcggtggttcacgggatggtggcagggctcagagcgataagggcacttcttactgcagcccggagtgctgaagccgggagccagtcctctggctagaggcccagaggatgcctggataggtgccccctggaacggcgtcaaagagcctgaaggagacccccgggcagcagcgccgggctcgaggctggaggtgtgtgccgtggtgccaggatggaaaccagctcctacctgcggcgggatcgaacggctggtctcccgacccaacacctccagctctcgctgctatcaatgcggcagagagcactttctctacaggactccagaaaaagcatataacttcctgcctcgcgcttcaggaagtggtcccagtctctaacaggtcccttcccagcctccagagcaagccaatcagggacacgctctcgtggcccagttcggaaacaatgcttggtgggaacctgcaatcttggctgccggaaccttcggggaggattaacgccggcgcaccgtgcggccggggcggggcgccgcccaaactcaggccctgtgacagcgactgtggcggtctggaaagcgtgggcctcggtcattgggcacgagcggtcacgtgacagcgggttcctccaggccagcgctggtggttgagtgatgtaatcacgtggggtctgaagtcttcgtgggtgtaggtttcttcgttatgctgacgacaggcagtgcccgaactctaggctgggagttgtgccatgctgctgctttcgtgggctgaccagaaaagggtagaaggattgacgtttacgaagtttttgaatcaggaggcaaggtcgccttgtgcccccaaaaggatagaaaaaggcctggcaaactggagaatcgcgtccttacggtgcctacatatttatagtacgaattaaactgctcaaggggtgctaggtttgtctgcagtccgtttctccctcatggtggaagacgcgtggggaaacttggtaaccaactctaattacattggtgattggaagactcgttacatcctgtttttatgttgcaataaaacgtcttgtggccgggcgcggtggctcacgcctgtaatcccagcactttggaaggccgaggcgggcggatcacctgagattgggagttcaagatcagcctgaccaacaaggagaaacccgtctctactaagagacgtacaggaatttgagaatctgattaattttttttctgctctctcacctctggcagaaagattattatttttttttcttttgagaggaatctcacactgtcgcctgggctggtgttcagtagggccatctcggctcgctgcagcctccacctcccgggttcaagcgattctcctgcctcagcctcccgagtagctgggactacaggcacgcgccaccacgcccggctaatttttgtatttttagtagagacggggtttcactatgttggccaggctggtctcgaactcctgacctcgtgatccgcctgcctcggcctcccaaagtgctgggattacaaacgtaatggcaggctaggcacagtggctcacgcctataatcccagaactttgggaggccgaggcgggtggatcacgaggtcaagagattgagaccatcctggccaacacggtgaaaccccgtctctactaaaaatacaaaaaattagctcggcctggtggcgc

SEQ ID NO: 10016 - DNA, 6000 bp, Homo sapiens
ttcaagggattgataatctggagagacaagacaaagggaaatgcaggtgaatacacaacagtactcaatcctcaaataaggttaaaatgtagaatcgcagctcaaaggaaaggaatcaaaagaagaactgagcaaataaaggaaaatcatcttcaaacagttagatggtgtcacggaaacaagaggagcctgactctgaaagagggcaggactttccaaagaaagaggaatgcagaggaggccatcttgagctagtagtacctaagcatttgaggggccaatatttgtttggcttaatttgagatttgttttgttgttttaatagcaatacagttgagaagaaattgagaatggtcacatgcccaaaagccagaactacagttaaccattcacaggattacaaaaatataatatccacatttactcaaagaaactttaaatttggatcctccaacccaaattaaggatgtgagaactgactttgcatagttatcttagacagatctgctctttttagagtgttcaggttttattcacttcatgttaactccttacctgatacctccccaagaacaagtcacatgtacttgaggcaagataagtttggagcatatatgactacagagaaacggtaagagtgtttagcaccgaaattttctatgtgtactttttatataatactctaatggcaaattcactcttgttaaatgagtcattagaatacatttgattttttaaaatctgaaagatttttggctgggcttggtggctcacacctataatctcagcactttgggaggccaaggcgggaagactgcttgaggccaggggtttgagaccatcctgggcaacaaagtaagaccccacttctacagaaaaattaaaaaaaaaaaaaattagccgagcatggtggggcacacctctagtcccagctattcgggaggctgaggcaggaggactgcttgagcccaggagttcaaggctgcagtgagcaatgattatgccactgcactccagcctgggtgacagaacaataccctgtcaattaaacaaacaaacaaaaaatatgaaaaatttttattacagattatttagtttggggatgtgaagtaccctcctgtttcaaagccagcatgacaatactctggttttaaactttcctcaaggcctagtattcgatagcataacaggaggactacagtcaataataatttaactgtacattttaaaataactaaaagtataattggattgtttgtaacacaaaagaaaaatgcttgaggggttggatacccaattttccatgatgtgattattacaaattgcatgcctgtgccaaaatatctcatgtaccctataaatatatacacctactgtgtatcctcaaaaattaaaaataaatttttttaaaaaatatttaaaaaaaagcaaagcctgagaggagttaaaggaaggagagtacaaaaaattaagttttccactgtttgtaagtggcaagtgtgaggcgtccatgcaaggcttctttggcctcctcaaagacaacaaaggtttaccaaccaacgggcctacccagctcagggcacaacccttccctaatgccatccccacctcctcaatacttctaaaaccctctttccaataacacatctgtctcaaagcaacctgaccttaacttacgcataaccaaaccaatgcataaccaaaccaaaacactcatcggcagccttcatcctgaaataaaggccaacagcacacatgataccacaaagaccagcaagttaaatcaaccaccacctcactttgctgggaagggattcttaaggttctccagaagcgcttttaaggttcattaagaaaaacattaaaatgtcatcaactcactctccaaaccgtcatattctcaaatgaaagtgttatcacaattccccgttaaactgttttcaacttcagtccacctgataaaaggtaatctgagaaacagtctgtgagcaggaataaaggcacttattggaagtgctctctcccttcttgtaataccaagagcactagtggaaaagcacaaattaagatccaaaatatgtacacatactatgattgcaactatgtaaaacatgcatagacatatgggtaggaactagtggcaaaaataaatttaaaatagctggtgggattttatgatatttttcaaactttaatgatgttgatttaaaaagaaaaaacatcaaagcatgatgtaggctgacaacaaaaaaaagaccacaattaaatgaagtttatccccccccccaaaaaaaaaactaagaaagaaaatacatttataggtataaagtcccctctagttaagtgagccaaataattcattcatttcttaaaatctggaaagaccatggccgggagcggtggctcacgcctgtaatcccagcactttgggaggcccaggcgggtggatcacgaggtcaggagatgagaccatcctggctaatacggtgaaaccccgtctctactaaaaatacaaaaaattagccgggcgtggtggcacgagtctgtagtcccagctactcgggaggctgaggcaggagaatcactttaaccacagaggcggaggttgcagtgagcggagatcgcgccactgcactccagcctgggcgacaaagcgagactccgtctcaaaaaacaaacaaaaaatctggaaaggccaaatacttttttttcaaaatttaatattttttctcaaaaaaattgagatagaaaatacacttatacgtataaacgctatggttaagcaagaaaaactcatcggtttcctagaattttgaaaaggctcagtcctttgaatttagcttgggatgtccccttgcttcggtagaaatcatgctctcaaactgcaatttaaaacataaatgtgtaaataaccacaccattttaaaaacccaactccgtttagtctataggcttccttatcagaacctaaggactggactccactgctttcctccaggtgaaggaaaatgcttgccccagacggtgccaagacactgagcaaaccaactcctccactcccatccaggggaggggagtcaactatttggactaacagggtctatggcaatgcacattccttccctacaggtaagaggtccttagctgggtgtactgccctcttggactttgatgtcaacagtggtgacccttggagctcagcctttgcaaacaaggctggtgaacagggaagactgcctgaccttcccggacaaccacgccaccagaggcgggggatttatagacagatcgtacagggcgatgacgttgacagtcaatctggcatccagtgaatttcacctcaagtatctggaccccaaaagtgggccacatagcttccctccccaccacctaactatcctcagcctaagaagcagcccctgtgaaggagaggctgtaaccccgttctgcctcaaactcaatggacggctttggagaagtcaactataggctttttacatagaaaagacgtgggtgtggcaatgtgatagaggtgggggtgcgaggtaaaggcttgttctgaggctgcgtttacacggggggcatgatggagatttcatttagagtttatgctcatccggaggaaggggtcggatggaagtggaaagccctccaagccagcccttggcactgccactgtcccttctggtcctggacctcagtatcctcacgcgtaagacactgagctggacagcagttctgaagtttggagattccgggagaatcaggagaggaaggccaccggcccaccccgcaccctcaagctcgggggtcttcacagggactcacacgggacagggcgcgggagcgctgcccgggaccctaacggccctggcgccctcgggggccccggaggacagagggctgcaccccggcgcggagggcggaaggaagcgcgtgggcgcgcggccccgggcggcgggggctactcacgggtccccgcggtcgggcccacggccgcggcagtggatggggttgagctcgtcctgggggaaggcgtgagccatgtagttgtcgtagccaaagacgaacatgccccgtgccaggtcgcgcatctgggcacgcagctgcggagggaaggcgccgctgtagcgcttctcgtactcgtccgggccgcggccccggccgcccagcacgtagccccagttggctgggccgcacatccccggcccaggacgccgcggagccttgcgcgggctctgcgctgccccggtccccggcggctgcagccacgacggcccggatacccccccaggccggcccacgggccccgaggtgggcgacgcggggccgtcggggctcctcagacgctggaagccgaagctgagcggaaagcgctggtagaagcccatgctgggccccagcccgaagacgagccacaatactccatggaggccaagccggaggagcaccagccccaggacgagcgctcgccattgcatggtcgcgcgggcgccgcgggcattattttaaagcgcgggggcctccccgccgaccaccgcaccccgcgctcgccccgtagcccggctcgcttcccctttaaggaactcccccgtgacgcaccaggaactagcccatcgtccccaacccccaggctctccggcgggccggccaggccccacggtcgcccgcccagtggcccgggattggcccggcctgggcccggcctcgcggggcgcggcccaggactccctcccacgcagtaggccgccaggacgtccgcgacgccccgaggccccgcccctcacccgggccccgccccaactcccaagccccgcccccctgggcggtccgtagcccgatgggctggcgtggcgagcaggagccgcgccggcccgcgagggaacttccagccaatgggagagcggcacggcagcgcccgccggacgctggacacagacgtgaccccagaccgcctggccttgggtggatcgggtctctgggcagagcgtgtgtccggcagagctaggaccggaaaaagccactctaggtctaggttaggagtgatgacagttaaaagatatataaggaaaagaaggaaaggatcgtttctgtataaaacgagctatttttgcatatcgagcgcataagttttataacttaggtgtctgtttatggagagggtgggatactaccttttagctcaaggagtgcacaaaacggtatcatgaattctgctcttttgattcaaacacccaactttgaagaatcgctcatggtgcttgtaaaacacgtatccccagatccctccctagacctatcgaacaactccaacggtctcgggaatgtgcgtgtaagtactcttggacagttcttagaaactggaagtttcaggaaatacaaagttatgttatattgcttttgtctcggaaataggatttttttaaaaggggggggcgggttgggggtgggaatgaaggctcccaccaccaccaaattatttaccagatatatctaaacatgtcttctcctgtccctcccatcctaccatctctcctgtgcacccgcaattagtgacctaacctttgaggtgtggggtagattcccagttaaataactttacccctctgtatctacttcctataattaagaagattgcaaatgttagctctaaagggctatggctttcacataaagattcaatggtttaggcgcttatttattttgcttgctgcatttggagttggctgtaagttttgccctccctaagtttagaccctatgcctgtttcatcagggtttctgaaaagcttgggaagcaagacctgactagacccccaaatctgatattggctgaatggccgaccaatggagtgcataagaaggtaagttgtcatgtggcactctcatcacattttcagggtagaggactttctgaaatacagaggaggtgtaaggggaactaagaaaacacttgattacagcacatggtagctggcacataggaaggtccttactgttg

SEQ ID NO: 10017 - DNA, 6000 bp, Homo sapiens
tttcaaatatactgatttaaatttgggattaatgcctaaactcaacaaaaagggcaaaaaatacttgttataaaatcaacttttaatttcttctggagtcttcacaaagtgaaggctctcaatactttattcttagataaattttgcatttaaaataatagtaataatcattatttataaaaaacaagttttaagcatatatcaaagattaatggctacatatctaaaatgttacagtcacagtttagtcccaaaagtattttcattgatctgaaataagccatcatgaaactattataaccaggtttcaagtgtgaggcttttgaagctgtatataaaaaaaaaaaaaattaggactttgatgagaagcatttaaataaaagcccttagtttactgctcccgaatataaatccaacatctttaggtgtagaaaaattagaaactgtgcaattaatagactaggaagtcaaatatcattgccagtaactaactgctgtctgaatttcaagggaacttattgtatattaaattttaagaaagtgaactcacctaccctctcacctcagcactttctcaattttcccattacaattaacaatataacttagcagtcaagtcttccaggccagtaacatcagaatttatttttaactcttgactccttcacaaatattccacttcagtccagtatgaagttctgccagttcttcattcacactgtctctcaaacctgttcctttcaccccactttcacattttactttattccctcatgattcacaacataccctactagctccctaaaaaggctctagcatctctctactataattcactaattcaactgcaaaaatcatcttacgtcttattcagcaaccaacaataaatccagatctcttctgaatctcaatcaaacttgtacagaacccctctgccctccatcagctaactttctcttatttctcaaattccatctgttcttatgttcttatttaggcccctttaattcagatttgtcaacttgattattgtctctcatgcaaaactcaccatcattgttccttggtacactccttccacctagacctttcatgcttttctaccagttcaagttaccacctcctttaacatcagtcctaatacaccttgtccgcaggaagtctttcctctcccaaccatcagtctcacccctttactctttgccactctgaacaaatgattcaatttgtattttacaatcttgcagtcatcacgctattgttttaatttttttttccccatagcctccctctacaactaaaggataagcttttgagagcaaggactacaatttcttatgtctgttttcaacaggggttccttagaatgctagcatcctaacaaatgcttaaagactcccctttcttttaaatgcttttaaagtcaaagctgtcaaaaacacataattaacactaaactccaacttttaaaattctaaattgacctatatggtaatcggaattaaacattttcatctatatattttacaagagttactccatccttagttagtatctgtattaccaagaattcaagagtcattttcaaagaaaatcctgaaaagaaaatgaaaagtcccaaaatgtagcattataatctagcattacagatctctgaaataaagctaataaatcaattagctgaaatagactgactgattttcaaactatattaccaagatgtaaaacatacaaacactccagtaccacaagaggctcttaagtagctattataagatttgtatcatcatagctgaaaattaccccggaattttaaaatatttttcaaatcactccatgaagtgcttagaaagcacgacccttccctgaaagatgcataatcagctttcctctttacctacccgggcattctctacttgcaagccacaagaaaaaaaaaaaattaactttcaaaaattatctcccattcagctattacctagactaccctgtttcaggctagttcccaaagccaacatgaattgaaatcttgagttcaactaaaagtgatcattttatgttgcctaagaatataatcaatttcacataacatcatgttttgcgtgtgtgtgggttcttaaaatctcagttctttagttctctcagttcttctaggcaacaaattaatttgtctttgccctcatgatgcccctctttcccacaataaggaaacaatatagatatttttgttaaattctgcaagtatgtttaaacaagctatcattaaataccacatgaacttctccataaatagagatacactggaacattagatacttagtatatattaaacacttcaagagcatacttttcagcacaaacccaggacaagagtagtctatccacaaccctgaacacagcccaaatatccctattatttctaggaccatagccatctgcaaaagccaaaatggaaaggactaaatccacattcttctaactaaatccacagttatctaaatatgatggaaactaacgctagagtgttttaaatcgtcctttttaaggaacccgccagaacatttaacaggtaatgaatgcagtagcactccaaaattgaacttaaatgtaatgagccagtgacaacatttaacttagtatttggcactatgacaaaacaaatctcaatcaaaacttggacctattaatacttccaagttaacttttgattaaacataaattatacggtggcaggttggtaatgtcaaaacaggaaggttaagagataacacatcaaaccacttatccaattgaacacaaatgcatacagagatgttactgctgctaggtatttattggctcccactagtcccttctaaagagagaaatcaatggcagcctccaaatgtgaatggttactgaggaagttcatccacagattaagaacaaatattatgtgtagtcatacaaacaagaaaaaaatgttgggagggtgggacatttaacgtctctattaagtatatcaaactatgataacccctgagacctaaaatattctctcattccaaattccaaaaattctgcaaatgtgcataatggtttagtaatcaaatcttgtccttctctttattctaaaggatgggcaagtaaacactgtcatcactactttaacgtggaaacactcgagcacttgatgaaactgactaccaacagcaagaaaagtacaagaaagcagtttgaaatcgaatcatccaaataaatatcatattatctcaattcaaggttaatgagaccgggggagggggtatgggaggagtaaaaagggagctgcttcatccttgactgaagataggttttgcccttttccattgcctgtttatcaggaggtctaataatttcagatcctggtatttcgaggtttcttattttaagggcgaggtggaaaaggggtgtaaaataaaaccaatactcactgctaactttcatgctgccaaaagctgaaggctgctgcaccggcttgcagctctccgcaaaggaggtggttctgggccgccctgacatgatcactctcttcgcgaatcaccttttccttccttcctccttttcttccttttgtctttatgttggggtgttaggttaacgataaatgcagcattaagttctcccacagaagaaaaagaaaaagacttcgtcctcttggcttttcactccttttgtatactataaaaaacaaaacaagcgatatatttctccttcaagacagatcggcacggatatttaacatatagatgatttaggacttgggaaaaaatacaattctttcccctccctttcctgggaggagagaaaagagagggcaaatcctaaaaaaatatgtatcacgtgaaacgggggcaaatacttgattgaaaatgagtacttcgaatattatattttcctcggggattttttttccgagtcaatgaagaagggaagcggcggaaggatcacgagtctcacgcttgaagagaaagggggatgggtaggagggagggagagggagggagggggtggctcggagatgcgacgggaaacgctgcagctccggcaagccgcgggatccggcgggctgacggcaggggcccggcgaactagagggcggcggagtcgcgagtcagtcagaggcgggcggtggcggtggcggcggctcctctcctcattgcgccaggagcagctgcaggcggcggctggatccagcggccatggcggtggcggaggcagctcccttcagaccccaggcagcggctcctcgactgttccccattcgccggggacatgggaacccggcaaccgcttccgtccctcggggccccctcccccgtccgcggcaacagctcggccgccctcccgcccctcggctctgctcggtgcccgctcaggaagtgtccgcgctttgccccagcccagagccctgtcagcggctgcggggccggctcctcctcgcttccttccttcctttgtcacttggcccgggcggcggcggcggcggcggcggcacaagcccgcattcgcccgggtcaggagctgctctgtgtgaggagcgctgtctgcgcagccgccttgcacttccccactcctcctcccccctcctactcgtcctccacctccttcctcccccacccagccttacaccgcccagcgccccgccgcccgcgtaacaggcgtctgggaatcgccggccgagccccacgctcgcccgcttcggctgggagccgaagcccgaacggagccaatcacggacgtcgtttgtttgcggctcctcccggaaaaagccgatcagcctgagaaaccaattagaaagtgacgctgggaagccacgcccaaagagcggaaaatgccgaaggtagccgaacggaaagggtgaattcgccttgttcggtggctggctggaggagacattcgacaatggcaacagtggccaatcagagtcgccggcccttacgaagaggcttgaagagttgaggacggtgaaacccagagacgctggtgaaactgcacggctgggcgccgccgccgctttgtgattggctggaaaactccgctgggagcgtacctccttcggtgattggtgaagagaagggggcttccgaggacagtctggccagtcaggacttcccctccctctccaaggtggggagaagaaagcgaagggagggcgtctataaagcgctgtctcattggcctgaagcttaggcgctggagttggggcaaaagggagagggagggagcccgaaactcgcggcggcggccaatcggctctcactgccgtccaatcgcaagacctagctgcagtgtgattggccttcggccccggtcccaggagcggggagatgcctgactcgggtcgtggctgacgacccgacggttcgcctgcggccgcctccaacaacggtggaaaccgcacacagggaccgcgggccctcggtgcagcaaatcggaaagtgctgcggtcggcggccctgggctctgagcgctcaagcgagcagaggggtggaggggctctccccacccacaggaggctctcggcggggcgcagccaattctgcgcgcccaaggctcccctctgccgtggatcgcgtgtgccgagtgttggcctcttccccgaaagggccagacggaccaagggggccttcccagccggctgcaagctctcagacgctaaaatgggaacaaagcttccagaaaggcagcgcctttgggcggccgcgccccgcccagccgcgggggccattgatacagaggcttgctgcgcttggtgtgcgcggcccggccgggcctctggaaacgcccatgagaaatgagctcatgctggatgcgcgcgctccttgggcgcaactgcccagcgcaaaacgggccccgaaagcaggtgaggggaaatgccgtcaggccggatatcctgaagcctccgaggaaatgggggggtcagaggagcccgtggtagctttggatcttttggaactagggtgatctataaaagtgcag

SEQ ID NO: 10018 - DNA, 6000 bp, Homo sapiens
ctcaggcttactaggattgggaaacaccagccctggtaaatttgaggtcagaccggttctctgctctcgaaccctgttttctgttaagatgtttatcaagacaatacgtgcaccgctgaatatagacccttatcaggagtttctgattttgctctggtcctgtttcctcagaagcatgtgatctttgctctgccttttgccctttgaagcaggtgatctttgtgacctactccctgttcatacacaccttccccttttgaaatccctaataaaaacttgcaggttttgcagctcaggtgggcatcacggatctactgatatgtgatgtcatccccagcggcccagctgtaaaattcttctctttgtattctttctctttattgctcagactggccgacacttagggaaaatataaagaatctatgttgaaatattgggggcgggttcccctgataacaatgtttccctctaagctggtggctactctggcagtttgccctaaaaaatggaagacttgggccataaagctacaggaagagactgtttagctggcaggttatcatatggacaaggattactaccagtagcagtagtctgcagaattgtgtaccacagctctctactgttgggtacaagataggctgcactatccgaccttcttgtcatgattctttggagccacacaactaatcctggttaattctttgtgaggccatatgatgtatggcatttctgggccatagcatttaaatgtctgcatgaaaccctccagagtgatctttatttttgccataacaacatgaaacattcaagatggcaactgttccattagccagggacctggagtgacagacatggaacagaccagctgaactgcaatggattcaaaccataaccaagaaaacgtttgctgttacaggccactaaaaaattggaattgttactccagcacattgcctatcttgactgataaacaaatttgttctgtttggctgcaactggcaggacgaagactaacggttggaagtttcaggaagactaattctgtgcaatataaggtaaaaaaatatatataaggtaaaaacataataaagtatataaagatgaaatacttttgaaattatccattcacttgcacaatatatagtgaactctattctctggtaagtacggtataggtaaaaatccttgccttaatggcggtaagtagtaagttccccttcacacccaaaatatctgcattgaatggcctctaaagatttgacagaacaaattaactttaaaaataccttccaacctagagctttaggatctctgattcctctggtcttaagagaaaaatatgtacatatatatatatattttttcttcctcaagtatttctttgattcaaaccactaactgatccattgtcttttcacattttgatgtcttttttccagcaaataacttccttcaaggccaatgctgttttatcctttcccttgatctttcttctaatatttagtaggcaatattttattgtctattcttttaaggaaataaccagtgcagcttttgataccagctactattattggccatttgatatgttccagatttgtctttcagtcatttaagtcacatttggacttgttaaaaaaatctagtagcacaaatgtattattgtgttagttcatttgaggtgctacaacaaattatctttgactgggtaatttataagcaacagaaatttattgctcacagttctggaagctgaggagtccaagattacagcaccagcagattcagtatctggtgaaggctcactccttgcttcacagatggcacttttgttgctgtgtcctcacacagtggaaggggcaaggtagctagattcagcctgtcttacaaaggcactcctgtcactcatgagggttgaagccttcatgacttaatcacttcccaaaggccctacttcttaataccatcacttttgatattaggttctaacacatgaaccccaatattgggggaacactaacattcagaccatagcaactaaccaaataatccagattaaatgcccctttcttctgaaaaatgatcttagccttgtgctatgaaatttgtggccaactacaatattttattaacatctgagctgtaaggcttaagagtttatcaaactatgtcatttaatgcactgcacccagaattgcataattctgtattctaacagagcccatgtgctttctatacaagactattgggaggaaaaagcaaattcaaaaaatgaggggcaaaatggtctcggttcaactcagaggagcatatcatactttcagttataggggcttggctgataacttggggaagcagatgagtatataagagtgtaagaaagaaaaaaaaaccttttttaaaaatttcaaatttctgttcagcttcatttcaggctttcagaattggaaaatcaactgcctgctacaataaattactgttaagcagtaattaaataccgagaatgtatttttttccattccaaacctgatgtctttctcagacacagatattgttactggttaggaaatgcagcattttggtaaattaaggcaggaggatttaatgtctcctgggacctgtggggacagaaagtgatccaagaaggaaaacgttttactatgttttgctcattataatcatttatacctttttgctttgctttacaaaactaggagttgtggtgggcacttgtatctttaaaaaggagggttggttccctaaaagaaccctaattcataattttaaaaaattcctatatgtttggaattgtggtctcggcataaaatgatgatcaactgaaaaaagatgaataacttccagtgaattcaataaccatggatgaggggaaaaaagcagcatgaatacatgctgtattctcctttatttagaaaaagcacacaaaaatacagcagagttgatgtgtttgtcaccagggcttgaaagtcgaatcaaccactgtgtaaaagataaaataagactgcacggatatcaggattttcccagcgtgctttattcatagccatctgacacaacaggacctaacagagcttttaggaaaaactgaattctcagcccacaatcactttccaggaacttccctgcaaacagtgctgtgcgctggcaggatggaaatcttagcaatctccctcctgcttccatagtttcctcctctctaaataaaattatttatggggacttaatgagagagcaagccttgtgtgaaaggaattcaagaaagtgcggcttctaaaaatacacctaggcagctctacagtccttattgttacaacctgacgttttgcagttcatgccatgaacctaactacacttcttgccaaatacacacaagcgtacaaagaagaggaaaagtaaaaactatgttactatgttttatctttctgcaatccctttgagtaaacagtagtaattttctgttgacatactcaatgcaaatttcccaaaggctacacaatacaaaacaaaagacctgttagcttcctcagagctggggggaggagaggcagggggagagaaataaagttgatggagctccagtttctcctaagcctgcagtcctgagcctccagtcaccctagtctttttgtagagattttttgagtttcagtctccacttgggaaggttccttggccccttctctcccaatgtcaataaaaccctcatctctcccgctttgcccccagctttttggggaaattggaccttgcctaggcgtcttgttccagtgggttgaaaagtacagctggtgatgtgaggataaatatttaaactaatgggctgggtcacagcgtgggggtcttcaagagagggcctcctcctccttccgccacgtgctcctcacttggggtgcagggctcctggacaaggggctaagacggacgagggtgggatgaagggagatggacagaccagactgtaagtgaaggaggccctctaggaaacatcgtctcgaccgaacattgacggagaaaaaaaaaatggcccaaatgcccctagtggggaagcatacaccccacgcaggctgggttggggtgggggtgcttcgcggcctctcacctgacttcctcctccgcctgcacacacactacagtaaccccctctactcaccccccaaaacccagccaaacaacaagcaacaagaggaagccgcaggcgacaagaggaggagtgcgcgtgttgggggcccccggagaggtgagggggcagggttggcgggcgacgagaaccgcgccgcgcaccccaagcgcacccccaagcgcccacacttacccctcgaggctgagggtcctgtcttccgcgccaacccccgtgtgcgccccctggcccgccctcgcccctccggcccgccgccccccacaccccggccggcgcgctgggagggagcccgggagcggtgcgcagcagcggcggcggcggcggcggctcgggctcggctcggctcgggcttcagtgcgcctagtgtcgccagcggccgccgaggctcccaccgccagggggagaagccgggcgggcgctggggaggcgggccgggccctggccgccccgctggccagcccgcgccgcacaagctccgaagcggcggctacgcggggtccgccgagcccccgggcgcagcgtgcccggtccgaagcgccacgtctggatgcgcgtcccgggtggctgcgggctcccgcgggggacgccccggccgctccggtgcgcctccagactgcaggcgccgcgaccgacgagacgagagcagctcccgccggccccttccccctcccgcccccgccgccgccccctcccccttctcccccccccgcccgttaacatctcctccctccccctccttctcttccttcccttggccccgcgcgctcgctcgctcgctcctcgcctcgctctcccctttaaacgcccacttcgtatggggaaagaggacaacttgaagtcaagttgcaattaacttccgcggcagccgcagctccggcggcggcggcggcggcaggagaggcagaagccgccgcctcggaagtccgacgccggcgcgcccgcccggggagccgttcttggtttcaggcccgcactcgacagccaccgccgcccccaacgtccatgcctgagtgagttctgctcttttgcctcccttttccccttgctactcttgctgttttatctctgtccctctttttccggaatcaatccaaacttctccgtagcacccactcctcgtcccctattggggcggctgggctcccctctcgtgggcgcagggcttcaacggtcttccgagccccttttctcacgcagacggaccttggaggggtgggctggtagagtaggggagagcggtcgggatgggggatttgaagatgccattcgttttctgtctgggtgtggacacaccaccacacctgcccaatagaccctggctgaacaaactccttcaggtcaccggtatggccccttttagaaaaggaaaggggagtggaaaagaccgaaggaagcaaatggggaaaaggggagcctctcggtgcgttctggagccgggcgggcagtaaggtgcctggaggagtgggctgcgggagtggtaatgttcccccaccggatcgcgagtctgctcagcatcctttcccggtccatctccgcctccctccgctccctgcctgcgcggctgattgtaagcatcggcgaagaggggcctgggaagtttgtggcaacttctgcatcccgggagctactcgggcgccggggcgctcaagttggagcccggagtttgaaagccgcggcactcctcatttcgagccctcgctggctgtagcgaggccggtcctggagaggctgctggcgtgaatgtgggtttggagttgggcaagaggcagaagaaagggccgtcctcttagcaggggccgggacatcacaggtgcagcctcgcagtccacaccgtgtttccc

SEQ ID NO: 10019 - DNA, 6000 bp, Homo sapiens
atcccagctacttgggaggctgagacaggagaatcacttaaattcaggaggcagaggttttagtgagcggagatcgagccactgcactccagcctgggtgacagagcaagactccacctcaaaaagaaagaaaaagaagagacaggaaagcctatcatgactgggtgaagactgaattaggctctcatcaaaaatctccaggcatgccaattctaactagaatacgattcaaactccacaaaatctgccttcctatcttactgactacatctcctcccactccgtcttttgcactcttctttaactacatattgtcttaaccactctcttctcacactgcaccttctgtttctcaaacgacccaaattcactcatgcctcatgtatttgtaactcattttttgactctgccccccataaaacataagctctgtaagagcaggggctttgctgtgtccaacacggcacgctcccaaccccacccacaagaacatctcttgttacatggtggacattcagtgaatgttggttgaccattagggaagtcccatctcatggatgaccacatggaatatcacccaaagtccactgaaaaaaacactttctgctcccttgttgcccccatctttcagcatagtgactctgacccacagccataacaactccaggcctgcttccacaacctgtggaaggtgagaataaccctcccacctctggaggaatctccagcttccttgccgtctcctcttctgggggccttgttctcatcatgtcctaaagatctttccattcccaaccaaataaaaagtaaatcaatgtttaaaccatctttcaaagcctagcactaaatacattgcaaagtatgcaatgatgctatctgtatactttgtcttaggctaagcatataagaaggggaaagagagaatgggggagaagataacttttcactcagctttccaatgtttttaagaaaatctcctaagggctaggtgctttcctttccctctatctcaatggtgcaggaagaggaaggcccctggtcagatacaaaagtttgtggcagtaaaaaggtaaactggacaatcctcctagatgaccaaaagctctccaagaaaaacaaacatgggcacaaggaagaaaaccaggtcttactgatcctgttatcttttactttcataacctcactgccagaatctcagcacttcttagcctgattatacgacagtcaagttcctgaccaagtctgagacactgcagctgattcagtgctgaggtgtcaccatcaggggaaagaactccagctatcccacaatggtgagggaattgtgtttctgacatcctgatatggaattgtaaataaaatttcctaccaaaacactataatatccaatgtatacattctattccatgcatcaagctcactccaaatcaaaatccattttaacccctaagggttaaattggaaactgtgatgtgtgatgtgtgctattatccatcacagttgggacagacaggagagaatgtttcatttcaactgtgagggtggggatgtaaccctgggaaaacctcttccaggtaacatatagcttgagtaggagcttcagtgaaaatgtattcagaaaggaaagaacttttggaatatgcccattgaagacagcataaactcctagatttcgccagaccctgatcacctaagtgacacatcagagatgtgcagaagatagaaggttcctggctggtgaaagtctaaagctgtcacaaggaaggcaaagtacgcagaccacctattcaaaaagcccagcctggggataactagaaaggcatattcagaccaaggtatatataaatggaggatatgccaggcaaaggagaaagatatgcacaggaaatggaagaatttgtgcagaatgtatactgcagaggattcctgggatggtgtaggcagaggtagagtcaaacctttatgtgagccactgcaactcaacctaaggcaatcttggttttttaagctataaaatggggctaaaaattcctttcttgcaggagttttgtcaggaagattaaataaaatagcatatgagaacacaccaaaaatcagagtgggtgccaaataggagttccatgcttccttcaccttctcaataagcatcacctaaaatgcatactaaacagatctctggtcaccactcctggatggaagcacaatttccatggaagccatctggcagtctgcatggttagcagatgatgcttatcagggaaatgcgggaaacatggcattactcacgtcttctcccataaggttccacatgatgtggaacacagaaatgtctccaacagaagaaaactgctgtgaaatccagtcgtctgccactgaatgagaacacctacgatttacaatttcacaggagacagactaatgtttttaaatggtatgtctcttaatggtattattctgtcaatactgtctattcttgagcctcaaaggttttttattattattattgatatagggcataagaacaaactatctccaacaaatctactgaaatgtagtcaaaattgcagtcccattttactgcaccatgtaaacaacatatggtgcaatctgggactgagacattgtggaactatagtaaaaatacaattcaaggaaagcgacatcacaaggaatgaagatctcccctcccagtctacatgaccacaagaacagcttaggaaaccagaccaatgcaacactttctagaaaaattatcttcttataagcaaagttgccattatccaaagaccctctgtggaatttggccttactcagagacaataaactaaataacagtctaagggcatcgtttttcgcagatcttggtatgaaaagcgttcttagtgaaacaaaaaggaagcaacataaaccaacttgcaaatgtcaaatcggcatgctttcaaacggaaaataacctggcagcctgagcagatgttcccaaatatttaacatctccctgtaaataaaaagacagttttatggtctgcagctaggtgaggaagattgaggaccggaaagtcaaacattcgggctagcctaaaagaggtggccgctggagacccgaagagttacgaggttcaaaggtcagcgtggacacgagaccacagaccacgaggagctttcagcagatctacagtttccttaactatccacctactcacagcacccagctggtcctcgtaaggcaaatgggacttacgactttagactcggtgtgatttctgatacactagcagtcaccacgttattttcatccctacccccacacactgtttttaaacattacctttcaacagcaacctcttctccccctcctgctcctccccactgtccccgccaaccctcgctactgaaaaatcctaaaagaaggtgctttgggtttgtttttggtttctgggcgtcgctttttataggttttcttttaagccaaaataacagcacacaagaaagaggcttgagattgccgggatctccggagccggcggcctcaaaatgacaagttgcttctcccttatcttgaaaattaacagcagcccaaacactgcaatttactcaccgtcctcctttctcctaaactgcctcggagcttgttttgttaggtctagttccattgtggagggaaaaagggtttctcgaaaaactttatacggtaagagaccagaaccttccagacccctcaaccctcctcgcgtacagacccttttacaagaaaacaatagtgaacgaggagctggacactcctcttggcttcccaattgcacaacctcgccggcgattcgacaaaagagggtcccagagcagattctctcggcccccacggctcctgggcttacccgcgaggctgcgcgtccctcccgcccttcactggggctccaggatccccgggtgccctctcggcggtggctgcggcgcacgccggctggctcgcgggtcccagcgcccatggtccctttacgcctccgcacgccacctccttggtgctggcaggatatgtggaggggcaaacagcgctccgtgtccccacccccaaccctgagcctcagaggctgcaaagccggagggtcggggcagcacagaccccaggccgcccggaccccggcccagaccggtcttcccgcacccccaatttccctcacccgggcagtgcaaacccgcagcgaagccggccggcaagagtgacccgccgaggcccaggagcgacgaccgcagaggcgcaccgggctccgagacctgaggggccgctgctccagccggctgctgcctctctcgcggcgcctgccacatcgggccgcagaagcccgaggccggcagaaaccaaaggaaggtggcgcgggccaggggcggcgcgggcacgattccttccccgcggatctggcgggggagcagaggagggagcagccctgcccggagtctcaggctcccgccagccccaatcccgggcgactgcgccgagcgcctccggagtcgcgggaagctcctcctgctccgcggctggcgccagttgcacggtggccgcccccaaattcgaggaggaaggtgcaaagtggtgggaggctgcgggtctcccggagggtgaggcgttggggaccaggcgggagcacagccgaacccctacctttcgggcggggcggacaccagccgcgcgccctcgccgggcgccgggaccggaaaatcaccgcgaagggagggacgaggaaaggcggcgggtggcttcaggacaaggtaggaggatcgatttccacagccaagaagacactcccatcccgccctggtttgtttggaaagctgcaggagctaaagtgaggggtggccgggtactccccttccccgcccggctggcaggcggcagaagtaaacactgaggcttgtggcgccgcggactgactgtgacacaaggctcagcagaaggtttggtccctatcagaaggggaggagtgttcagagagctcctgaattccggggctctgcccttcaagggcaaatgtgttcgtactttttatcttttgaaggagataaattactttagggagaacgaaggtggaacgtgctgtttgcgttttcttttctctccataggcaaaaccctacgttattaatgtcctcttacttggatggctctgaatactttttaaagtgtgtttgtcaaataattccttgtctagaaacattcaagtcatagctccaacctttgggccctgagcagtgtaatcacgtgccatcaattgaccccagagagaagacccacggacttggatgtaattcaaagttggcaatgtgtcacgaactggaacaaagtccttcatctgtgatgggctttctggtatttgtccttttttttttttttttttttgagacagaatcttgctttgtcacccaggctggggtacaggggcatgatcttggctcactgcaacctctgcctcccaggctcaagcgactctcctgcctcagcctcccgagtagctgggattacaggctgggattaccactcccagctaatttttgtatttttagtagagatgaggtttcattatgttggccaggctggtttcgaactcctgacctcaaatgatccgctcgcctccacctgccaaagtgctctggtatttgtcttaattgtaataacagccctaggaggtatcatttgttgttttcccaaccttactttaaaaaaaaaatggccgggcgccgtggctcacacctgtaatcccagcactttcgaaggccgaggcgggcggatcacgaggtccggagttccagatcagcctgaccaacgtggtgaagccccgtctctcctaaaaatacaaaaattagccgggcatggtggtgcgcgcctgtaatctcagctactcaggaagctggggcagaagaatcgcttgaacccagtgagctgagatggcgccactgcactccagcttgggcgacacagcgagcctctgtctcaaaacaaacaaacaaacaa

SEQ ID NO: 10020 - DNA, 6000 bp, Homo sapiens
actccaatgcttatctgagggagatttagcagaaacagtgttttaatttttaaaaaataaccctgacactgcaactggatgaccaaatatatggtaatatatgtgaccaatgagaaatgaagtaatttacgtgggagatatttctacaaaaataacacctttttagaaagcttaaactgatagaaataggatttctatcatatatattagatatatatgtatatgcctttgaactggtgttagcctattcatgattacaggtcataaatgaacatcaattataccatgttattttaataccatgatattctcagaggcttctgagctgtttactggaaagatcccagtttgctttacatcctttttctgtccagtttttcttttcctgttatctactgtcccttcacaatgtcatctacagctgctttcctacgaatctgctggaggagtgattctcaaagtatggtcctaagaccagcaagaaataacaggaaatttagtataaatgcatatttatggggctccactgccgacctactgagtcagaagccctccatataaaacaagctaaatttcataaaagatactgtgaagtagatatcaaacaattataaccctgtttaaaatgtcaaaaccctttttattaatgaaagccctctcctgtataagtaaaaggatacaaacactagaacatgaattctgtggtctattttttggtattcaaagaaattcttgctttccttcaacacagccaaggctgcatagaagtctatcacaaacgaataaataaatcccataagtttctatctaggtaatctccgtttcaaggtatctaaaatggataaggaaaaattacattttagttttacgaaatttaacgttttaattataataaatgtaggccagaaaaacccacaaaacatagtaatagtagcacttacatctgctcattctgtaagtaaagttttcacttaatttcttttaagacaccaaaaatatatggctccagcctaggagacaggacttacagatttaagtgttacctttctaatagccaggaatttgagataaaattatcccattaataactattggtcacaccaacaacatcaacgagaatttaatgactacttacctttgtcaggatgatttaaaagcataattcgtcgatgagcatctcttattttccctttattggcagtagggctaattaaaaaaagaaatggtatttacttcatcctacttctgcatcacatcaaaaaactgtacataaaggccaattaaagacactgtgaaactgtagtaaattaacacaacagtatgaaaagctgtttagaaacctcaacacacccaatgcgtatcctaaattgggaaactacttagaaaagtaaggcactctcaaaaatgtgttgaacttgcagtacccattacaacagtccttttattgataagaaacgcatgtttaaggatttgaaaatgaagaaggaagagttttgtttttttttttttttgagatagtctcactctgtcccctaggctggagtgcagtggcttgatcttggttcactgcaacctcggcctcccgggttcaagcgattctcctgcctcagccttccgagtagctgggattacaggtgtgtgccattacgcctggctaatttttgtattttaagtagagacggggtttcaccatgtttgccaggctggtcttgaactcctgacctcaagtaatccactggccttggcctcccaaagtgctgggattacagacgtgagtcaccgcgcccggttgaaggcagaatttcaccacaaaaaaaatgtcagttacagagaacaacactgaacactgtgataatctgctgaggagtctatctttaaataaatgaaaaagtgcctgtgttttagtaaacactctaggaaaaaagaaaaagtgcttaagtgctagtgtgccttctcatttgaaggattgtttacatcttaaaaataacatgaaggaacagtacagtttcattgattagaattggtaatatcaatcttcctaggacaaaatcccccatgaccctctcctattaaaggagagaaggtctttcttatatttcctcatggctctacagtggtagaaaaatgctaaaaatattagagattattttaccttacacctagtattaatgctgcttcccgttttgtcattttgggttcaaacccacctctataatagccaccactgaaggcctgaaagaagaaatgcatttgtaaagaaaggttaataaaataaagttgctttaaaaaagacgtctggaaatattcacagaactaagaaaaactaagacatttcagaggacttttagtgcaattcccgaggtattttagctaaagctgaataaagtttataaataagtagcaacaagtagtattttaatgatcattaaacagattcatttttttccagtcaatatgaactatcttagaaatataagacaaaataacagtgtctgaaagccaggtcttccgggagtaaaggaaagatcattccaaattagccatattctagataaaaatctgcaagaagtggctcaagaacagaagtcttttgagacaagaggttcaagtgtatttgaaacaagactttaagatatatatacagaaaataccactattaggtcctctgaccttgccatgtcagaaatcatattggtaaagcctacaatcactctattctgttacacttaatcacaacatattcaacaggtgatcacagccaaatctattcttaactgtgaccacagagagtatgaccataacatcaagccaaaccctatagcctaattaactagagtgctacctatgtatgatgtttgggagtgccagggccacatggtcagatcggatcactttagaatcatatacctctgtgtgtgcgatgcagagcagatgaaggaaaacaagaatatgtacagatgatgctgaaggtgatggtatgtgaaaaagtgaaacttgggtctagtggggtactagaattgtcaaaaccccatccaactctgtcacatataacatctgatgtttcagggtagcaccatcacaaagttcagaacttctatactctccttgcaggaagcaggagaatgggtccaaagcaatcacttagaacttcatggatatttggaaatttacccttccctaagtgtggctctaggtttcaaatagaagcagcaaagaattaacaaagtcttacagattttggtaggctttgaaaaacttgttttacttgaggctccatatgcttcatggcttgcaaaacgtaacggcctaaaaccaaaagcaacagaataagtaaactaaatctccaatctccccgacttcacttccatccccaaaccataaacaaacctgcaaatcctgcagcagcaatggtcagtccaactgctaccactgtactggcctggtaagggggagaagagtaaatatttacttctctaattcccaccctttctcattttgcccattcttccatccccaactcattacaaactgcattttaataggagaaacaacttttttttttctttttttttttttttttttaagagacggagtcttgctatgttgcttaggctggtcttgaactcctggcctcaagcaatcctcccaccttggcctcccaaagtgctaagattataggcataagccaccatgcctggcagagaaacaacttttaaggcggaaatattctgtccagtaatctttaaaactactgcatctgttatgctgaatgcattaaagttacaggattcatcatatgggaaagagggcaagttcgacttgcttatttatctttacaatagtgaaaaagatgattccctccctttgaaaacttctttcatcaccagacaaattaagtcacattaaagttcaatcaaaagtagtggaaataggccaggcgcggtggctcacgcctgtaattccagcattttgggaggcgaggcgggcgtatcactaggtcgggagatcgagaccatcctggctaccatggtgaaaccccgtctctactaaaaatacaaaaaaaaaaaaaattagctgggcgtggtggtgggcgcctgtaatcccagctacttgggaggctgaggcaggagaatggcgaacccgggaggcggagcttgtagtgagccaagattgtgccactgcactccagcctaggcgaccgagcaagactctgtctcaaaaaaaaaaaaaaaaatgtggaaataaggtttctgctacagaaggaaaaactgtttacagacggctcctgtaaaattctaacaacgcattttcgaggctaaacgtgggctaaactaggagactaatacctttggcactgccctgttgtttcctaacaagacaggcccaaatatgttcaggaagcatggagaagacatctgtcagcaaaagccaaagagaaggacatagcaaagtggagctagtgctgtgaagatgtgttagggcaagggcacttataatcaaatacgtttccactaatctccgagtccatgacagcctctgaccttacaggagttccaggcaagcaacacctgcagagcccgtgcggacaagaagctggagaaccgtgcagaaagacgatgtaaaaacacaaacccccaagagagcgagccaacagggttgtgtcctggtgagtgtgactccccaataaccgaaacctcccgcccgcagtcgcactaaggagcacaacttcaactccacacctccgaggcggggagctgaggttgaggcctgggccggaggtcgccaagaagaccggaaggccgcactcaccatggctccggctgggctcccttgcttccaccgggagcacggctcatcccagctcagaggccgcggccaacacctgcacgcctttaccagagagcgacgcaacccccaacctcaagcacaggcgccctacgcaacacggcaggagcagccgcaaactaggccggaaaactgtcgtaaaaggggacgcggaggagaaggaaagtcgctcaagcagtggacagagcggagaaagcgacttcgggttggttgaagggtgggcggatctctttatttctgggtgtaggggtggggcttctctgtgttttctgtcctttgctcctgggcggtgggtatttggaaattcttgcagggaagggcatgggcagccttactcagaccgattttttccccctacatcttagcacctcgttttgcctttattttatgttaataattgtcaagggtaatgaatgtagttaaacatgctgtgacatttccaccacgaacccaaacaaatatgttgtaacccagtgtaggaaacgagatgcccagaaaaacaaatgaaaccaaccacactgtgtttcagggattgctcggtagcattttttaatgtaaaagaacttcatttaaggatgtgacttgacaagactttgtgaatatttgggttttcgttttgtagaatgggattaaagacagttcatattctgaacatggaatgtcaagatcctacaactgaaaagggctatttaaaagttttcctcctcacccaaaataaaaagtagggctggattttgcccttacgtggacatcagtttcatacatccctacataaatgcttgagaagaaaaaaataatggagacaataatggaattttacaatgcaacgtttgcatgatcaaaataagtttggagttacttcccactcagaatttacagtgttaaatatccgtttacattgcaatgcaattctgctttgatgagtttgttagttattaaacaaatatgcaaaatttttgggtttgttttcctcatctgtaaaagcagtttgcatttgataatccaagagctcttctagcgctaaggtttttgtgatgtaatttattgtcaacacatgatttaaggtgacatccagcactaagacactagcattaagtttataacttcctcttttgcctctcttttatctggtttttacccaacaattacaaaata

SEQ ID NO: 10021 - DNA, 6000 bp, Homo sapiens
aggagttcgagaccagcctggccaacatgctgaaaccccatctctactaaaaacacaaaaattagccgggagtggtggcaagcacctgtaatcccagctacttgggaggctgaggcaggagaatcacttgaacccaggaggcggaggttgcagtgagccgagatcgcgccactgcactccagcctgggcaacagagcgaaactccgtctcaaaaaaataaaataaaataaaattttaaaaaataaataaaacgtatgaggagctactaccccaacatcacagctagtaaaggatagagcctgagtttgaactcactttaaccactatgctacaacacaaagacttcaatgatttttcttacacaaattttttgtttgtttgtttttgagagggtgtctccctctatcgcccaggctggagtgcaatggcgcgatcttggctcactgcaacctccacctcctgggttcaagcgattctcccacctcagcctcccgagtagctgggactacaggtacccgccaccacgcccagctaatttgtgtatttttagtagagacggggattcaccatgctggccaagatggtctcaatctcttgacctcgtgatccgcccgccttggccttccaaagtgcttggattacaggcgtgagccactgcacccagcaagactgcatcttattaaatggtgctagggaattcagcacaatgatatgagttctatcaatttcatttacccatgtaatcactcgacccatttagtacagacgctcaactatagatcataaacttgattagaaacacaagtttttggaaggatgatctacacggatcaagactaacaaaacagctgggaaaattccgcagattcagtcatctaagacagacccaggtttgaatcctagtgttcatttaataattttgtggccttgaacaagggaattaacttctttgcatctctgtttcatcatccacaaaaaaagcccaacactatctacctcataggattagcctagggtataaacagcatagaaagcacctcacacctcctagagcatagcccggagcacctagtccctctcctctggctctatggttacagggcaattaattgcactcttaccgaatccaatcccagaggggtaaacagccaaatctctccagcatcagcgctctcagagtcttttctttttaacttcaagtttctattggtggcagagcaggagataccaccttcgtggtacctaaactgaacgatactcaacaattctttactacacagctctagggtcctagccctcctctactaccagaatgtctgagcataaagtataaatgtctcgtgttagctgctttccttttttgcatttcagtgacttatactgtaaatgttatttgtgaaatgagtccaattcacatgcactagaaaaatacaagttctagtgaataccaatgtttctgccatgcctctcccctgacttcctaccattcacattcttctttattctttttatataaatgacaccaaaaattgaacaaacccaacaaattatttcaaccaacttcatcaaaatgtgtcaagtcaggaattctttataatagtactgctacaagttgtactagggagattcctttgtcagctactcgtctgacaaggttgtatatatactgcactgatagatttaatcaacaagttgatgttcaaaaggtctattaatacatttccttttatcagtaccccttatatttatattaccttctgttagcttgaaaggctcctagaacacaggaagcagttacctctaattctttcgggagactggtgtcatggtaatcatgcaaaacctttaattaggtgtcgagaatacaaatatcaaaaagattcttagacatacgtattaaaatgcttaacacttctttgaagcaaccaatgcaaaaatatcatctctgcaaggggtcactccatttaccaccagtgtctcccacattaatacccaaagctggtatacgttaaaagaaaaatgtcataaactgacggtgagctttgcaacaatttttatgccattaacatgtcactttattaagttccttagcaataagaaaaacttttcccaggcacgtagttttcgtcccccatacagtttagtattttgtcctgtaggtcggattccaacaactcaaacgtcaaaaaaaatagtagttatttatgaatttaatgattgcgattacatacatctcagtgcaggatagggttgaaaaaaaaaatcatattccaaacaagaaaacctggatttaagagcaagaagcctaatcacacatcacacgcctaactgctctcaggcatactttcttcctgcagcccctcccccacaggtaaatgctaactatttctagaactctcaactatttgggaagcttgccatcaactcccatgataccacccaacccacaccatgttttcggggagacaaaggtgccctacttccccagactataaactattaaaatggtgagaacatacaatcccaggaagtcggcattactaaaatacatcaatgtagcatgggtcttattttaacaaaaatgaaaatgaatcacactggaaaacccaaacagtcactcattgtatcttcaacgtgtaatcgaaattatttattccaagttatttcaggtaagtagatgaacacaccacgagggccttattatccaaactggtgaagaagcctttaggaaaaacggagggggaagatcacttaattatatgaggtggggggtagagcaaccattcagtcttaaaattcaaactaaaaataacctggcattttcaccccccacattttattaacaagcttgtttagatcagcatacggttcctgtttggaaaacaagaaagtgaatagtaaactttcctaagtcaactgtaaatcacataggtactaaaactcttcacccctggtgcctgcacagtccaagatttcaagtaaactccagacactgagaacacctaatttttaactagtttccaacatttctcatttgtaatcaccaaattatcttagagacacttagataacctaacaaagagagcattttttaaaagccacaacccaaattttacatgaaatacaccattttcacaacctaaatttaatcccggttgccactgcgaagtgatgcctgtttcagcaaattaagaacttccaaaaatactgaacacgttaacacatgcatggcttccctcgagctgccatttaagattaatattccacttaaataaaagtctgcttctgttcaaaaaattaaatcggttgcaaagaggaagttaccgagaaaccaccctcacaacgtggcctttacactgtcagaaaataacgtgactctgtgccacccaaaacttaccaggaagctggcaataactttgccaattctacactcctgaacccaacttcaaagagcctccaccaaatacctccttaagacgataaaaagcactaagttacaaataaacacgtcccggagcaaggcccggctgccgcgcgcccctcccccggccggcgcccccgccccggacgcgcggccccaacagccgcccgcagcccccagcacgccggccggggtcgccgcgcccgggccggggacgcgcccggggaggggagatttccattgccgcccgaggtttcacaaaatagcatgcaccgaaaagctccttctcctctgctaaaaataggctataaaggagtcggcctcatgatggctccttgattcaatttgctgcaaatcctttcctgaaagcctccccccccaaacacacacgcacaaaaagggggtgtaaatgcacgaagggaggaagagggggagaaggccgaggtgcacattttcggggacaacataattagggtgaggatcccccgagaccgggaaagggtaggggggtgggcaggcacgtgagcatttcaaagaaacctgagagaggaaaacggggggatgggggcgccccaagtgccctccctgccttcccttcccccacgcaagcccagttcccccaagggccaagttgaaaaatgcatgttccactcgcgcccatccccccgcggcccagcgcccccggccgcctctggcccgcgccccccgcccaggcccccggccgcccccactccagggtccggcccccagcgcttacctggaaacggtggcctccaacgccgctcccccctcccgggaatggaggcacaaggaaattcccctcctcgccgccgccgccaccgcctccaaccacccccaaaataacccctccggggggtgagaggcaattataaccccagcgagcggagggcgcgggggatgggcgccgggcgggcgggggcggggagcgcggcgcgggtccccaggtggcgagcggaggtgctcccgccgcggggggaggggcgggggcgcacgcggccggcggcggggggaggcggcgcgcgggggaagggcgcgagcggggagaggaattgaggcagaaggtaaaagctgttactaagggaaagagccaaacggttcggagcagccaacggctcagacactcaacactggggagagaggaatggggaccagccaggcacaaatgagctcgcgaggcccgcggcggcggcggcggcggcggccgcgcagcaaaacaaacccgagcggcctgcgccgggcgggcgggcgagcgggcgggcgggcgcgcgggggaggggccggcgggggaggggcgccgcggacgccgggaggcggcggcggcgcggcgggggggctccagcggccgcgctcctctccttcccggcccgctctggcggcactgggggctgggctgtgcggcgcattcttttaaaaatcaggcgagccccgcgggcactcgaaggcgcctcggggccccgggccgcccgccccgcccccaccgccgcgggccggcctgggtgtgctcgggtgtgggccgctgggcccgagacgggtgggggcggggaggcccgcgcggtggccggggtggagccgccggcgaagtttccccaaggacgccgcgggctcccgcgtgtccggggggcggcccggcggcgttgggggctgggcgcacacgcggcgggcatgtgggggagtgcggcgcggcatcatatggacatttgtttgtgaaaatctctgtgaacacctttgtgtgcgtaaatacatatggttctccgaagcgtacctggaaaggtgctttatctgtaataagcgactttcaaaatgtgatccagagcacgggatctggagagaaaacacgcacacaagaaaaggtttttgatactaaacacaaagctgtaattgaagtatttatgcccaaatgtactgtgaatcaagcatatggtggtatttatcatctggtgggtctgtttgaaaggtttgctcgatcagttcttatttcacaaaaataaaataatgtaactaaatgtttactaaatatatacctgcacagtggcatccacagtagaagtttatccactttgtgtactttttgcatgtgtgaagcacagcaaggcggtttataaagtataacttagatgagtgataatgtggcagtatggttgagggagggttgtttttaaagaagggaggcacctcacaggttttaaagcaaatggggtggtaatctttctaagactttcagaaagatggggtagggtgctttttagagctttgtataagctcaggactggagaagcagccacccttttacattaagatacgacttgaaacctttttgttatttcgcttattactgccttcaaagcaaaataatgtttgcagctttcttaaaggtgaagggttctgttttcctactttcatcagaatatttgaaaatagatgtagtgatcactttaaagcaaccatcatttcctctcaatatcagaaacctgaagttttgcgacacacacacacacacacacacacacacacacacacacacactactcgtaacttgcaccagtctggactcctggtgg

SEQ ID NO: 10022 - DNA, 6000 bp, Homo sapiens
aaaactggtttggctaccaatttgtcttcttcagaactgaggtcaacagcctctttttgtcatctgcaaagtgaaggaaaacatggagacctcaaagtacaggaagtagtccccaacttctaacagcttatgttccaaaggtttatcattcctttgaaaacacatctgtactaattaaccaatttataccatagtttcttcggaaaaattgcattctaagttccaactctaacttgcaactttctgcccagcaaaaaggcgtctgctgcatttttgctaactacagccaaaacctaaggctcagagaattctctctagggagaacccactttataacctgctaaggcagggaaaaaagagctctcacatagggaacttcattgcttctatgggaaaggctaccacaattgaacaagataatggatatggagaaggtatctggctaatataaagtaaaagtattatctcttacaataaaaatatgtagaaaacacattttgttccagataaaaaggtatagttaagtgctgttaaagtggctgattaaccaaacgtttggcaagtacagacaatatattttcaaactgcttcctcctatctgttcaactcagctgataagggaggaattactaaagtgaagtcaaattgttaccaaaaatgttgctaaatgttaaaaaagtgcagtgtacttcaataaataaatcacacatcaccccttatgacaactggtaagataaataacttgggtgacaaatttaaaaaacaagtataactctgtgacgtcactttcagcagctaacttgagtcttttacacaatttaagaactactgtaaaatttaaagaaatagctcacagagaaagtaaacccttcactaaaacgacttgcagaaatgaaaccattgatagagatatggaaaaagaggtcagggaaggtatgagcaggccagaataaatcggtttgtggatgcacagcctgagagtaacatttaaatattattaaaggtctgtgccattgctatatgatatgatggtgatctgagcaactcccaaactagaaacactagagtgttcagctacagaccagttaaagtgttgcgactattagtagctatagaagaaaactagatttaaaagccccgaaaagctttaaaagcccaaagtaataatggcaggcaatctacacatccccctccttttaaccttttcaaaaagaatgactgtaagaatcagataagaatgaatgagatgcctaactacgtgagatcttcaaaagacatgaaaaaaaaacaagaacaaggtattttttttgtctgaaacctgattctctcattaagtcacctgaattagacattatattagattcatactgacaaatctccattcacggtaaggcacaggagacagtccattattatacaaatctccttactactaagcaagattatctaacattatgaatataaacatttaattaagaaatgtcaacattaaaactatatgcagaatacctaaattaagtagctctttaaaacagagatgtatactttcaaatggtacaaatttagctaaatgataatgtgtcagaaatgcgttttcatatatataaaaaatgaagcaaaacatattttcttttttgagtcggagtttcgctctttgttgcccaggctggagtgcagtggcgcgatctcggctcactgcaaccttcgcctcccgggttcgagagattctcctgcctcagcctcccaagtagctggattacaggcgcccgacaccactcccggctaatttttgtatttttagtagagagggggtttcaccatgttggccaggctggtctcgaactcctgacctcaggtgatccacctgcctcggctttccgaagtgctgggattacaggcgtgagccaccgcgcccgaccaaaacatattttcatgtgcatgaaaaagaattatgccctccaaccacactactgaagctggaaaaagaaaacttttaatacttagctacactaaaaaaaaaaaaataataaaaataaaaaataaaaaataaaaatattagccactttacttgttgagccttttcattattgcattactcaattttagtggggatctttggctgacttgatgcagatttctaatcttaaggaaaaatgaccaaaatctcatcattcagtagtgaatttttctgcaatctttaatttcagccccagagttactattaaacagtcgttagccttccatttgtaaaaatgttactatggaaatattcacaattttgttacctgaaatgtttggtcaaccatgcatttctgctattttaatctgaaaagagaactttctcttttcatattgtccagtaaatactagttttcattttctggttccaatttcatttttatctaacttgcttaagtatttcaaaacaagaccacctaataatattgtgtcaataagccttcacaggtattcttaggctcataaatagtctacactaacatattttcttctgtgattgcacgttaacaaaaaggttattttttaaaaaaactagtgttagaaaacaaaatcaaaacttctaaaatggaatgaaaacatttcatggaagactgtcacagtaattaactgatctaaattgaattgtccatgagtgggcccctctggtgttcaatagatgttgcagtaccaatttttctctccataatgcagaacttaaatctggtatattactatacaggtaagttactgcccccctccacccgaacacttattatctatatagttagtaactctcaaaaaagactctctctctttgaatctcaaatgatgaaacaaatatcctgaaatttaattaggtctaactgtgaggaagtaagattaactcaaggttgacaggtcaataagataacactagtttaaaaggcatactctcagaggggaaaatcctaactcagggggaaaaatcctaactcgggttgggcaagttgcgaaaaaaaagttaaagcaatctttccatctagataattcacagaccaatgtagtgtctaagttagctagtgttgttaagagtggggtaatttcctaaaacattcaggtcagtcccttacaccatgtgcaacttcggtattacaatctaggactcccatcaccgtggtactgtttgctcttatccacaaaccttcctgcagaccaataaaggaactaatgcaatgctttcagatactgtgcataacacactaagggtgacagtggctaacagggtaaggatcttgttctaaaaagcaacccaagacgatagtgaaacagtaaggtgctgagtgcacttaagagctctgaaaaaaagccactctttaaaatacctaatgataaataaataagagtagctagctttcagatcactttcaggggtattatttccttccctccaacacgccattcactctccttttcccttctcgtatcatgagagcataaaaagaaacagtaaaagcgtaaaactgcaagggtgagcagccggggttccggcacatctggacccacctccagcggcaacagggcagcccccctggccgattccgtctgaactagcaaaaacgcgcccgcaaatatgaaagaacgcgaaagcagcgggcgaggagggcggggaatcgaccgacagtccgcggaggagctacctgccgcctcctggcgtggcgggtccggactcagcgaccaaagcgggctgcgagggactgcacccacactcccggcggctgcacccacactcccggcggctgcatccacactcctggcagtcttcacactagcccggccgagaatcaaggtttcgctcctggaccccgacgccccgcctcaggctgcacggggcaaacttcgcccacgggcagggggcgcgcccggagctccgggatccgcgccggcctcagccaggacgcgagcggggctccgcggcggcgcggggccaagtcgaggagagctgcggcgggcggaggagcgggtcccggttccccgcgggccacgggcgggggaggggcggcgaggcacttaccacgggtcgaactcgtggatgatgctttcgaagcggatgacggcgaagaggcgcgagctgaagccggcaagccaggccaggaagaggatggtgaaggagagaagcgactgccacccagccggctgcgacagccccccggacagccccgccggggccggcttcggcggcgccgcgccgcccgccgccttgtgcgcgcactgggccccgggcccgtggtggccgtgccggctgtttcccagggccatgaggccactccacggggacgagttgagggacgacttgtgcttgctctccggggccgagggctccgccatgttgtgccccggcggcgggtctagctctcctcctccgccgccgccgcctggtgcgaggggtgctgggcggggacccggaggaggaggaggaggaggaagaaaaaggaggagggaagagctctgcgcgctcccgccctcagcgccgcgaggccggcggactgggggtggaggaagcggcggcggggagtctccgcctcagcagcggccgcaatcgccgctctctcaacccagatggccccggcgccccactagccatccgtatccccagtgcagctgcggcggcggcggcgaaagccgacgggacgagggcgccaggaaagaagcagcagacggaggcggcaccacggctctgagaagcaatgacattccctctctagcccgccgcccgcccagccgaaaggagcagggggaggagccccctggagtccgggcggagctcaagcaacctctgactccgcctccggcccgacaggaactggcccctccgcctgtcacaaagcgacaggtccgttagggggcgggcccagaaccgctgcgcccaccaataggggcgcgagctggggcggagcttgacccaaccgtctccccctcccccccaccatcccggcctcgcgccgattcgcccggagtggccgagctgcgcggctacggcttcattgtcagttgaaagacgcggtttcgcgcgcctgtgcggtcggcgagaaagggtactaggcggctccgctaggttcatggagctgagctgggccgaggggcgggaactgcggagcggcctcggtcaaactcgtcttaaaggacgcggaaagcgccgcaccgaccagcaggacgctcgcgggctctccgcggtcgtgacttttaacccgctttgcgcggagccctcaccacgtgacggccgcgcaggcgcattatcctagccctcggcgcgtgggtcgggccgaggggttcagcagcccgtggcgctcctcggctggcgctgcgagtgagcccgcggcggcagtgacacagcctaccttgctcattgcccttcacgtcccgcctccggcttctgcggccgcgggaatccgagaatgtgagcaaagacaagttttccgacaccgaaaactcgttggaaccggcaagcgcgcccctagctccggcaggcaaaatgcgaccttctctcgccctttttcgtttgtactccgaattgcgaaagtactgtatgttcactggaaatatgggaaaatgcagaaatacattaacggctgcatacattccgtcgagtgagtgaaactaacttaccctggacgttaagctgtttccagttctcactttactaaataataatagaacgaaggttcttgtgcacgtctaccttgtatttttataattcctttcctttccccacttccctccttgtccgctaaaataaagtgctaccagataaactcagggcaaaatgagcttaaactaagtgaggtagtggggagactcgaattgctcttatataaaccccatagaaagtacggagctttcggcgtaatcggtgctcagtaaatacttgttcatgtcaattcacagctaattgtacattttattaggtaagtaacatctggatattaaagggcatattaatgtaaaactataaaggccctgaattat

SEQ ID NO: 10023 - DNA, 6000 bp, Homo sapiens
aagcaacactctcaaaagccttttgtaaataatcattaatttaaaaatctcataggaatctttacttaagtgaaatgacaaactgcatagtgcagagtaataagattccttcatatgtttcattttctttaggcctttatgttaagctacaaaatgaactgtttaactattgctaggaataaactatattttaaaaggtgttaatccagttggatcatttttatgcccttataagatattaactgcaagtttgttttatcatttatattatgcacacatttgtacatttttaaaagttacatttaaaaggttacatttatgataatcacatcatacaaagatctaattaacctggagttgttgagcaataattgtaccttcaaagtgccaggagatttaaggtgtatgcagggtgtggcccatccacccagaatttcaaaaccacatggttcttcaggtcctgttggggctcatctatttgcacgtctcccctgcaggagtttggactaatcaggtcactacaccctgacacagcagtctccagtctctaccactcattgtttgcaacatgacgtaatgtcaacagaccacagagaagttagcaacagggaagggaaaacactttaatctcaaggtcatccccagggttcagcaggacatatatcctatatcgaatcatctgatatcaaatcctacaaatgagctcggccaaaaggttgagccacgctgtctgactgtatcatgttctccagttgcaatgcaagactgaggcaatcagttgtgagctgacaattcttcctgtttgctaaaattgaaaagacaggttgttgtctatcattgctttgctttctttttgctgcaaaacatttcacacagtatcattatgccttagctagtcttcatttatctagatattagacatcttggaagctgatagggcttggttcacttcttcagccttggcttctcctcatcccccaatgttccctgtcttgcaactcatagcagagcaatgctattaaatacaacaagaaaatacatgccaaagggcaggtaggggttagatgcctgagaactctgaagaaaaagagagctactgtggccccatggtgcttttattcaagatgcccctatctcgggaggatgcaaaacacctgtgttggcagatgaagctaggtctggagttttatgcctacctacctcctccaccaggcaccaccatgcagtcagcaaactgcacgagtgcctatgactctggtaaaacttatacacatagacttaatatgatggcagagagaattaagaaacatgaggccaactttagtggggagaatgatgggaagcaaagtattgtatgcttttgtcttatgattttcttaacaggagactttgatgaaggactggtatctgccttctgattccagttaaaactgcctaccactgttctgccttcaactccctttccagaaagcccctctgtcattacttttccaaaccctcttaaggaccctctaccaagagcttagaacaggaaagggtttacgcaaagatgtgcacagtgcattactattcctaaagtaatgtgcattaaatagagaccaaaaacatttaaacattaagtaatcagttttgtctgttatctgttctatctccaatgcctagaccaatgtccgatacacagtggagctcttaatatattgattatatcgctagactttcattcactcgggaatagacaattataccaagaaggtcccttatcttcaagattccacgcatcaagtttagaaaagtcaccaaaagtttgttttctcctacgcacttcatacaccagaggtctccgcactcagaaaataccatcaccacaaatactactgtaatagtatttaagtatataatagtatattaatactattattatagtattatacatattactaaacactattatatcattattaattaaatatgcatattattagttaagtatagtagtactgattaaacttccattgcacatcatgaaatattggtccaatgacaaatattctataagccaaatattttatataaaggtgtgcagcctcctacactgtatttcagtacttgatggactacatacaaatgaaaaaaattggtggcactactgtatttaaaatctatacttttgtaattttacatgtgggttgtcctaacagtggtgtattattttataatagttgaacatatcatcctcctccaaggatctcgaagcacctgcagtaagtaaggaatagctcccttcatacctctgccaaggtaggtatgttgtaagcattatttctaccataccaagatcacacatgagtcagtggcagggctggcactactccctcatgacacttcagttcacaggtctaaccattagagtactgcctatacattaattcattcctttcttcattcataatattaatttgatgcagtttgctaggcactaaggatcaactccttatttcctactgaactcacattatatgaacattacgatttgtaaaataaataaataaagtaaaataaaataattctggtctgggcatggtggctcatgcctgtaatcccagcactttgggagtcccaggtgggaggatcgcttgagcccaggagtttgagaccagcccaggcaacatagggagcccttatctctacaaaaaataaaaaattagcgcggcgtggtggcgcacctctggtcccacctactggaaaggctgaggtgggaggatcgcctgagcctgggagatagaggccgccatgagccctgaccaccccacagcactccagcctgatcaaccaaacagacttgtctcaagagaaaaaaaaaatctgataaaaattttaaattcacaacagagatttttctgtacctggtgattaatcctaattgttttatagtaactaacatacctatcagtgagccaaatgtatactaaggaaatgactgaaatacagaattttaaagatatatgctcttacggccaggcgcagtggctcacgcctgtaatcccagcactttgggaggcggaggcgggcggatcacgaggtcaggagatcgagaccatcctggccatcgagaaaccccgtctctagtaaaaatacaaaaaaaaaaaaaaaaaaaagccgggcgtggcggcgtgcgcctgtagttccagctgctggggagactgaggcaggagaatggcatgaaccctggaggcggagcttgcagtgagccgagatcgcaccactgcactccaggctgggtgacagagcaagactccgtctcaaaaaaaaaaaaaaaagatatacgctgttacgttatagatgttattcatgtgtctgtctctaacatgaggctttttgatgcttgcccacacagctaatacttgcgttttctgtgtctaattagaagtttccgctgggtattattgttgagttggtataagatgttcaagaccatgaaaagatgaatgtaacagcttcctcatggactgatttttttttcagttcatctgtccttttaagtaatctggctgtttgtaccctgactttaactgaattcacaattattcctcttgccaaaccatgcttccagacttgactgtataaattaaatttcatgcacgcatatgtgagccgtgtgtactgcctgttaaactaagtaatataaacaaattgaaggcacatttgaatgacctttgaattccgtgttagagtagtttttaaacagttatctactgggcaaagtgtaagagacaaccatttacagaggttattttcagtgtgcttcttgaaaacccatttgctcatagaattcagcctcctaatcatgcaagttgcattttgtatggttttcttctctggctccccaccctcttagaatagttctgacgcccccaccggcgaccacctggaaggggctgatccacccccacctccctctgcgaagcgcggagcggctgcggccacccggccagagccagcgctgagctgcgctgcgctgcgtgactggctgcatttctcagccccgacggctgtggttactcaaactgatctcatcgcaggtcgtcacgacacgcgcttcccctcgcctgcacgcggcgtggcgtgagaggggccctggcagccggcgcgcccacccctgatccttcgaggcccacgatgaagcccatcctacttgcaataacggccccgttctcattcttcaaaagacggctcccagacgtcaacaaagaatctaacctacacagcgccggccctcgctcctttcagcctcagcgagcgctgcccttcattaccccccagcgcacttctggacactgcgccgggtcgccggggtcagccgcccggccacgaaagtcgcccccagcgtgccccaggcgtcagtgcacgccgggctcccggctccaggcaggcggggtgaggcagctccgcgaaggccactcgctggcgaccccttcccgggtctcctagccctggccgggctgcccccgcgcccgcccccgccctcgaaatccaggcagtgcgggaggccgccttgctgctctctccgcccgcacagggccgcccgacggagcgggcagggagcaggcgccaaggaggccgagaggggcccaggggcgaggtcgactctcagcccgctgtccccttatcccacgtttcgcagcctgaggtgtttgttgtatatcgggaactgacacttttcggcgttaaaatgagggcgtcacctgctcgaactaaagtcggtggagggcgtctggagccgggcggaatctgggatgcctcgccggattacgcggcggggtcggcacgcgaggcaggctccgggcgcaccaggaagcccgagcgtgcactaaagcggcggaagcaggcagcgggggcggggccggcgggctgcaggcacgcaggcggcgcggcggcctggggttgcgtgacctgccgggctgcggtcgcacgcacttcgtgcttcaggcggccgtcgccgggcgggaggtgcaggtgctggagggcggcgcccggcttctactttcaaaacaccgccggggagggcagtcacgctatatttctgggacagggagtgagttcaccgggggaggacacagcgtccccttgttatcacaacgtgggtaacattcggtaataaaacgcgctcggacaggatgtattaaacgaattgggaaccggagctgctctttccataagcaatcaagctggggaaactttacaaggaaagctttaaattgcgatgcatggcgcaggagtgtggttcgtgtgacatgcttacagagaaaggaaccagagcaaggacggtggctttgggacgaaatttctgtccgctctgcacaaagactaattacagagtcgtgatttggggcatgctctcattcctcccggaagctttctttgcagtgttttattttaaaatcagaggtggttgatctccctggcatacgaacatgagagacctcatttatatggtgactcaaaagccccaaggacataaaaaaggtgccacgttttaagacaccagaatctaagttccttctcaagatcatgtgagcaaaaagtgttttgcccgcacagatatctatttacataattaaaatgtttgtagatttgcagataaatcaagtttagaggacaaaacaaaaaatgttaccacgatagtttttaacacaagagcaccccagtcaactgaaagcttgggaaattccacattagtttattttctatgtacttaaactttgatttggtgaatctatgctctcttatttccctattatgactcttaggcctatagtgcctagttacacacacatttgtttttgtgatacatgtaacattataggaaaggggggattctctagggttagaatagacacaataaactcctaggaagctttctcaaaaatacatattctcatctcagcttaccatatgtgggaaaaggcagcaagattcactgtttaattttaaaatgttcta

SEQ ID NO: 10024 - DNA, 6000 bp, Homo sapiens
attacatattacgcaatagggaacctgatatgtatgcacaaaatttaaaaatctcattctaacaattaatttcaagttcaccaaactcttctaaaactgcaccctgtcctttgtaaaggcactatcaagaggcaatgaaaggaagagaccagaaaacacggacttggataatctctcccaactagacacagaattaacttgtttactgatactttcttaaagtattgcaatttattaacttataataacttatccatattgtagactgccttcaatgcaacaatataatttgtgccattgctttggcgttgaagccagaaagatagattgctgtagaagagtaccatgagaggcagggctcagtggctcatccctgtaatccccaccactttgggaggccgaggtggatcgcatgagaccaggagtttaagaccagcctaggtaactttctgatactccatctctacaaaaaattaaaaaaaattagctaggtgaggtggtgcacacacttgtagtcccagctagttgggaggttgtggccagaggatcacttgagaccaggagtttgagtctctagtgagctatgatgccatcactgcattccagcctgggcaccacagtgagaccttgtctctttaaaaaaaaaaaaaaaaagtaccatgagaacatgaacagatagttgggattacaagcacaagccaccacatccaacgtgcatgcagtcttcactttcactgttctcctgatgcagcataagaaggtataaaagttttaccttctttttgtttatacattggactacagtacctccccctctttgttctcttttgatgtaaacagaatatttttataattttcctagaagacttctaacaaagtgaaggccttttgggaatagtagcacccactaataaagagaaaccaacctatcaatcttcaaacaaatggagagaacttcttagttcaatgaatgaacacaactgtcttacaatgaggaagctaagagccaataaatttaggctggactgcctttcctttctttgcacccaacaccaatacactgggtgctgtaacttaaaatacaaaattatttaaattggaagtttggttagaatactcttataaaattctttaataaatactgttttttactttagaatacaccgacactcaaatactataataagatagagtttgacatttctaagttattttagccaatatttaacctttttgagaaaaaaatcaagagtaagtatgtcacaggcaccaatcttacagaatttgtgatacagaggaacttttaaaaattactacatccaataaaaattagcttagttgatctgtcaaccatgaactgagcaaaaaagaaaaaggcttggttcaagcagtataaaatatttgtgaaaaatgcaaatagtagtttaacaataagatctgaaagctggaggggaccttaatcattagtaacaatatgtgctacacaaataacactatacaagagtatctagacaacagcagtgcccttctgtaatagctccaactcccttctattgtattctttccttagcaatgggtttgctaaactgcaaaaccctccattaagcctttgaggggtagttttctgatttaggactggcttcctgagttctttctcttcagaatattcagagtcagaaattagacctgtatagtctggctatatagtcccaaattttctcttttcttccctgtcctgaaattaagcacataagcccatgatatgtcaaggttttattgcttgccaggaagacagatgggtgcaacaaaaataactaatggagggttataaaagttctaagaattagccatttaaatgtctcaaaactcaactggacattaagcagaatactgaatgggatgattctctttagcaaggacaagtcatgttaagtctttacgttgcataattcaataataaagaagtcaggattaaagtatttcaaagcaacttattttttatctattgtgagacagaaagagtattcagttgggaatcagaagacctggtctaaatctggttttactatcttgattgacgatcctggattaagtcacaaaacctcactggacctcagtttatctgaaaaacgagggtgttgggtgagatcagtcagctgtaggatcaccactctgctttcatgttaagactgaatttatgaaaaaggcttccaaacaaaccctactagatccttttaaactctaaaatttcttgataccaggattgtaaatcaacttctactatgcagcagcacattgttaatctatatgtagttactgtatgagtacatgtagctcacttctggttttcagtgaccagtaatgagtccaagaaggaaatgtgacaacagtcctcttgctagaaacttcgatgggacacgagaatctgaaattatactgaattacaaagaaaaagcaaattagctacttttttttttaaccctgaacttatttgtttgtatcaaacatttctccccaatgtgcaaagtataattaaagatcactgaatctattaaccatctttctaaacataaaacatcaagcaacaaatgacagaaactcagttggtattacagaccttttgcctaaaaattctacaacaggatcttttttgtaagttaaactctgaacttttcattacatttgatctttttatcacaagtgatgtattatagtttctgattatctggaatgataaaactgaggtactttctaggctagtatattttcataagtgtgttaggctgcatgaaagtagtactctaagatctctcacaaacattttatacagccatgtagaaaatttcaaggacagaaaaataaatgtcacttaattttgcagtatgcccagtagattttaataatcaatcctcaaataatagaaagtaaacagctatactctacataactcccaacctaatagtttactgaatagagggttgttaatctttcttcagcatatcaaagagtagttaacaaaaaataaaataacaatccaatctaaatccttcatcctgggtaaggagtagaatagaagggaggggctgcgtgccaaacacttttaataacttttaataaataagttgactcacctattattttcacagcaatcttaaagtttttcttttttcttgctttttttttttttgaggtaaatatgttttcttaccgatgcagacagggaggtaaaaattaacttgctcaaagttactcagccaataattggtggaggtggggtacaaacaggcagtttggctcaagttttagctctctgccactgtcacattactccacagcctctgtttaatataagatcacaactaaataagagcagctattcaaaaggtgaattatatagcccttacaacaatattaaagagcaactggaattgtaaaacaatgtgtattgaagggcataaaattgtactgtcaagtgtaaatctaaggagttctgtaagtacaaatctgacagacaatttcaatatacaatctaataaaatactgtatacccacgtcagaggaataacactaactcttgaaagattaagaacagtataattagaaacttctactgatcttaagacctagtcttatctgtctgaactcgaaatctgcctctttctaattcccttctgcaccctgttcggaactactttatttctgccaaattccaaaattccaaatttactgatcatgtgtgtctttttcacagcacttaaaaagtttacagaagaattttaacttgcatagctcaaaacatctgtattgtacgccaataaatcgataaacttaaaaaaaaaaagaagggataaaatggaagaaagaaaaaatcattctaagcaatgaaatagtaaggaacagaaaggcaatgatgaatgtaacaatttatgattatagtaacaatttactacatgtgatcaatttgagggcttatgaaggtttctcagcacatcagctgatgagacgactaataaatatcctgagtccaagatgttctacataattaatcctcttggcaaagaacaagaaccagggaaaatcgcaaggaagaaatgcacaaatgacacgcatgtggaattagggggagatgttatgtacgttactacgaggatgacacactggcatgtgaaaggtttctgggctccaccagctcgttgcagcaccaacgaggttgtggttgtttacaccacgtcgcccggaaaaaagccggcaagcttcaagtggactattaagttaataatattgaagggaaagaagggcaacgcaactgaacatctggatgagcagatccctgcctaggccccgaggcagctgaccaagtccagatcattcccccttacggtctatgcgcacaaagaaccagctgctttaggtcagtccgccgcctcctgctacccctattaccgtggccttaatttcaggccagctaaggccagaggatggggtgaagggaggggaggagccccgggaagggtcagcgtctgcgccccaggggaggctgaccttccagctcaggcccgggacagcgcgaccacaggaactccaggcccacagccgcgcctccgcagccggattctgagcgcggcgcctccttccttcccctgctgctccaccaccacctccgtctctgtctccgccgtcgccaacaccgccccccctcaggcccctcacaacgcgcagcctgcagccagctgcctcgcggcggaaccccaccccaccccaccccacctcgcccttgctttcgctcgcccttttagggggctttccccgccccttccactatccagcgcgccgaagccccctgcccagagctcggctttgctacctggatccgcttcttgtgtctcctgcgttccgccatgttggccgctccgcccggttccctctgacgtggagcgaggagggggcggtggaaacctcgcgagaacgcgccccgaggcccgttatgtaatccgccggctggcgcccctggaatggggaggtcggccgcctggcggggccagcggtccttagcggtgccttctctcccctcttccctccgctcctgctgtgcgggaactggagaatcgttaggacgtggaggaagcagagaagtggatcagagaacaggagggctgggaagagtcctggtttctcaatcctgactgagcatctgaatcacctgagaagctactaaaatgcagattccccgaccccatccccttagagtcagagtctgtgcatttagggtgcggcctttctcagagggatcgactgagacctactgaaccctagaagtctttacctgaggcagttcctgcaatgtactgtatatttcatgacattccatgtaaaagatgacaagaccgagaccgttgagtgacagagataagaactgacttatctaaggctccacaggtggtagatggcagagccgagacctgagccaattatcttttctcctgcactgtgcggggtaatacagctcgtttaaaacaagctggagtctccattccgttttccgcgttgcttctcacaactcactgttagaatccagaagtaagagaacccggggaagcgtaaggaagatgaataggacaaagattctaagaaggtgggaaggaagaaggctgcagtctatttcaagtctggtgaatttcaatcactgtagcctttattgttattttagagccacctagaccaaaagagaaggagctcaaattgctggtaagtgcttagatagaaattcccttgactgactttatagagatctttaaagcgtttttaattgtagaaaattgggaaaattcagaatagaaagatgttcttttttttttgatgctgagtttcgctctatattgcccaagctggagtgcagtggcgcagtctcggctcactgcatcaccgaactcctcgtctcaactgatctccctcctcagcctcctgagtagctggaactacaggcatgagccaccacacctg

SEQ ID NO: 10025 - DNA, 6000 bp, Homo sapiens
acataccccccaccatcaccacagcaacctcccccccgccgccacgccaacaaactccaagatgggacctacactcacaactgttggagggaagagcctggagtaggcaggaggcagatacatagtctctatgcctactagatgcgaatgagcatatactgagtatttagaatgtgaaggactaattccaacaaggaatgctgtctgggaggaagacaggatggaaagagggcatgtgtgtatgttgggggatggcagggcagaaactttctatagatcctggactcgctttgtggagccctgagtgacccatgctgtcttggctactcctttactccctctgctgcaggaaattgggaagagatggaaatgcagaaaacgagaggggaccagaaaggaagaggtgttgacctgaaaaagcagcaaccccagccccagcgctgggccagcaggaggttgatactgaggaagagcagcaccatggccactgggtcattgaagagccgcagcacaaagatggagtggacacggtaagaggcgcagcacatgaagaaaaagacgaagggaggtacctaaagggaaaacacagtaaggtacaaggtcagctcagcaagcctgagccatccccaccacccagccctcccaggctggggccctctagccctggtagcatggactcaccttgcaggtctggtgatagatcaagaagacaagcagcaaggtagccaggtagagcacagcaaagatgttctgggccatgcggatgtcagtgcctcggctggtggcatagtacaaccccataaagatgtacacgaaaccagctgggtacctggaagatgagagaaaatgtgagcctgggtcaggtcacacagactagtacctaaccagcccctcacatcctccctgaacttcctgtccccactcacacaagtggtccggtgtcaccctgcagttgggtatagtcataggtaccattgatgacgccttctacctcggccatgtaggccttccagtcaatctctgtgtctggaagaagacaagatgatctggttacttctgagtctagaacttgtctgccaccctccccatgcctccagaccatcaaaacacagactttcagccaattcccagggctttactacctcttaatctaactctttatctgacattctctgggtgagcccaggcatctcaaactcaacatttctataagtgaatttgtgatctttcttcccattccaatctactccttttcctgggttccgcaaatggcaccaccgacctcttagctaccaggtcacgaacctgagtaacatctttgatactccctcctctctcatttgcaacccttcgtcaacaagttctgcctgttcctcaccgtaaatatctctatctcatccttctctgctactacatactcaaatttgagcctaaagtaatctctagccccaatgagtatacaatagcctgctaattaggctcctgacttctactttcaccctgctacaatatattttccacctcgtacaccaaagagctcctcctaaaatacaaatcataacaggcctctgcttaaaacctctcaatgattccccaagacccttaagataaagaaaactctgtattattcccattttttgaaggggagcctaagaattaattaggttaagtgactggcttaagataattgagctaggatggtggagttgggattgaagcttgcagggtcccaagttcttaattatcatgctatcttcttaacaaagctttcaaattccttcatgatctggcctcagtttctgcattcccatctcttactactcccttcacttgatttctacactctagctctaaaaaaatcatttcagttcctcaaaggaaccaggctgtcttcttttttttttttttttgacagagtctcactctgtcacccagactggagtgcagtggtacgatctcagctcactgcaacctccgcctcccgggttcaagtgattctcctgcctcagtctcccgagtagctgggactacaggtgtgtgccaccatgcttggctaattttttaagttttgtatttttagtagagatggggtttcaccgtgttggccaggctggtttgtttgtttgtttttcttttgagacagggtctcgctcagccacccaggctggagtgcagtggtgcgatctcagctcactgcaaccaccatctccccggttcgagccattttcccatctcagcctcccaagtagctgggattacaggcacttgccatcatgcccagctaatttttctattttagtagagacagggtgtcaacatattggccaggctggtgttgaactcctgacctcaggtgatctgcccgcctcgggctcccaaagtgctagaattacaggcataagccaccgtgcccagccaggctggtctttaactcctgcccccaagtgatccgcccacctcagcctcccaaagtgctgggattacaggcatgagccaccgtgcccagtctaactgaattttttttttttttgacacggagcttgctctgtcacccaggctggagtacagtggcgcaatctcggctcactgcaacctccacctcccgggttcaagcaattctcctgtctcaacctcccgagtagctgggattacaggcatatgccaccacgcccagctaatttttgtatttttagtagagacaggatttcatcatgttggccaggctggtctcaaattcctgacctcaggagatccacccgcctaggcctaccaaagtgctgggattacaggcgtgtgccgctgcgcccagcctagctggagatttttaatagaggatcctctgtccacagcactccttcccctcacctttttcttctttccttaaatagctaattcctaccttccaagggtggctctatgaagcctttgctgactcctccaacctggtttaagtgacttcctatgccctttatggtatcctgtgttactactaccatgattatgatgcattataattgcctgctaacttactgtccaggcccgagttagaaatgcatcctttttctttttttttttttgagacggagtcttgctctgtcgcccaggctggagtgcagtggcgtgatctcggctcactgaaagctctgcctcccgggttcacgccattctcctgcctcagcctcccgagtagctgggactacaggcgcccgccaccatgcccggctaaattcttttttttttttttttttcagtagagacggggtttcaccgtgttagccaggatggcctcgatctcctgacctcgtgatccgcccgcctcggcctcccaaagtgctgggattacaggcgtgagccaccgcgcccggcagaaatgcatctcttattcaccactgtacctctctctggtaaccagcataatgctaggcatataataagcactaaataaatatttgttgaattaagagtctttagcaagaaagccaagtgccttaagcctagagtatagtttcagcctggaaaggagtagccaataatgcctaatggactcaagtggtcacaagatgccatcattgagaagggacgttcaaagatcacagaactgaacacatggaaaaagctgagatccaggaggagacctgaggtgtccaaagccacagagaaaagcagcagcagcagcagtacaacaattttggctcaaatctgacttctaagctggtttgcaggctgtaagttcagtgcagaaggccaatctctagggtatccacctctgccatgcgggcagattaagatccggttttctgtagagcaggcttggcgctcaggtaagggatatggatgggttcgcaattgacgagtgagtggatacagagtctggtttggagttccaggtctgagatccagtttgggtcgcgggttcaggtctccctccctcccctcccctccccctcggcgcactcacatgccaccctgtgaatgacccagaaggtgatgcccacctccgccaggcagaggcaggcggccaccagcagcgtgtagcgcggctcccgcagcagcaggcgccgctcttgccaggcgcgctgcagccattgcttgcagagtccctctgcctgggccgcggaaccggaccggccgcgtttccgcagcccagccgccatcttaacggtgcgccgcttgtgtgggcccaccacccccggaaacccgaaccttcgacacttaggttccgcttcccgtgcctggcgtcccaccaggctaagcgccgatccgagtagccagtcttcatttactccactaaaatgtaatttttctgcatttgtctcctctgatgcactccacgctccataggagcagggacaatgtcttactcctcagtttatacccagccctgggtacacaggcgctaatttagaacgaatgtccagaaaagcaacattcctgcctacctcccccacaaccgctgaagccagcattctccttcgcctgcgctgggaacatctgtgttcatgctgtctctccaggagggcaaagcccctgttcgcgcccctcctgcctgcccttcgagccttccggatgctgagaaaaatgaacctttcactaattttcagatttcctgataaaagtcattcatattgaaaatatgagaggacgcagtgatgagcccacgtgagtctgacaccttgagtgcggccctaggaaatgacttggcagtacagccggaggattcagggtctggacgatagttttcccagccggaggattcttcgaagagcgcttagtaaaggacggaagttccacgtgtttgtgttgagcaactgcaggtggtgggcggagacaccagcgccccgccttctgcatcctgccttccgtattggctgaagggccggcggctctggctgcccggcggttgagagcatggcctctccaggggcaggtagggcgcctccggagttaccggagcggaactgcgggtaccgcgaagtcgagtactgggatcagcgctaccaaggcgcagccgattctgccccctacgattggttcggggacttctcctccttccgtgccctcctagagccggagctgcggcccgaggaccgtatccttgtgctaggtgggtaatcccggcgcggccccgccaggtagagctggcaggaccggcgccgcatgggcttggcctggtccgctttcctcccgcctgtctatccctcttggaggacgcctgcgttgggacgcgagatccagctccttcagagtcccggctgtatttagtcaaggctaacaggagtaagagattgttggtcccggggccctctggagaaagacagtccctcagagtttgagcgttgggggtacccaagaccctgtccggaccctcgggaggcaggcagccttggggaccggattgctcagaggaccgagatcaagtcctagcgctaattgacttgtaaaacttaggacaagtcatgaacccgttctgagctttagattcagttctagaaatggtactgcgagttcacatcggaggcggcacgcgcaggcacctcgagaataatgcccagcgcttttctttttgcccctgggcactgggagccagagtcacctagagagagtcctgtctgaaacttggtcctatgccttagagagtgagaacagcaccctctaggggtggaggggagattgccgcccagggtgatacgattccccaaagggagacgtgctggaggaaaggtagggctctggggtgttcggctgacctcttgaggttctctcctagtgtcagccttggaggcgctagtaaagtttgaatgagcaacagattttcttccaattgtcgtttttactttgctctttgtaaaagcctttgtatgtttaagtgaagtctttaataaataaaaaaggtatatgtaatatatatgtaaggtataaataacaaatctaatgtgtgtgtctattccactcagtttgagaaatagaacattactagggatagaaaaaaaagtataattt

SEQ ID NO: 10026 - DNA, 6000 bp, Homo sapiens
ttacagctttggtttaatacctgttaaaaaaaattttttttttttttgagacattgtctcatcttgctctgtcacccaggctggagtacagtggcgtgatctcggctcactgaaacctctgcctcctgggttcaagagattctcctgcctcagcccgcagagtagctgggactacaggcgtgcaccaccaccccagctaatttttgtatttttagtagagatggggtttcgccatgctggccagccttgtctcgaactcctgacctcacgtgatccacctgtctcagcctcccaaagtgctgggattacaggcttgagccaccatacctggtgcaaatggaaattttcttttttttgagacatagtcttgctctgccgcctaggctggagtacagtggcatgatctcggctcactgcaacatctgcctcccagttcaagcgattctcctgcctcagcctcccgagtagctgggattacaggcgcgtcccaccatgctcgggttattttttgtatttctagtagagacggggtttcaccttgttagccaggatggtctcaatctcctgacctcgtgatctgcctgcctcagcctcccaaaagtgctagaattacaggtgtgagccaccgtgccctgctgctaatggacatttatagtatatttattaaaatgttttatatcgctgggtatgcctatacccagtggctcatgcctataatcccaatattgtggaaggccgagatggaaggatcacttgagctcaggagtttgagaccggcctgggcaacggaggagaccccatctttgcaaaaaatttaaagattagctgagcgtggtggcacacgcttataatcccagctactcgagaggctgaggtgggaggatccttgagcctgagatgttgaggctgcagtaagccttgactgtgccagtgctctccagcctgggtgacacagcaagacttgtcacttaaaaaaaaaaaaagaaaaaaaaagttttacaactaaaacacacctttttcttggacttaggctggttcagcatgtacagcattttgctcaagtcaaatgatgacctgatgagactgagccactccatgtcagagctggtataatccaactacctcacttaagggatgcagcaattatgagcagagacattttctctagagcagtggttggttcttcatgggggtgttactgccctgtagggggcgtaatggtaatctgtggaattttttttttttttttgagacagagcctccttctgtggcccaggctgaagtgcagtgcagccatctcggctctctgtaacctctactccttaggttcatgtgattctcctgcctcaggctccctagtagctgggattacaggcacatgccaccgtgtctggttaatttttgtatttttagcagagatggggtttcaccatgttggccaggctggtcttgaacccctgactttaagagatctgcccacctcagcctccctaagtgctgggattacaagcatgtgctactgtgtccggctgttacattccttcttaaggaagcgttcttggctgggtgcaatggctcacaccctgtctctactaaaatacaaaaattagccaggcatgctggcgcatgccgctaatcgcagccactcgagaggttgaggcaggagaatcacttcagctggggaggcagaggttgcagtgagccaagattgcgccactgcactccagcctgggcaagagtgagactctggtctccaaaaaaaaaaaggttcttgtaaacagactacactaactgtgaatttcattttgtggttacaaaagagagctttggatctgatataattcagaaccattgctctaatagtgaaccatgggcagaaaatcatggcagagaatctacgacagcaggaatcatggttgaagagggtttaacctgggagtgagactgatctgagttcaagtacaggcacaatatttccctactttgggaagactacttaacttttccaggctccctggaattgtaaaaatgggttaaggagtatctgcttcagtgctaatgtaaggctaaaataagaaattttacaggtgccagaaaatgctaaatgtctgagctttccccacttcgcacttttctacagcccttctttctgtggtaaatacacttttttttttttttttaaatgagatggagtctcgctctgtcgccaggctggagtgcagtggcatgatctcggctcaccgcaacctctgcctcccggattcaagcgattctcctgcctcagcctcccgagtagctgggactacaggcacgtgccatcacgcccagctaatttttgtatttttagtagagatggggtttcaccatgttggccaggatggtctcaatctcttgacctcatgatctgcctgcctcggcctctcaaagtgttgggattacaggcgtaagccaccacacccggccagtaagttgacttcttttctgtttttttgagacagagtcttgctctgtcacccaggttgaagtgcagtggcgcgatcttggctcactgcaagctccgcctcctgggttcaagcaattccactgcctcagcctcccgagtagctgggactacaggcgcccagcataccacgctcagctaattttttgtatttttagtagagacggggtttcaccatgttagccaggatggtctcgatctcctgacctcgtgatccgtccgcctcggcctcccaaagtgctgggagtacaggcatgagccaccatgcccggccagtaagctgacttcttaaggttcgctccagggtggggtgctggctctggtcagttctgaaactaatgctacagaaagataaagtgatcgctgtagtatagtggaaaaagcccaatacccagaaggcttggtgtgaagtcctaaatgtcaccctgtgtgacgctgtaacgcacctggcactcttctcaacgaacgggtgggatggaacttgttaaagcctctgtttctataaaatgagacaatatgtacctcatagagttgctttgaagttttaaataagttaatgaatgtaagtacttcacatagtacctgatatagagtaaatggttattattcttcttggcataattgggaagaactaactgaaaatgttacagtagtgcttcctaaacttcagtcactctcatgccatgttagaatttttgtccaacgcttgtatcattacatatttaatactttttatatatcaacttttttcccatctatatgattttaaaggaatctttaaattaccagcaaatggaaatccagtattgtcacaaaaaagaaagtaacttaagtacagtagaaacaaaacaacattattaaattttaactagacactgttacctgtgaaaagttcttagcctgaggcttactctctttattaaaacgagaaattaatgtgagagagaggtgctaaagatatagtagcacttacctgagatgatttctgaaagtaatcagaactgactgaaaattgcttgtttttctaagagacaaggtctcgttatgttgcccaggctggtctcccacaatcctcctgcctcagcatcccaagttgctgggagaaaactattactttaatatgaggggctacatgtctagataaccacctataatcatctcaaattcctttatctgtatataaatattgcaacgaggggctggttgccatggctcacacctgtaatcccagcactttgggaggccaaggcaggtggatcacctgaggtcgagttcgagaacagcctggccaagatggtgaaaccctgtctctactaaaaatacaaaaattagtcaggtgtggtggtgcgggcctgtaatcccagctactcggggggctgaggcaagagaatcgcttgaacccgggaggcgtagactgcagtgagctgagatgacgccaccgcactccagcctgggcaacgagagcgaaactccgtctcaaaaataagcaaataaatagataaataaataaatactgcaatgaaatatgtgaggaagttgcctccactctagtggggggaaataattacaattccttacatctctaatggcagttttacagactgcaaagcgctttggtacttggcatctcagctgacagtcccaccaggcccgacgcctggaacagtaatttggtagaatgcagattatcacactcacttgactggatgttacaaagactaaacgctgtaacgcacctggcactcttctcaacggaagggtgggatggaatagttcataggtaaacccaccgagggtcggcgactaacctaaaggattaacagtactgtttttttcaacactcaatacgtcctagatcctgtgctaagggacttacagacatcacctaatttgattcctacctgtctatgaagcaggtactgttatcatccccatttcacagaggacaaaagtgaaacacagaggtaacgggtaaggtcaccctgtcagagggggcgcgacgtgaacctaggcaaattgacacaactcctgcacttttttgcccaaggtcacggcggtgtgaggtaggctggagaagggagggcgctgacctgtcagatacttgttcctgggtgagcttcttgtcgctctgcagcaggatggacacgtagtggcggatcatgcctacgaagaaagtgatgataacgatgggtaggaccacccagaggcggatgttggagtcgagcaacagttctggccctgccatcttcactgaaagctggttcccagtctggaatgggcgagcttctcttctccggggcacagttgcttctcttcggcttcgcctccgggccttctcaagcccctttgcccgtgtaccccagaactctcctgcgactgtgagccgagcttactgccttcagctgggctgcctggtcttccacttccggcgcgaacgttgacgtcacgtcgtggcgcacctcagtggcgtcagagcggcgtcgggcctggcgggaaagtggaaaactatcggcggtggcccaggctcggtggctcactcctggaatcccagcactttgggaggccaaggtggggggatcacgaggtcaggggatcgagaccatcctggctaacaggtgaaaccctgtctctactaaaaatacaaaaaaattagccaggcgtggtggaggcgcctgtagtcgcagctactcgggaggctgaggcaggagaatggcgtgaacccaggaggcggagcctgcagtgagccgagattgctgcactgcactccagcctgggcgacagaggaagactccgtctcaaaaaaaaaaaaaaaaaaagaaagaaaactacaggcggggacggcttctcggtgagtaaatggagcagtggtcgtagtctctcgaggccccgctcccctgcgacctaatctcttaagtccgggccgcggtcggcgttcttctctggggctccgcgccccaagcctcggcttcctcatctgccctgagatgggatagtccccacaggtacctttctgcgtcgttaaaatgaggaaatgagaaaggcttttaccctcacccccttcccgatgaactagtccaggcagtcggcctcatctcacgtctgttgggcttctcgggaagccaaatggtatcgcacgtgttaaaggcgggtgtctggaagccgaaagtcctgactaactgagaatgttgactaatccggatagcattgagaagaggaaatggagctattcaacagattcattgatctatataagctgctataagttacatttactctttctgtgtagtacctcacagaattctgaaattttggatatgacattctacgacattgcatttagctattctcacaactctatttttcaaaatgtccaacgtttaaaattttttcttcctcagtctttcaggagattgtcatggttgagagactggactgtacctacccactatgaatgagcagaacaccatagctaatattaactttctgcaggtaatctctga

SEQ ID NO: 10027 - DNA, 6000 bp, Homo sapiens
gaagcatttaaataaaagcccttagtttactgctcccgaatataaatccaacatctttaggtgtagaaaaattagaaactgtgcaattaatagactaggaagtcaaatatcattgccagtaactaactgctgtctgaatttcaagggaacttattgtatattaaattttaagaaagtgaactcacctaccctctcacctcagcactttctcaattttcccattacaattaacaatataacttagcagtcaagtcttccaggccagtaacatcagaatttatttttaactcttgactccttcacaaatattccacttcagtccagtatgaagttctgccagttcttcattcacactgtctctcaaacctgttcctttcaccccactttcacattttactttattccctcatgattcacaacataccctactagctccctaaaaaggctctagcatctctctactataattcactaattcaactgcaaaaatcatcttacgtcttattcagcaaccaacaataaatccagatctcttctgaatctcaatcaaacttgtacagaacccctctgccctccatcagctaactttctcttatttctcaaattccatctgttcttatgttcttatttaggcccctttaattcagatttgtcaacttgattattgtctctcatgcaaaactcaccatcattgttccttggtacactccttccacctagacctttcatgcttttctaccagttcaagttaccacctcctttaacatcagtcctaatacaccttgtccgcaggaagtctttcctctcccaaccatcagtctcacccctttactctttgccactctgaacaaatgattcaatttgtattttacaatcttgcagtcatcacgctattgttttaatttttttttccccatagcctccctctacaactaaaggataagcttttgagagcaaggactacaatttcttatgtctgttttcaacaggggttccttagaatgctagcatcctaacaaatgcttaaagactcccctttcttttaaatgcttttaaagtcaaagctgtcaaaaacacataattaacactaaactccaacttttaaaattctaaattgacctatatggtaatcggaattaaacattttcatctatatattttacaagagttactccatccttagttagtatctgtattaccaagaattcaagagtcattttcaaagaaaatcctgaaaagaaaatgaaaagtcccaaaatgtagcattataatctagcattacagatctctgaaataaagctaataaatcaattagctgaaatagactgactgattttcaaactatattaccaagatgtaaaacatacaaacactccagtaccacaagaggctcttaagtagctattataagatttgtatcatcatagctgaaaattaccccggaattttaaaatatttttcaaatcactccatgaagtgcttagaaagcacgacccttccctgaaagatgcataatcagctttcctctttacctacccgggcattctctacttgcaagccacaagaaaaaaaaaaaattaactttcaaaaattatctcccattcagctattacctagactaccctgtttcaggctagttcccaaagccaacatgaattgaaatcttgagttcaactaaaagtgatcattttatgttgcctaagaatataatcaatttcacataacatcatgttttgcgtgtgtgtgggttcttaaaatctcagttctttagttctctcagttcttctaggcaacaaattaatttgtctttgccctcatgatgcccctctttcccacaataaggaaacaatatagatatttttgttaaattctgcaagtatgtttaaacaagctatcattaaataccacatgaacttctccataaatagagatacactggaacattagatacttagtatatattaaacacttcaagagcatacttttcagcacaaacccaggacaagagtagtctatccacaaccctgaacacagcccaaatatccctattatttctaggaccatagccatctgcaaaagccaaaatggaaaggactaaatccacattcttctaactaaatccacagttatctaaatatgatggaaactaacgctagagtgttttaaatcgtcctttttaaggaacccgccagaacatttaacaggtaatgaatgcagtagcactccaaaattgaacttaaatgtaatgagccagtgacaacatttaacttagtatttggcactatgacaaaacaaatctcaatcaaaacttggacctattaatacttccaagttaacttttgattaaacataaattatacggtggcaggttggtaatgtcaaaacaggaaggttaagagataacacatcaaaccacttatccaattgaacacaaatgcatacagagatgttactgctgctaggtatttattggctcccactagtcccttctaaagagagaaatcaatggcagcctccaaatgtgaatggttactgaggaagttcatccacagattaagaacaaatattatgtgtagtcatacaaacaagaaaaaaatgttgggagggtgggacatttaacgtctctattaagtatatcaaactatgataacccctgagacctaaaatattctctcattccaaattccaaaaattctgcaaatgtgcataatggtttagtaatcaaatcttgtccttctctttattctaaaggatgggcaagtaaacactgtcatcactactttaacgtggaaacactcgagcacttgatgaaactgactaccaacagcaagaaaagtacaagaaagcagtttgaaatcgaatcatccaaataaatatcatattatctcaattcaaggttaatgagaccgggggagggggtatgggaggagtaaaaagggagctgcttcatccttgactgaagataggttttgcccttttccattgcctgtttatcaggaggtctaataatttcagatcctggtatttcgaggtttcttattttaagggcgaggtggaaaaggggtgtaaaataaaaccaatactcactgctaactttcatgctgccaaaagctgaaggctgctgcaccggcttgcagctctccgcaaaggaggtggttctgggccgccctgacatgatcactctcttcgcgaatcaccttttccttccttcctccttttcttccttttgtctttatgttggggtgttaggttaacgataaatgcagcattaagttctcccacagaagaaaaagaaaaagacttcgtcctcttggcttttcactccttttgtatactataaaaaacaaaacaagcgatatatttctccttcaagacagatcggcacggatatttaacatatagatgatttaggacttgggaaaaaatacaattctttcccctccctttcctgggaggagagaaaagagagggcaaatcctaaaaaaatatgtatcacgtgaaacgggggcaaatacttgattgaaaatgagtacttcgaatattatattttcctcggggattttttttccgagtcaatgaagaagggaagcggcggaaggatcacgagtctcacgcttgaagagaaagggggatgggtaggagggagggagagggagggagggggtggctcggagatgcgacgggaaacgctgcagctccggcaagccgcgggatccggcgggctgacggcaggggcccggcgaactagagggcggcggagtcgcgagtcagtcagaggcgggcggtggcggtggcggcggctcctctcctcattgcgccaggagcagctgcaggcggcggctggatccagcggccatggcggtggcggaggcagctcccttcagaccccaggcagcggctcctcgactgttccccattcgccggggacatgggaacccggcaaccgcttccgtccctcggggccccctcccccgtccgcggcaacagctcggccgccctcccgcccctcggctctgctcggtgcccgctcaggaagtgtccgcgctttgccccagcccagagccctgtcagcggctgcggggccggctcctcctcgcttccttccttcctttgtcacttggcccgggcggcggcggcggcggcggcggcacaagcccgcattcgcccgggtcaggagctgctctgtgtgaggagcgctgtctgcgcagccgccttgcacttccccactcctcctcccccctcctactcgtcctccacctccttcctcccccacccagccttacaccgcccagcgccccgccgcccgcgtaacaggcgtctgggaatcgccggccgagccccacgctcgcccgcttcggctgggagccgaagcccgaacggagccaatcacggacgtcgtttgtttgcggctcctcccggaaaaagccgatcagcctgagaaaccaattagaaagtgacgctgggaagccacgcccaaagagcggaaaatgccgaaggtagccgaacggaaagggtgaattcgccttgttcggtggctggctggaggagacattcgacaatggcaacagtggccaatcagagtcgccggcccttacgaagaggcttgaagagttgaggacggtgaaacccagagacgctggtgaaactgcacggctgggcgccgccgccgctttgtgattggctggaaaactccgctgggagcgtacctccttcggtgattggtgaagagaagggggcttccgaggacagtctggccagtcaggacttcccctccctctccaaggtggggagaagaaagcgaagggagggcgtctataaagcgctgtctcattggcctgaagcttaggcgctggagttggggcaaaagggagagggagggagcccgaaactcgcggcggcggccaatcggctctcactgccgtccaatcgcaagacctagctgcagtgtgattggccttcggccccggtcccaggagcggggagatgcctgactcgggtcgtggctgacgacccgacggttcgcctgcggccgcctccaacaacggtggaaaccgcacacagggaccgcgggccctcggtgcagcaaatcggaaagtgctgcggtcggcggccctgggctctgagcgctcaagcgagcagaggggtggaggggctctccccacccacaggaggctctcggcggggcgcagccaattctgcgcgcccaaggctcccctctgccgtggatcgcgtgtgccgagtgttggcctcttccccgaaagggccagacggaccaagggggccttcccagccggctgcaagctctcagacgctaaaatgggaacaaagcttccagaaaggcagcgcctttgggcggccgcgccccgcccagccgcgggggccattgatacagaggcttgctgcgcttggtgtgcgcggcccggccgggcctctggaaacgcccatgagaaatgagctcatgctggatgcgcgcgctccttgggcgcaactgcccagcgcaaaacgggccccgaaagcaggtgaggggaaatgccgtcaggccggatatcctgaagcctccgaggaaatgggggggtcagaggagcccgtggtagctttggatcttttggaactagggtgatctataaaagtgcagcttgagaagatttcatacataagaccagcgtccattgttctaccatagaaccagttcctttggtctgctttagaacagtgaggtatggctacgtcaagataacagagaaagtagaacagacagttgccatcctgattgtaatccagtggtgcctgtaatttctacctgcagagtcatctctttctgttaagatgctgtctccagaaagcacatgttaaaggacctatatttgatcagattacctggctcttgctttgaaacactgatgaaggacttgggacagaacaaagtaagctttgatggaagacaggaaaggtctagatagtgtttgcagattcaaatggctacagaggccagacaagtaa

SEQ ID NO: 10028 - DNA, 6000 bp, Homo sapiens
tattttctgatatcaaaccctaaacagacaatatttgtctatttattcattcctttaaaaactgtagctattgctcaggtggagaaaggacagttagggcatcaggattctgccaggtttccatcagtgaaagcaaatgcttctggttgcgaaatccaccgaggatgccaatttagaggtgctattcaaatgtacagcagtttatccaaccacagataagaaattacaattactgatcaattaattacatttagatagtctaataataactctaaggaccagactattaaaagaagacaaaagtagtctttcaatatttactggtcaccaacagttaagatataaatttccagtttaaaaaaatcacaaagaccttcctattgttgctttaccaaagaacaatctagtaattcaaagattacaggtgtaggcctacatattccacaagatggacaatggtaagtgcaaatgttttgccttattttatttggggccaaaaataaatcattttaaagcagtttaagttacacaaagagtccaatcttaaattctaatttttaacagcagtcaggtgaataaaaagttatttgtggtcaggggcagtggctcatgcctgtaatcccagcactttgggaggccaaggcgggtgaatcacgaggtcaggagtttgagaccagcctggcgaacatggtgaaaccctgtctctactaaaaatacaaaaattagccaggcgtggtggtgcgtgcctgtaatcccagctacttgggaggctgaggcaggacaatctcttgagcccaggaggcagaggttgcagtgagccgagacctcgccattgcactccagcctgggtgacagagtgagactccgtatcaaaaaaaaaaagttatttgtaaaactaaaaaactctgaaatatcatgaaattaaaaaatcatcagtgttgatccagacaacgtggaaaagaggaattaggacatctaaaatgtgaaaaggagatggctaggttttatcaaataccaatggtacagatcccctgggatgaggtggggtggctgaaaccacaatgaaatgttaaaatctagtttcagccggtgaggtggctcgtgcctgtaattcctagcactttgggaggccgaggtgggtggatcacctgaggtcaggggtttgagaccagcctggccaaccaggcaaaaccttgtctctactaaaaatacaaaaattagccaggcatggtggcgcatgcctgtaatcccagctactcaggaggctgaggcaggagaactgcttgaactcaggaggcagaggttgcagtgagccaagatcgtgccactgcactccagcctgggtgacagggttagacgctgtctcaaaaaaaaaaaaaaaaaaaaatttagtttcatgtatagaaactatctttatttttaatgtttacagaactgagaactttttggatcttttattttacctactattcttccatgattaaaactaaattaacaaacgaaatagaaaatgactggagaatttcagacatccaaaattgatgtaagacaagtgataattaattcaaataatcctcttgataactacttttaatagcagcagtgagctattataaatgatcataatgagaatcatcaatttttagtactgaaagaaacagaagagatctaatattttaatcctcttattctacagggatgacgctaaggtcaaggagacaaaatgactttcccaaagtgacaatgctggagagcccactataaagcttacaaatcctagttctaacacagtccataagttcttctactatccagtcataaaccttttagaaaataggtaatgcttcactctcccataggaaagatcatatggctttctcatggcctagcacaatgcctcacacactgcagatactagtttgttcattcctacaccaaaacttcctttaaagctaatttgacatcctagtaaaaatatcttcgcccgggcgcggtggctcacgcctgtaatcccagcactttgggaggccaagatgggcagatcacctgaggtcaggagttcaagaccagcctggccaacacagtgaaaccccgtctctactaaaaatacaaaaattagcggggcatggtggcgcgcgcctgtagtcccagctattccggaggctgaggcagaactgcttgaacccaggaggcggaggtggtggtgagctgagatcgcaccactgcactccagcctgggcaacaaagtgagactccatctcaaaaaaaaaaaaaaaattcaacctgaatagtataatatggaaatgacttgcatacatatttaagtgtatacacttggatacaattagaagttacttgaccaactgtatatacttatgtataaaactgggagatatttgaccaaacgtttctctgacctcgacttactctggtactaccattgaacaactccagacccagagaaaatccaccacacccaatcccagtattgtcaaatgcagccagactaattctctgcacagctgtcagataccaaaaggatttaacagtcagttcaccaaaaccatacaaagcagttcactaaataatccaatgcttggcctcacatcagagaaactgtatcatgcatattaggcttggtcatgtacatttccaggtgaaatggaaaaactgaatttaagatgcttccaatcaaaaagtttaagaagtcactcccattttttttttttttttttttgtatgtgtgtgtaggcctggacctggggcagggggctgtgtgcaaccaagcctggtgagcattgctgtggccgctactcttgtgcagcaagaggggacagtgcagtgcagagcgttttctgacaaaggccaaggggtccggagtgcaaaaggacaccttggggctggggcatggcaggagaggttacgggcgctgagtgcttgcagccaagggggcttcggggttgctgagagaggacgagccttgggagcttgacagttctgcttacagttcagaggctgtaaaacaaatgccactgaacaccatttcactctttagaacctgtgtagtctttctttttctatgtagaaagccatctaatcgtttttgtttttgttttgcttttgtcaactaaccgtcactgtagttgcccacttacccccagcaaaaacacactccaaaagggggagtggctcattattaaaaggctcttagcgattaggttgtaggctttggaaatcacagaaacagttcgtatcacgatgtaccaattgttaatcgaatttagcttccttcacttattaaatacaatcatcacatttgcaaatgccccactcccatctacaacactagggataaatgctgtgtcactgagaagaaaagcaaaggatttttctgaaaccaaaagcaaactgtcaaagaatgccagtaacctgtcatcgagctactctatgccctccactggcagccagaaatgagtctccctaaacccaagtgttgtgctgccgcttggcagcttccgtctgatgggaagccccctcactgacacaacccgccaaggaaaagctgcacgagccagtttcctcctctacggcctggggctgcttctcaccatgtccaagtgagcaccgggaccttcagggtgtccgctgcccggggccggactggccctgccctccggggtcttccgttcgctgttgcgcttcaggccgctggcgtcgccccggcctctggcctcccggcgccgttgctgccgactccacaggtatatggcacccgcgcccagcagcaggggtgccccgaccgccagagccagctgccatcgcggcagcccccccgtgcccgggcccgcagtcccgccgccgcccaccccactcccggagctcggtacagcggctgcgaccaccgctgcctccacaggtttagaggcggccatgacaagtgtcctctgccaccgcctccctgtctgtcgcgagcgccacaatcaccaaacagcgtgcgaaggaagaccgagggagggaaggaaagcaatgagcgagcgagcacgctaggcagagagagcggacgacagaaaagggccagaggtcaccggaagcccagggcatgccgggccagacctggccgtccttctcctccagtatcaaccgaagagggagaggaggggcggaaatcacttccgggttaagggaaagcgtgggtgtgagtaggagtcttcggaaaccctttttctttcttttcgccccgctgctgttcgggagatggacttctggagtccccgtcgtagctggtgttgtcccctctaccttcaggaaagaagggcagatggccctcttgcctactgaagccgaggaggggcgcgtatacagcgggctaagggcgctcaagagatccgagtggaagaaaaagcagcggcacagcactggaatgggcgggagtggcagaagagttgtgaaggctattggctagcaagggtggtgggcggggcgtagaccgagctacccagtttactggtcgatttcggatccagttttccagttatagccacgttggcacctcttgaacctctgtggccgttagcacggttttctgcccgcgtgcccgagaaaccaacggattagaaggacttttaaagatgtgtgaggaaagagctcaccgctgaagaaggctgctgcatcactgaacttcttatcactaacatagcgagattttagtttggacgaatttgaggttataggggagatagcgatggcagaagactaggtggaaatggcacatctaggttggctgcagtcgaaacggtttgagcgtggtcgctgtggctcatcgtcggcaccaattaacgaagcgatgacatctgcgttgttaggggtttcttaaactgagttggtagaaatgcgaagcgtcagggttcccgccggcttcgagcctttcttggcgtatttgtatcttgagctgatttctgcgtcagcccacatctcgctctgatccgcacgccccccgggttgttttgcagtagcagtctcagccctcttctcgtctcattcccaaatcgtaatttcagttcacagctttttatctataatagctttatcaactctttttccgatgctctgcaccagatctcttaaaatataaaattaccttgcaaggtattgtttggaatacacggtattttcatgaagacaactattaatagaaaaatcagagtccagaactatggttctccatttctggtatactggtttgcagaagccttacattaagatttcataaatgattgttttgctgttaagtgcaacaacatcacagtagagctacataaagattgaaaggagatattttatcaagtggcaccagaatggactgattaaaatagaatggcctaattggaaagaatttcaggatcaccggtttctcctgcttcatgtaagttcctattagtaaattgccttcaggcaatagggtttcttagcaacagactaaaaaaatgggctaaaaatagcagtggaattgagttgatcgttgcaggcaataggcttttctcccctcctgatcccccaatccccaaaggcaaattttctgccccttaatataagctctgccttgcctttttcagaacacaagttaggatttttttttttttctgaaatttcagttttgctgtggcctcttggaggattgtagagtgctaacaattacaaacttgataggaactaaaacatatttgaagttttttttttaaacctttttcttatttattggagtaagcaatacactgttacggttaaactccaaaagttacagagtttactgtgaaaagtcttccttcagtccctgtcctcagctgcacagttcccctctccaaagggaatcggtgttattttcttgaaacattttttggattaatatttatctaaaggcctgattttgtttggctttatttttaaggttggcattagtaaacgaatctgttctggttacttttatactttgataaacatctc

SEQ ID NO: 10029 - DNA, 6000 bp, Homo sapiens
aggaataaaaacttcaaaattgaagaactgcctccttaaatttattccatacattaatgattacaagctttggaaaatctttatatagaaaatattaagacactgcagttgcccaaataagggactttatcttgatatttttcagataaaattaataaatctgttttagaatctttgctacaagtacacttttcttgttcccccattttttgggtaatagcttcttttcaaattctactctcttcttcatgccccaaacctgctgctcacagggacatcagtcaattctgtgggttgtcttaagtctttagaaattcagtatataaaatcaaagtagttatcagtaaaattaattaaaaattttttttacaaaatatgttctaggcattttacattcatgatctaacttaatagcaccatctatagatttaaacgtgagaaaacttaaccttacttaagtacactgtccaaagtcacacagttattaagtggtagggccagaacttcaactaggtctctatgactgggaaatcaattcatgtaaagtctgagctacactgctttaccattttacacaccacttagttttttttgtttttgtttttgttttttttgagatggagtctcactctgttgcccaggctggagcgcagtggtgtgatcttggctcactgcaacctccacctgtcgggttcaagtgattctcctgcctcagcctcctgagtagctggcactacaggcgcgtgccgccatgcctggctaatttttttaatttttttaagtaaagacagggtttcaccgtgttagccaggatggtctcgatctcctgacgttgtgatctgcccgccttggcctcccaaagcactgggattacagacaccacttagtttttaagatattttcacatagattacctagggtttatgtcataggaaggttcctaagtatcaaacctgaacccctccccagcattacgtaaaaggacatataactaaagtggcagagctgaatgaagatcctctgacttttagtctagtgctagtccacttatagatcacgcagagccactttttcatttagtacgattcattcctcttcccttctctcccatattttgatgataaccatacttattagtaaacaaacatgctgtgaaaataagttggtctcagcattaataaagtccatctgaggtttttatctattgtattgaccatgaatttggaaggttattaccagtttatatttaaaagctaacatttagtgcacaactttaggaagagctatgatctgcaaaaattaaagtggtttaatttctttgtctaattgcccaacattcattcaataaataatttattgagtacctatcaggtacttcagtattctggtgctgaagacacaatagtattatagttcacagtcctgagagctttatgatttgctgaggaagagcccagggaacaggaattaaatacaatgctagaagtgcaagtagaagaatagaaaagatgatgatgatgattagtagtagtctataggactgagtggctacctctgcccatggggaagaaagcattcttagtggtggcaaaaatctataaaggcactgaaaacaagaactcaggaaaagaaaaccagaagtgccaagggccctaaaataaaaccaaacccttatgctttatttaatagtggactatagcacaattccctaataaatgttaagatttctacatgtaacactcataaactgataaggctagtctcagaaatgttttccaggcttccaatcgtgtgtgtgtgtgtgtgtgtgtgtgtgtgtgtgtgtgtgtgtgatctgtgtataatgtcaaagctttttttcacatttaaccttactagcaatgtaatcaccaattcccactactaatctacatttcatcagtggtctaagttattgctttcacgagttccctaaaactgggggaattgtgaagtaaaactgcagactcatccaaccactttcatactgacattttcccctctagtagtcaatgcttctagctggttttctctttcacattttggtctcagccagacaggactagttaggacttccagaccacataaggaattctccttacgtggtgcaatgtcacctggtcactgaagtaacacttcctttttttcttcccctctcctctagagatcaaggaaccttattatggagaaaattaatggataaaactacatatatatatctacagcaggcatgatgacataaatatatcaatacattagtctattgtccagtatgggtcgtaagtacgaaatgctaaaatggtaaatccacaagagatagtagtaatcttcattacttggggaaagcaacatctccgaggttatgttttctactaaggagcatcaataagctaggttatgtattttgcacttactataaaaatactttgttaaactgctgctattgtagaattttaactttttattctccttaacaaaataagaccgtttattgtatagaatttggaagacacagaaaaacaaaaataaatcagtcacatccaccaaagatgattccatcttcctcattttccagcagtcttctttaattaccttagttagaaaactacaagatttaactgagcatataatttttcatattaagaaaggtgtaatttaaattttaaaaatcaaatttgtaatattcgtaagaccttcaattgaaaagcagcatggaattttctgagtttgcagtataaataaaagagtttaaccacaaactgaaaaacattcttccctaaagcacattgtttgggatcaaaacattggtaataatacattatggacggaatgggagtacttgggttggacaacacctgtattttcaattggacaacaatttctgtattttcacaaaatactattcatcaaaatctgaagagggcaccgggagttttacaaatggggaaagctaaagagggatacaaatgctacttaacctaaatttaccacaaagccgatcaaggaatagattgggagtgccaattcagtagtattttaggggaaaatgacaaaaagggaaggattgacggcagaaaacatgtgcagacagcaacatctcgacttgattctacctttaagcatatggccaaatcaatttggtttaactatttccaacccaatcagtttcttatttcggtttcagggaaccctactcactcttccctaaaccagcctgggcctcctgcacaccacaacaccacaataccatctttcaacgcctcctcattcaatcgagactgtcgcattactaacacctcctgttttgaagacagtattccttcaactgtcctctctgcagagaagaaaaagtaaaagcccttcttttacttttctagtcccatccgaagcacgtgaacatctacggaaccttccctgcaggtatgtcagataaaatccttagaatcactgagaaagcacattcggagggaagcttcacagtgactctgcagtgagggccgtatcagtgacagtccctcccaagcctgtctcaccggagacgcctctgcctccagggtttttgctacctccccgctcctcagccctgagctgagggtaaggacagtgaggacctttgccaaagaatgggctttaaggaatgggacctaatgtctactgcagaccctgtgaaatggctgaaacaatctgctacccgaagccccaaaggctctgagtagggaaccataatggccgcactcacttccaaccctgggaaaggtggacatctgaatccccaagtagcgggaacgaccacacttgggggagcgggggttaaggagaaatgagctccttgccggtgcagggtgacagcggggaggaagcctcaggcagaaaagtcgccgttcacactctcccttctctccttcctctgcctccttccaccccctctatccccaccactcgccagttaccggtcgccgctcacctgctggggcgcgaggtgcagagactgtaccgaccgaggacccagaggctgtcaccacggaggggaagtcctcagctgcacaggttgggggggggggggggggcgggcccaaccagtcacatgacgtcgagctccgccctgcctcctccatcccagcgctctacatctcggggggcctgaatttttacggatcccttgaatattaattttcttggattaaagaaataaaagataaattttcacaaagagtatgttataaagtacaatgtggaaaatgtggacagcaagagttaaagcgcattgctaaggaagtgacgttcacgccacaatcgagggacaggaaatggcggtggcgttccgtccctctggagtccgccggtaaaattccaggctctgaggtttgggccaatcacgtgatcttaaaacttgaggcgtgctggagggtagccaatctatctggccgattgttaactacgtttgttttaaaacacctaacttaaacttgagctttccacagatttctttacatttagaagaactaactttataaaaccctactaggaggcaacagcgtttgaaggtcactctggagaccacaaactgggaagaacggggctgagaaaaactatcttgcggatatgggacaagagagggaggggtggaaaaatctggattttaccgccagggcctaccgagccagccccacaagcagtgtcgtaagcgggtgggagggaggagcatgaccccagaaggcccagtccaggagaaagatggaggttccggagtggagggggcagggtgcgcggaggcgagcagtgcggctgcgcgtgaggcggcggcgcgccggcgcgcgaggggcggggtgaaaggtcacagcgcggcagcgggtctggctggcggcagcggcgggagggagccgagagacccgagtgcacgtgtggagaagcggcggcacaagcgcggcggcgggagacactcccgcccccaccagactcaagccctcactcgactctcgcggccttcgttgctcgcacagctccctgcccaggctaggaggccggcttgcggggttgagtggcccgagctaagggtgcggagacctaagggcggcgactacgacggcgttgatatcggtggtaacgacggcctcagcaggcggggaagatgaaagggtgaggaagggcagccgggcagggcccggccggtggggtagaagggtccgggcccatgtagagggggagagccgcaaaggcgaggagagattcagggcgaagacgggcggagggagatttctctgcttctcagttccctcggctcccggagggggcggaggcgaggctcgggctgttggcgggctgaagggccagcggaggcaagacccggggggcttcagggtttcggttcggagacgagtgtgggttgttgagtggggagaagcgaccgagtggggcaacatggaaaggctattgtgaagcgcccggggcctccttcccgggagcggaccgctgagccacgccggcccgcagctccaggtggagtggtttggttgtcttccacctccagactcaactctggaactgcggtgtttgacacctttcagtttaattcacgcttgggagctgtgcagaaccttctggaggaagaagaaattggaataaagagcacggggatgagtattaagagctagtgactcaactagatttgggttgggtcacagcgagtggaggagggggagagagcgcgatcactgtagacttggggtgccaacatatttaaggaagtatagggtggatcagtaggtggagctgttgcttcagtagttcactattgcccctgagtgctgaggcggtcctgggtagttctaccacgctgctcctttcaggtgattggcaaagttaatgttcggtctttcaccgtttgcctcttacgtaaaattaggaattattttggatcgactggttaagtttttatgaaatgtctccttaccattaagttgtatagttttaatgtattaatta

SEQ ID NO: 10030 - DNA, 6000 bp, Homo sapiens
taagggtaagggacacacacacacacacacacacacacaatagaaagcaaaaaccaaaggggaaaaatgattaatttagctacatcaaagtttaaatattctgtaggacaaaacttctaaataaaatttaaaagcaagcaaaagcctaggagaaaatagttggacccaatacaagagacaaaggataagtgtgcaaaaagaatgaagaactcctacagagaaaaccatggagaaactgacacaggatgggaacaagagctcagctggagaaacacaaaggcagcctagacagccacctgagaagaggttagggaaataaaaatgaaagccgatggaaagatacattatgtttgaggaatggaagaatttcaatgaaaatgacaattttacccaacgcaatttacagattcaatgcaatcactaccaaaataccaatgtcattcttcacagaaatagaaaaaacaattctaaaatttatatgtaactacaatagaccccaaatagccaaagcaatcctgagcaaaaagaataaagcttgaagcatcatagtgacttcaaaatatactacaaagctgtagtaaccaaatcagcatggtactggcagacacataagccaatggacagaagagagaacctagatataaatccacacacttatagccaactcatttttgacaaatgcacaaggaacatactctggggaaaggacagtctcctcaatagatggactggaaaaacaggatatccatatacagaagaatgaaactagacccctatttctcactatattaaaaaatcacatcaaaacagattaaaggcttatatgatttaaaaccatgaaactactagtagaaaatattggggaaattttgcaggacattggtctgggcagactttttgtgtaagacctcaaaaacacaggcaaccaaagcaaaaatagacaaatgggattacatcaagctaaaaagtttctgcacagcaaaggaaacaacaaagtgaaaaaataacccacagaatggaagaaaatatctgaaaccactcatctcacaagggattaataaccagaatatatagtaccaggaattcaaacaactcaatataaaaaaaatccaattaaaatatggccaaaagatctgaatagatatttctcaaaagaagacataaatggctcacatatatgcaaaaagtactcaacatcactaatcatgagagaaatgcaagtcaaagccacaatgagatattatcccaccccattttaaatggcttttataaaaaagacagggaataatggacactggtaaggatgtggagaaagtgttcctcgtacactgttagtgggaatgtaaactagttcagccactatggagaacagtatggaagttcctttaaaaactaaaagcaagccagatgcagtggctcaagcctgtaatcccagcactttgggaggccaaggtgggagaataacttgaggccaggagcttgagaccagcctggccaacatgccaaaaccccatctctactaaaatacaaaaaattagctgggtgtggtgacacacgcctgtagttccagctacttgggaggctgaggcatgagagtcacttgaacccaggaggtggaggttgtggtgagctgagattgtgccactgcactctagcctgggcaacagagcgagattccatctctgaaaaaaaaaaacaaactaaaaacagaactaccatatgatccggcaatcccactaatgggtacatatccaaaagaaaggaaaccaggatattgaagagatatctgtaccccatgtttcttgcagcactattcacaatagctaagatatggatcaacctaagtttccataccagatgaaaggataaagaagatgcggtacatatacacaatggagtactattcagccataaagaagaatgagatcctgtcatctgcaacaatatagatggaactggaggtcattacattcagtgaaataagccgtggacagaaagacaaacatcacatggcctcactcatatgtgagcgctgaaggaggggatctcaaggaggtagaaagttcaatggttaccaaagcctgtggcgggacagggggaaaaagggaggatggttaatggctagaaatacacagtttgatggaagaaataagaaatcgtgtttgatgaatcaatacagtgactatagtttacaataatctattttatatttcggaatagctagaattcaaatgtttctggaataaaagaccaatctctaaaatgatggatgtctatattgcactgatttgatctttacaagttacatgaacgtgttaaattatcacaggcaactcaaaaatatgtacatctattatgtgtcaataaaatttttttaatataaataaatgaacctggtgtgatgcacctcacctcaccaccactagggcaaggggtggggagaagggcctggaacacagccacagggctctgggtctgcctctgccagaggcaactgggcagtgaccactccaggccacacatcctcactcagccacagtcttggtgagtcactcacacgcgtgcctgaggaggttaacccaagagtgcgcagccactgtgcttggtgacagcaaacaccagagcggcaggtgctggcgcagccctgatccgtgattcatgctgggaacacgtgtgcagctgtacctagagagccccagccctggtccaccctcactgtgcctgcacatggtgccagaggaaggcctggccagggtgacccgggagcagggcccagctggtgtcagcaccacacctgctctgtgccccttgcagggtgggggatctcccagctgtggacatggccaaaggcccctcagctccacctgaatgttggagtgtttgcaaggagaacatgctccaatgtccctgtgtcactgacagctcgtgcagatgaacaaccaagcacaggctggaggaggctcctgtgggaaagtgggctgtgggccaggaaacctctaatcccagagccccagggaggagccaagatgccagaagatgccagtggaggcattgcctccaaggtccccacagaggacattgggcaatgtctgcacatggttttggttgtcccgacagggggtgatacaggacagccccccaaaacaaagaactgccccaccccaaatgtcagtagtgtggaggccgagaaaccctgctatggggcagtggtcagagacccttgtgccttgaaaggggctaggctgggcaggacaggttgtggaccacctggggccacagttcagagccacgcctgagtctgtgaggctgcccaccctcccagctgccagcatggggttggggggtatccgcccccatcagactgaggaggaaacggacactctgtcacccagaagcatccctgtgtcaccctgtgaggttggccttggacccaggcctctaggcgccccgtcagcaccccagtgcgaacacatcctgcccggggacctggacccagcagctcacacagaccagggctcgcccaaaggcaggcaggcagggccactgctgaccacgcacctggctggtcgtgattctggaactaatggtttctgcctggcagggaggccgccaggacctctgggcttcacccctccccaccttcacaggggacctcgcctcagtgggaatgttctggagccggaacccaaggttggaatcccagctcctcccctttctaggtctgtgaccttggaaaaattaaactttctgtacctctgttgcctaatctgtgaaatggggtaatactacctactgtgtagggctgtgaagattaaatggagtcatgcattatcatcacagggcacctggcccatcctcaaccccagttcagactcctcaaagccctaaggtttcagatcaatggtcagaaccacgaggaggacctgctaaagacaagtatggggacccacccccaaggtttaggatttagaaggtcagggtggggctggggaacccgcatttctagcagatctcaggaaaggcagtgctgctggtcctgggaccacagtttgaaaaccactggtgtaaaaaaagccttctaaaaaaaagtgggatttgatcactaaagtcatatggaaaaaactggaagaaagaggaaaaaataaacaaataaataacgggattttaaagagacctatcccaccggctctcctggatggagagagtgtgggactctgagacagactcccggctgggcacccccaggaggttttcttcaccagaggtttgcaccgagcccacccaggacagtgggctgagcctgtggtagaggctggcgggaggtctggctgaggcagcgaggggtccctgcgcgcgggcgctgcaggagtcacgcgtgtgacatccaaccaggagccgtgccctgagcaggccaggaaggaggagacagggccgctgaatgcacaccgcagcggtgtggggagcggcctcagacacctaagggtaggaccggccggctcccccgcgacccccagcgcctgggttctctcccggcctccccgaggcgtggcctaccccaggcatggccccaccccgccccaggccgcccctccgacccctcgtgtttacctcatctcccgcgcgcctttcccccaccgagtcccccaaatcccggtccccacctgactccccctcccgccgagcccccagggcccggcgcccggctcactcgcctcccgcgcacccactcccgggcgccctctcccgcgcgcctccccgaccccccttgggccccagctgaccccaccttccgccccaaccccgcccggaacagggccgcgcttaccgggtcccctcccaggcggcggcgggaaagaggcgggcggaggacgcaggggcgggcctgcggctcaggcaggaagcgggaaggccgggcctccctggccccgccccggccgggcggccggacctcggacgacttggcgctccgggacagcagcagacgcccaagctccggcagcgcagagccccgccgggggcccggggggctgggagccggggatcgcggggacggaagtgggggaccgagtctcgcgagcccgggccctcctcgcagctggggccccactggcgcccccgcgggagcgctacgggagaggcgcctatgcggctgcaggttttattatggagctgtcaaggtagaaaggtacggagaacgggaacccaccgacagccaacttcccttgggacccgccttttgctttaaaaacaacaacgacaagtctgtgcttcaccccacacatgcctttcgttttcccttttttcccagagtaattttaaagcatcccagtggataaattctcctttaaatactcgagtatgtttaatcagtaaggcctatttttttaaacattctcatagtattacggtcacacctaacgaaattggcaattcccagtccgggcctgagggaggcctgatggttcacaagacttggtaaaatatatcattatattttaaaccaaaaaataaatgataaggcacctccccgttcccaaccaccaaatcatccgaatggacttcttcctcagccaggacttttagaatttaacctgaaaaactggttcaggccataaggggaagtggaggccgaacatgcctcattatccctctcctgcattaacatcaacacagactttaagtctgataagaaacattttacagcctcttctctctgaagcctgctaccctatccgaatacttcatctgcgtgataaaacacattggtctccacaacctcttaacccagacattcctttctttaatcccaggtctttggacaaactcaaccaattgtcaaccagaaaatgtttaagttgacctataccctagaaccaccctccccctctttgagttttcctgcctttctggatcaaacaaatttatttcttaaatgaacttaacttgaagtctcatgcctcctcagaatgtattaaaccaagctgcaccccgacctccttg

SEQ ID NO: 10031 - DNA, 6000 bp, Homo sapiens
atacaaaaaattaggtggggcttgcagtgagccgagatcatgccactgcactccagcctgggtgacagagtgagactccgtctcaaaaaaaaaaaaaaaaaaaaaaaagtaatacactacaaatgtactttgatcactcattgataatatgattatcaggataatataattatcaggataataggattaacagacaacgtttgctaaaaattatacattgttttgtattgtatgtatatattaataaattggggagttccttttgatattaccaaagaagtcttcatcatgggcaaacggtaaaagtaactgaataaaagtagctcaaaacactagctaagaattttaagcattttttggaaggaaagcaaagagatgacagaacagacctcattaaatattttacactatcaaaaagaaaacaaagatgaaaagataagtgtgattaatcaaagcaggctgaaatattctaggttcctggttgccttccaaataggaaacaataccactacataaagcagatgagtgccttgctaccatcaattacaaagttaagaattctttaaaaaataattaacattttgaataaataacacatacacaaaaatactttattttctataaatgatcgctatggcaggaactcacattacaaataagtggttctcatgcttagatattttcagatttacaaataaaaactactaaaagtttggttcttaaagcacttataattatttaataattcccaaacacaataaatgtacaccagttcctgcgaaatatacaaaggtggtcatctgcagtaccctgaatgggcactgaatcacatgaaccgatcctggggtaaccaagcctcttacttaaatctaggtttcaagaatttgaaaggctctgtagtacatgggtcacctttaggttcctttcaacactgtgatgccatgatattagaagttgcttatccagagaatacatcaacactgaggtgaacacaaaaagcagtagttacagctacttgtcacatccctaccctaagaaactgggcaataaaattcaatctgtgacctattaaacctcacctgatgtaaattactaagagaacgtgcttaataggcaagattcagggcagtcttaaatacttattgctttactttccaggctaatcaataacattgctagagaataaatacaacctcctctctccaacttgaggctaaaaaaaaaaaaaaacagagagtaaatatatgacctggtccattcctgtgaaatgctttgtcaacattttctttgaagagccatcagaaacagctccccaaaaccgttattgcttctgttcttctatgtaagtgggccattctatttttataagtaaaacacaactttctgacgcaaccagaaaaacaataccaaaacactgttaacatcataggagagatgttataaatctctaaaaatactgtcatgtggggaaaccacctacactgtgtatttacttatgtcaacattatgtatagtgtggaatactttcacttatccatatatgaatatatttacatacataaaaatatattcaacaggttttgcacacagtattgcacaaaataaaatgtaataaagcagattctagcttaccattcttttattcatttaccaaacatttactgagggcctgccatcatgccagccatcagggacaaactagggggcaaaaacagaaatcatcccttgtcctcaggaatctcaaaatcaactggaaacacaaatccaaatcttgtaaaactgttaactgagaaactacaaattgagaaacaaaactgcaaatgtgattgataaattagcagtgattattcacactactagaattgtttttccaaatgattcatccaactttttaaattttatttttactgctcctttaggagcaggactacgcccataggcagcgtacctacagtagcacattcaactttttagtcatcctcacctttgaaatacatacagggctgcactacttaccattttcatcactactgaagtggtctgggtgaggcaccatgttctctcacctggtctctcaaagatatcgtaatcccccaaacctgtgaatatgtttactttacatactcatacaagaattttgcgggggtgattaaattaagaacttccatacgaagatattatcctgaattatctaggtgggcccagtgtaatcacaagtgtctttataagagacacacaggagtgctggagaggacagaaggtgtaattggaagatgctcctttgctggctgtgaagatgaaggaagcagtcaggagccaaggaattcaggcaggcttcataaggtggaaaagccaaggaaataaatgtactctcccctagtacctccagaaggaacacagccctactgactttggttttagcttggtgatatttacagatttacagacctagtctgatgtacaaactaaaagacggtaaatttgtattattaaccaacaaagttgctgaaatttgttacaggagcaatggaagactaacacaatttcctaagcagtctctctgcttccattttttctctccttttagcctcaaaaggagcaatccgagttatctttttaaaatgtacgccatatgaagtcatccttctgttcaaaatctgccaatgaaatccaaagtccatgtgagaaccttcacctctccgacgtcatttcccactttcccctactgtgaatttcagccacactgcttccctgctgttcctctattaatcttgcatgctccagtcatggctcttctccctctgcctgaatcagacccctactcttactcccagactcctatccttgaagtcctttcttaaatgttaccttctctcaaagacttaacctggacactccattccaaattgcaaccctcagccgctaacactccctcatcacttccctccccttatcttttttccttagcatttaccaccaaacccaaaacacagcttacttctgcttactgcccatttccaagaaggccaaaaattctgcgttgtttcctgctgcatccccagcaactatgcctggcacatattagacacttaataaatatttgttgaatcaatcaatgaaccagatagagactcttaaaaacgtaaagctgtgatttaaaaagaaagaaagaaaaatatgatgtgggaaaaaagataatcaaaaccgctacgattaagagataatgattctcttaagcctttgccacatctgaacgcataatctggaaggaaattaaagccacatgacttaaattaaagccaagtgaaaatattctggagaaacaaagtaagccagtaacctatttctcaatttaaaaaaaaacccgcaacgcaaaatgccagcattttctcggcatttcttctctaaaacattcacacctgccaaacaggtcttggcaaataaacattctgctcttctgaaaaactgtggttctcatgttagcaaatttgggacgaaatccgtatgcagaaaaagcgccgggccgcccgcaatccacccactccatgacccttttttaggacaaaatccctgggcgctggggcctgctggaggagcttcacgcagtctggagctgaagggacacagcgagcgccccgacccgcgacgccccgactccgcgaaggcctccctgggaggctggggaagcgtcgggggatctctcagcgcagctctggggcccagatttctgcgcccgtcgtgcggtggccagagagggacagcgcagcgcggagacgcggagacgcagagactccgcagggggagagcccgcggtgcgtgaaacaaacctgttctctcctcagacctcaaagacagcggctccaccgcggtacgcggccaccggctttggagcctggaccccaacttgcctcctctcgcggagagacagtcgccgacgctcgcttagccgccgagacctcgccgccaactctctcacctctcgagacgcccaggccgctcaggctcgaatcttgcggagcagggggcgggacaatagcggccgcggcgccccactcggcagaactccgccaccaggcgcgatgccggaactacatgtcccatgacgctctgggaggccgcagctttccaccggaaagagggtggctgaggtgggggaggagcccaaaaggcattgtgggagtacagctctttcctttccgtctggcggcagccatcaggtaggctgcgttgaggatctttgctcttccatccgcctttgatcgtcttcctcttcagccatccaggtccggggaccctgcgtcctcggagataggtctccctcctgtgcggccagagtttggtcaggatgcgggacagcaaaggggtggagaggcggcccccggggcgggttgagcgaagatgtgatggcggcgcgaattcgagctgggcccggatcctggaggaggcgtggggctgacgaatggggcgcccgggacaaggcagcctaaagtgaggctgctggttgggtggggtagatgcattttcctcgagagttaatcctcggtggccgcagcagtaccttgtcctgtgatgtcagcggcatctcctttcaggtcctccttggggacgccgcctgccgcagccacccgcccccttggtgctcagttctggttctgttaattcgccccaccaaaacgtgccgagcaccgctctgtgctggggttgcggaagtgactgaacgcggctccgtgggcgcagtggtgggggttgggctagctgtccccggcagttggtgcagagccattttcattcccggcggtttccttgtttttgttggggaactaagatggacggatacagtcgtcttattgtacttaaagcggatgatatttaatacacagtttgatttcacaggtaagccaagatgggtgcatacaagtacatccaggagctatggagaaagaagcagtctgatgtcatgcgctttcttctgagggtccgctgctggcagtaccgccagctctctgctctccacagggctccccgccccacccggcctgataaagcgcgccgactgggctacaaggccaagcaaggtacgtgatcgactgcgtggatgcttggataaaattatattcgagaaaagttggaaaccagctgttaggaagacactgctgcctcagtgtctttcttcgcatagggctttggcagaaaaaagctagcaacactggtcagttactgtatgcactgttgtctaaagtggcaagtgtgtcaaaggttacaaatctgaatgagttcagactaaagcaaaataaacagtgtgcctccctgtgtgagtagcctaaggtgcattgaaaaagactgggatgtgttttatttttttctattagatagcattaacttactgttgaagtatttttggtggagtattagtgacaagccattgagtcttaagccttacggcttcctataaaatcactaatttcgtgtgtgtttgtgtgtaggttacgttatatataggattcgtgttcgccgtggtggccgaaaacgcccagttcctaagggtgcaacttacggcaagcctgtccatcatggtgttaaccagctaaagtttgctcgaagccttcagtccgttgcagaggtaaatggttttgagtagcagttatattgaatactgcctggggatggtgggagagagagattaagcaacttttctgattgtacttaggtgagctgtctcgtatataaaacagggtttgtgatttttactaatcttggtgaagagtaattgcttgaaagacttgtctttgttacaaatgcgtgtgtatatactggaagtacttgtggaacctaagctttaaagcggcaagaatatgcagaagagaccaaatgtggcctgcacagcctaaaatatatactaaatatttttaaagctaaacgttgctgagctctcagttgtatggaaaaagataaggtccccaaaccctaaattttgttacccagatattaacatattcctgc

SEQ ID NO: 10032 - DNA, 6000 bp, Homo sapiens
agcacccccagaatacctccatcagctgttaaagaataacaacaacaagcaatagcagtgttcagtctccacctatgatgctgtgttttaattatatagttactgtacactgtattttatttttttagataagaagaaatcttagaaatagttgaaggactagaaagtgggtcctctgaggcattcagctggatgcctttttaaaatgttttctccagtcatctgccccattaccaactgtttttgtcttagaagtccctctttgattatataaaccaacattatttcttgttctgttatgaatgaacattgctttagtccttcagtaagcccatcacaaattttcaccatgtcatttataggcactttctctgtagtgttaacatcatcttcattgtcactgattatcacgatcaacttgattcaaaaccatttcagctacttcatcattggtcagcgaatgaacaactggagcctcattatccatgataaacattgtttgatattcacttcttccagcttacagacagacagacattgggggtatattttttgcatgtgtgagtagatcagccgttattttttttctcacttgacatacacaatccttcaaagtcactaccttgtttatcatcactgaacatagttgcaggccagagattgtgccaggcatgcacaactttgtctatagtcactatgttccaagcataggcaacagcatatatggcatcctgcagactaaaattttttttttttttttgagatggagtttcgctcttgtcacccaggccagagtgcaatggcgtgatctcagctcactgcaacctccgccttccaggttcaagcaattctcctgtctcagcttccggagtagctgggattacaggtgcccgccaccatgcctggctaatttttgtattttttagtacagacaggatttcaccatgttagccaggctggtcctgaactcctgacctcaggtgatccacctgcctcggcctcccaaagtgctgggattacaggcatgagccactgcattcggcctcatactaaactttttttgaaaacctccacgcccattcttctgtttattgctgctagcatgctgttcaagaaagtatttttatatttatccttcaatgctttaaggatatcctggtcacatagctgaatcaataaagtcacatttgtggggaagtacatggcataaacatgatttttgataagaatttcagctggagaataagcagaacagttgtcaaggaatataaaatcttgtagtcgtcatccagttcagctttcctgcagtgactgtatgcctctggtacaaaatgtttgtgaaatcaatcagaaaagatgtccttggtcatccatgcctttttgttagcagaataatggactgataagaaattcactccttgaaaaaaagagaggacaaacctttgcctatcacagcaagtttacacttatgcgtgcctgcaacattagcacatcccagcacagctattctgtccttggcatttttaattcctatagaggctgtctcatctgccaccgtcagtgtctttctggggcaatgatgccaaaatagtgatgtttcgtcagcattatagacgtgctctggtatccagttttcatcagcgatgatatgggcaaactcattaatgactttttccacagctttctgatctgcagatgctttatcaccacaaatccttaaacatttagtgctgtgtctttgcttaaatatctgcaaccagcctgttgaatagtcacagttcctttcaatttcaaattcattgtgatagatctttgcttgtttcatgatcagcataccattaagtggcatgtggtcactgtgatgccgatggatccactttttcagtgcacaattgagatcttcatattttgcatcatacagtgtttttctatttttcatttacttgtgtttatcgcttttagcatagatcttcaatttatccttctgtttcttcagattatacatggcggtcattctgtcaccatacttttctgtaacaaatctcatacccataccactgtccagtttctctaacagctggactctgttgcataaacataataaatgcttcctctttttatcactgataaccacagattaacttcaggcttctttgatatttctttttttttttcttttgtttttttttttttttttggagatggagtcttgcgctgtcacacaggctggagtgcagtggcacgatctcggctcactgcaacctccacctccctggttcaagcgattttcctgcctcagcctcccaagtagctgggattacaggtgcccgccaccacacctggctgatttttttgtatttttagtagagacggggtttcactatgttggccaggctggtctcaaactcctgacctcgtgatccgcccgccttggcctcccaaagtgctggaagtacaggtgtgagccactgcacccggcctgatatttctttatactaacaatagctttacaccacagagcaaagaaaaggaaaacaaaaaccaaaaaacaacaaaaaagcaaacccacagtgagtaatgcacgtagatgaaggcccagtgtgggcattgtggggaacttgtcgttggcaaatccagcctgcatgcatgccatttgattacctttggggggcacgcttgcatgggggaatttaggcatgccctgaaaagatatatagcagcagaaaagggctgggaggggcttttttcccttggggatgctagtaaactgcatagtgtgtctgcattttgatggtgacccatcacatgtgaccaggtgtggaattttgcacttgaggtattacttgtcggaactcaaaaagttttggattttggagcatttcaggttttggatttttggattagggatgctcaatgctcaatctgtagtaaggttttatcttaatcaaaaaacagatcattattttgttagggaataataattcttcagataaattcaagagaaatgtgatccatttcacccaccttaacacagaggcaccagtgtgcctgctaaggttatttatagatccgaagtcacttaatggtgcagataatctcccactttttcttcccatcatagtgtctgggcttatgttgttcaacaccaacagggtagccactgggcatttaaattcaaatgtaaattaattaaaatgaaatgaaaaatttaattcttattgcacactatctacattccacacactatgtagccacagttggccaccatattagacagcaaagaactagaacagctatacaatcacagaatgtattattagacagcactggacatggttgggttggtcaaatgaactgctattcaaatttaatacaacactgataaatgataaatggagaccatttatttacttcccattgagaaagctctagccagataaacagattcctgcaaattggtccctaagataaattttgtaggggccagaggcagtagtgtccttagacccaagcaagaaaaaccgtgttctaggccctccattttagaggacaccaacctgactcttcttatggggtgaaaaatctccaggccagcacccaaagcctgggtacccactatgtccccaagacccaggaccctggaattccctgactggtattaccaaagccacttcttggccctgagctagcttcttctgagaactgtcctcccaatgaaggacccaacaactggtataggcacacctgagatccagacgcagacagagggtggctgttagaaagtgtgaacagaacttggttttgtgggctgcggtgttcacacacaggtacaaaaaatcccctcttgtccttgaagatagctgggcacaggaagcaaagacggtgaaggtgtacaggccaaaggtttggatctgactctttcccacctgccatgtttcagggagaaactccaaggtgtctgagaatcctgcttacaaaccttccaggttgttatgaaggtaatttctcaaggcaggagcacagaatatattttattagcatgatatagtccttgtaaaattttaaacatagggtaggtaagccctgggcttgcaaatgttagggcgaggctggaagtcagagtaatcaattctgttggggtttcttggagggtttgctcattattgctcgaactggtgaacatctcaagtatctttgcctgtcgaatttctttcaaaaggctgcctttctagtgaggtccagatgcatcctttagagaccatcgctgttgttgctgaaggccagaaacagcttcagattgttcactgtattgaagaggaacctgtttactggctccagtgtatttgggacaaataagactaccataatgaggtgagaaggcgattccttccgaaacacttggttttgggtacttttcccatagggttggtcagggaaattccctactctcgtccctactccatcctccgggccaggctccttgggccacatgggcagtctccaggagcgcacaagactgctttgtcctgtgcccgcggtgcgagcgcggtggcggcgaagggaaacgagcaggagagtggccaccgcgggtggagtttggactcgaactttcctccgttcggactcgaactttcctccgttctctctacgagttactgccttcccgcgggctccccacaactcctgcccggaggccgaggcccgggcgcgcaccgggtcggagtcgggctcggcaggtcccgggagcgcgcgcctcctccccgaggtcccgggcagctgcagacacggggagagcaggagagccgggaaagaggaggggaaggggcgggggcggccgccggcggcgggcggggaggagccgccgcgcgcgggtcctggccaggggaggaggcagtggcggcggcggcggcggcagaggaggaggaggaggcggtgctcgcgccgggcggtagagcggcgctgggacccatgcggccgtgacccccggctccctagaggcccagcgcagccgcagcggacaaaggagcatgtccgcgccggggaaggcccgtcctccggccgccataaggctccggtcgccgctgggcccgcgccgcgctcctgcccgcccgggctccggggcggcccgctaggccagtgcgccgccgctcgccccgcaggccccggcccgcagcatggagccacccggacgccggcggggccgcgcgcagccgccgctgttgctgccgctctcgctgttagcgctgctcgcgctgctgggaggcggcggcggcggcggcgccgcggcgctgcccgccggctgcaagcacgatgggcggccccgaggggctggcagggcggcgggcgccgccgagggcaaggtggtgtgcagcagcctggaactcgcgcaggtcctgcccccagatactctgcccaaccgcacggtcaccctgtgagtatctcccgcgacgctgggtcctctcccgctcggctctttcttatctctccgctcaactttggagcagggtccagccggcacccacgcgcctttgtgtggagctgtaggcagggggcggtgctaggaaagacctcgtgtgcttggcatgggtgcagttcagggaaaggcaagggaatctgcgtccgagctgcctcccagctccactagtttgcaaagtaaagttttcgggttctcaggcgctccccgcgctgtccccggcgcagcgcttttgggctgcgcggtgccacgtgaggatgcaagtaaacacgcagtcaacagagttaaagctcattcatcctgggcttgggtttccagaaaacacaatgcttgattgcaagcgccagtccttctgcttctttgcaaattaagttacacttacgtggtagagtttgcaaaacacaaggactgtgtgcgagcccaaaccccaagacgcttcctttgccttttgctatcttagttttattacagttaaagagcaccttttaagatagagttgttattaagggctggaaacatttcagatc

SEQ ID NO: 10033 - DNA, 6000 bp, Homo sapiens
ttatacccagtgtcccatgtgggatcaggctaaggaaggttagacttcagctgaacacacatttgcttcgattcttcctctgccctgtcttgctttcctcactctcttagaggtttcaccttaaagcacactctcaagtcgcttgcacaagaatccccatctccagctctgctctacggaattcaacttaatacatgagttgatttagttttccactgacttgaactgttaagggaaacatttttcttatactttccctaaaatacatgtgtgtatttttctaattcaataaatccaatacagtaaacccaattgaatcattattgttccagaatatcttgtctaaagttcatctttccaatgaggaagtttccttgtattgtatggtaaagttaaatgcaggtggtttaagcatttaaacaaaaacaaaaaagcatttaaaaaaaaacactatactaagtttaggacatattcttacatttgacaaaacacttgttacacttttttttcctttttatttgtctgtttctcacagcagaatgcaagtgaattttcaggtaactaaccataaccctggttagtagaacgccagttaatcaagtttaactattcgaagactcttgctttaaaagatttttctttgtttttatggatgtttgtaaagaaaaaattctatgcaagtaatactatatcatagatatacacccctatctacgaaattacaccttaaaacaaaggccttgtgtatgtgatatctgcatcatagataaagagaaataagcagaagaaaggggtttttattcttcccgttcctgttatcatttctacctttgaaaaataatgctaataaatttccaaattatacaacctagcaaatcaattagtggaaaaatttcagataaaagtaactataaaggaagtgagtgatttacctgaataaaactatttttcaaagattttattaaataactacagcatctctaggcttcaacggtatttttttgttttgtgagacaggatcttgctctgtctcagactggagtggctcaatctcagctcgctgcaacattcgcctcctgggttcaagggatcctcccaccttagcctccagagtacctggactacaggtgggtgccaccatgcttgactaatttttaaataatttttttgtagagataggctctccctatattgcccaagcttcatctttgttttaatcttgatccttaaatattttaaaaatacaatatttatttttataaaattcaatttttaaaaagctattttattttaaaagtcctaaaataagaaaagaagaaataataataaaagtgaatatgttatatagaaattaacaggatgtcaatttcatgtgtgcccagtcttactgaaacttaaagagaaaccaatactaataatcatatttttctaaattgtattttaaaatcttatttatattattatgcatttgcatcataaattctgtttttgtttgtttttgagacagagtctcactctgtcacccaggatggagtgcagtggtgtgatctcaactcactgcaacctccacctcctgggttcaagtgattctcctgcctcagcctcctgaatagctgggattacaggtgcatgccaccatgcccagctaatttttatatttttagtagaggcggggtttcaccatgttggccaggctgatcttgaactgctcaccctgtgatccacccagcttggcctcccaaagtgctgggattacaggtgcgagccaccgtgcccggcataaattcttaattaatacaattattggggatctagctttcaaatttccaattctgaagaaggtggaaataagatacattgtattttaaaattgaattgcatcatgaaatggaaatgctgtgtgtcaacagaagattatcagcaaaagaacaaaattgaaattatactctttttaatacaagcaaactacataaagtttatgtaaataagaatatctcggcctcacgcggtggctcctgcctgtaatcccagcactttgggaggccgaggtgggtggatcacgaggtcaggagttcgagccagcctgggcaatatggtgaaaccctgtctctactaaaaatacaaaaattagctgtgcatggtggtgcacacctgtagtcccagctacttgggaggctgaggccgaagaaccacttgaacccaggaggcgaaggttgcagtgagccgagatcgtgccactgcactccagcctgggcgacagagcaagactcttgattgaaaaaaaaaattcataacaatacaatataattataaaatatgtttggaaatatcaaatacgagctttggctagccttatttttggtatccacaagtatagtgtgtagtacataatgcttaataagtggttaattgaattgttgaaataaatataattcttatattcctggtttaaatctttttatatattgttaattatacttaaaagtaaaagattactacttttagtatttagtgaacataaattttgataagtaaacatacttattatgcttctgcttttctgttcatttcatatgttggtgatttatattatatatgcatttccttaatctgatctccaaaatcgtacatatttaaccataatttcccatcatttacctctaacacatctatactgaaataaaaattgcaacaatgttttacagtgtgattctccaaataatgagcactcttggaataatgaaagtgaatctgccatgttaaatgctatgcataatttaacatggcttagaaaaatttgtatggcttttagaatttgttgctctccttcacaacaattttgtgtatatatttcctcatactacttcatccacagtccttcctcaaatgcttccatttaaacttaaattttaaaagttccccttttactcatttcacagttgtcgtagacactatcattctttgctcaacaaagtaagtcatgttttcaaaaactaaaaaaaaaaaaattcttttttttctgatattgtgctacttccatcttctctccttacaggaaacaaaattttttcccaaatacattttcatacacattcttcttatttgaaagagctgccttcctctattattttattctcatgagtaaagaggtatgaaaaatatttcttgctcccctgggtcacttctaaaccatcatcactctttcccttcagaagttggacttgtaattcaaaaaaaaaaaaaaaaaaactggctagttaggttcaagaagatgatgggaaaaacactatgaagaaaaaaaagatactataattgaaaaccaactcaggtgatgaatcagcaggagttgctcatccttagagctgcctgggctcctgttggctttctaggtcttgtgtatcatgaaagataactccattatctaaaacagtctccctttcctgcaactaaaagggcctgttaacacggcccttcattcactaaggactatggcacctggctcatagacctttccaccccaactgctaccagaaagtagcattgcatagtagttaaagacaggagctctgaaggcagactgcatgagatgtaacacaattctgtggtgtcctaattagggaaaaggagtcaggctggtgggagcaggggaaagcaaaaagaaaaagcagataagctacaaggacacatagccctcctgtgcaaataactctcaatcttcctatgcccaactatcaccagacacctgcaagttagctcactgcaaccttggcattatcagtactgcacaaagccctcttcagcatacagcataaacactatcctataaaatctccagcaagcctttgtttctttgcagtcagcttcccttccgctgatcctgcccattgtctccctggcaacgtattttcctcccttctctaacaaatttgcctttcttttacctacaacggtaaacccttttgtccctgcacctcgggcctagatagccaccgctcccccatgacaaactctaatatggatcaggtatgtaaatgtctctgcttcaccttcctcaaccataagacgaaaataatagtactgacttctagggttgttgtaaggtctaaatgtgttaatacgtgtaacatgcttagaaaagtgctcgacacaaagtaagtacccaataaatattaactatgagtaatattatcagtattgacagcaccttcaaaatctatatagttgactcatccaacaacttagattcaacaacttagagctcctcaaatgcgtcaaacatcattcgccctctacttcctctaccgactttcatagccacaccctgcacttgagggctttatacctttcatgttgtgttgatagcaagggttttccaaatagattaacctccctgaattttgattgcccactatttcccaaatcccttcaaggcattctctgtatgctacacaatacactaagtatatataaagaaaggagtatattactccattctttatataggtaaagcctaaactccttttcttggaatataggctctccagatctgaagtctgcctaattatttacacttttgctttcacataccctttgaactttctcacattgtcttcgtgtttgcatgtgctgctccagcttctaagcatgccctccctgtcctcataccccattccccagccacttattacgctatatgctgtagtcccattcagctcggttgcaacctcttccctaatgaatcagtccatcattaacaaagaaagggagggagggagggaggaagagaggaatgaaaggaggaaaagggaaggaaggggaagggaaggggaagggaaggggaagggaagggaagggaaggaaggggaagggaaggaatgggaggaaaagggacaaataatgaatgatatgctctaatctttttcccctagatatagaagacaaagagcaaaatatacttcactaaaattggatttttacataaatgttctttcctttgttttttggttgctggtccacttacaaacacttttcatatttgtatgtctttccaatggttatcctgttttgttcatttcaggcatatggccctgatcagattaactgacatgatgtatatgcaaagccttttgagttcttcagaaaaataaattatcttattcaagactgattgcttataaggaacttattatagctaatatagtaggcacaattttttttttgtaattctcctagatgagtcagaacttagttttgacgtaggtaaaaattttatggtcacaaatctcaggtgtgagaaaatctctttccttgatactctatataaatagaggatataaatatttcaagtctggaagtagtgagagaagctggtaattctggacatatagtgacagtcaaaaaggagctcaggtacaggactggtctaagctgctcaagattcaggagacagccagtacacagagaagctgaggagatacataagatatatctaaaacatttatctaaccttctgtggtaacaagctccttaaaggggctggatgatgttgtgttcactttttatcaccagcaaaggctaagataatgtatatagtaaatatttagtaactatttattaaataaataaatatttaagacagaataaacaagtataataaatgaaccaataagaatgcaccatctaagtcaaaatagccacttttatccttaacattgtacctgctttggctgctgcagaagcaaacttgttggcattagacaaatcaagctggtgatttaataaattccaatgtaagtcttaccagtattgatgaataactatccagcactcaccatgaaagttaaagaaacaacacagaaaaagttcctaagtggtcccaatttgaaatgatcagataacctataaaagaacatattcatattatactaacataaacacatataaatgcacttacagcagttacacagtattctcttcaataactagtttccttatgcatta

SEQ ID NO: 10034 - DNA, 6000 bp, Homo sapiens
agtgcaatatcaatagagggaggaagacccaaaagagtttaaaactttagaggctaatgtcacttttttgtacacttagctccaatcaaactctaacttcaatcatgcattatttcaaagaataattctcataatctggattcataggcttttcaaatatcctagggagccactatgagagttgatctttgcttttcacacttccctgttcccctatactcctttacttgttttgaagagtgctgagtagaaccgggaaagatgagcactattgctgtctgcaataatgtatgtccacataaagcacaaggaattaaatatagtcataccagacctgctctggccttaagaaagccctgagatttcttctctgggtcacatggggctggaatcagcctgcagctatgctgctgaccttctttgatcccaacactgtggaccagggagaggcagggcatgtcttccatctatgtggttcctatgtaattcgagagccatcctctatgacccaaactttcagcccctagtccagagaattggactcatttgtgaaccattgctcctacaatgggttatgattggacatcttcccttaggtttccttcaacagttacaatatgaacacatccttttcaaatgcccttggagcatataccaaaatatataatatccttagcaataaaacaaacctcaacaaatttaaaagaatgcaattatacagagaatgctctttgaccaaaagggagtcaaactagaaaacagaaaaatagcagaaaaatgttcaaacacttggaaactaaataagacatttctaaataatccgtgggtcaaaaaagacatttaaaaggaaattaaagagtacattgaactgaatgaaaatgtaaatataacacataaaacatgtgggacacagttaagccagtgctgagagggaaatttatggcactaaatgcttacattaggaaagagaaaaagttccaagtcaataattaaagtttccacctcaagaaactagaaaaagagtagcaaaataaactgaaagcaggtagaaggaagaaaataataaggataagagcagatgtcaataaaattcaagagaaaataatagagaaaataatagagaagttgttagctaagaattgtttctttgtaactagcaataaaatagccaaacctctaactagattgacaaaagagagagagaaggcaaaaattataaaatcaggaatgagacaggggatactcttcagccatacaaaggatattaagagaatactattaacaactctacacacataaattcaaaagaaatttatcaattcttaaaaaaactcacccaatatggaatagataatttgaatatcactatactattaacaaaattaaatccatcatttaggaacacctgtaaaggaactcttcatgcccacatggcttcattagagaatactaccaaacatttaaagaagaattaataccatttctaccaaacatttaaagaagaattaataccatttctacacagtcttttccagaaaatagaaaaggagagaatgcttctcaattcattctatgatgctattattacctgactgccaaaaccaggataaaaaatacaaaaagaaaaaaaagttacagaccaatagccctcatgaagatatacataaaattctttaaaatcctaactaatagaatttaacaatatatataaagaattacacaccacgactaagatggggtttatttcaaatattcaaagctgattcaatattcaaaagtcaatcaatgcaattcaccattttaacaggctgaagaaaaaaatcacattgatagtattaattgatgcagaaaaatcatttaacaaaatttaacaccattgatagaatctctcaagaagttgagaatagacagtaaccttctcaagttgataaagaacatctgcaactaacatcatacttaatggtgaaagaaggctgaatacatccttataagattgaggacaagacaaggatgatctccattctccattgccatttaacatagtaaactgtgtactccaaccattgcagttaggcaaaaaataaaaaaaaaaaaaaacaaaagaaaacaaaaacaacaaccaaacaaacaacagctaaaaccagaaataaagagcatacaaatcagaaaggaagaaataaaactgtctttcttctcagataatgtgattgtctatgcaagaaatctaccaaaaaaccctctgtattagtccattttcacactgctgataaagacatacccaagactgggcaatttacaaaagaaagaggtttactggatttacagtcccacatggctgggaagacctcacaatcaaggtggaaggcaaggaggaataggtcacatcttacatagatggcagcaggcaaagagagaacttgtgcagagaaactgctgtttttaaaaccatcagatctcatgagacccattcactatcatgagaacatcgtggaaagacccacccccatgattcaatcatctcccactggtccctcccacaacacatgggaattatgggagctacaagatgagatttgggtggggacacagagccaaatcatatcaacctcctaataaaattaagtgaattcatcaacattggaggaatcaagatcaacatacgaaataaattggatttctgcatactagtaatgaacacatggaaccaaaaattagaaattcagtacagtaccgtgtacaaatgtccgcccaaaatgaaatacttaggtgcaaatctaaaaatatgtacaggacttacatgctgaaaactgtaaaatgcctttgaaataaatcaaagatgtaaatttatggaaagacattcttctcatggattgaaaaactcaacctagtaaatatgtcaatttctatcaaaatcccagcaaggttttttgtagacatagacaagttgattgtaaaatgtatatgaataggcacaggtcctagaatagttacaataattttgaaaaataagaatgaagtatgagaaatcatgctacctgatttcaaaacttattatatagctacagtagtcaagaatgtggaggatagacacatagatcaattcaacagaatagagagcccaaaacataaaatgtaaaactataacacttttagaaaaatacctaagagaaagtttttgagaaataggctttggtgaagttagactgaacactaaaagctatctataaaagaaaatattgataaatatgacttcactaaaactaaaagctgttctgtgaaagtccctgttaagaagataaataacaagctacagactggaagaacatatttgcaaaccgtttactaacaaaggacttgtatgtagaatataaaaagaactttcaacagcaaataaactaaaccatgcaattagaaacggacaaaacacatggaaagacatttcaccaaagaagattcaaggacggcaaataagcacatgagatgttcaatattacttgccattaggtaaatgtaaattaaggccctaaagagatatcactacagatctattagaatagcttaaaaaaaaaaagcagcaaaaccaaatgctggcaaggatgtggagaaacgtaacttctcatgcattgatggtagagatggagacttgtacagccactctgaaaagtagtcaatctctttaaaaattaaatatacacattacagattcaataatcaaaacttttggcatttcctatagaaaggaaaactatgttcacacaaaaacctgtacatgattctttatagcagctttatttttaatagctcaaaatggtaatcaaccaaaatgttctacaagaggtggatggttaaataaacggtgatacagcctcagcaataaaaagaaacagccattaatacatgcaacaacttggatggatttaaagggcattaggctgagcgaagaaaattcaatatcaaaaggcagcatattgtatgatttcccttacgtaatgttctgacaaaagttaagagagaacatattagtggttgccaggagttagagatggtggagggaggggctaggtgtgagtataaaaagcaccagggagatttttgtggtgatagaagagtttgtatcctgacggttacgggaatctacacttgagataaaaacatgcaaacactgtacctgtgtcaaattcctggttttgtattgttccgtagttaaataagatgtaatgaatgaaagaaactgggtgaagggtgggtacgcaggatctttctgtattatctttgccatttcccaagttctatattttaactatcttaattatttttcaatacagaaaataatttaaaataagccctatttgccttgggtagttgtggctcccattattacgcaagaggagaaacttgaaactgtggaaccccccaatacccagtttcacatacaagcattacctgactggggccatgccctgagaaaggcgctgggcggcagcaagttggtgagccagggaagtcttccctcgccctgagggtgcggggaagcggcgttggcgccactgaagctgggtgtgagggaggcgtcaccgagttcagccccaccctccaccgctccccaagcgggtccggcgtccgcatcgcatggccagaaggcggggagccagaggcgccaggaccctcgcgtggcgctccagcaccccagaccgtggcggcgcctcgccttagggaagagcaagggaagaactttatttgaaccgcgaacattttttggtcactgagatcgagtctcccagtgctttggcttcccgcctctttatcgtgggtttgatccctgagctgctctcctttcccgaacctcccggggtgcagcctagagccctcccgcgcggctgactccagagtagaggaagggaggcggcctccggctggtcccccgaagccctcgctgccccgcagatgcggatggccagccagtagcgggcggtggccccgcgtcccgggagcgcacagcaatgcaggcgcttaacattaccccggagcagttctctcggctgctgcgggaccacaacctgacgcgggagcagttcatcgctctgtaccggctgcgaccgctcgtctacaccccagagctgccgggacgcgccaagctggccctcgtgctcaccggcgtgctcatcttcgccctggcgctctttggcaatgctctggtgttctacgtggtgacccgcagcaaggccatgcgcaccgtcaccaacatctttatctgctccttggcgctcagtgacctgctcatcaccttcttctgcattcccgtcaccatgctccagaacatttccgacaactggctggggggtaagagtcgcgccccgctccttcgctccttctctcttaaccctctgcctttcaggggatctctctctctctctctctctctctctctctctctctctctctctctctctctctctctctcctctctcgtctgtctgtctctctctcgtctgtctcttccttacacttctctgtcaaatgaatccggtgctctttcttagaacttcgccacctgtgttcacctggacataagttcttttggccgcctctgattcccctccagtgcttcctccttgtggcttagagacataggttggggaaaagcttcggaaaggtcccgagcagtgaggcaggaagtcgcacccctcgccacttatttcagctccctttcccgtcattaccaggtttttctcccctagttttcttactaaaagtgagataaaaatatttcaaataattaaaccaaagttaaaaatctcatttcctcattcccccaccctccagcctcacttcccagttgcttgcagacagcttcttgtacctatgagcataaaacaaatataattcatgtgcagaaaaaatatattgaactagtccttttaaaaactgtattaagtgtcatgcaggaagaaggaacacagaaaactgatgccctcctattataaaagaagagataacatt

SEQ ID NO: 10035 - DNA, 6000 bp, Homo sapiens
agggacagaagcacgacctggccctcctttccatttagagcacattccatctggagaggtcaaccgaaatattaatcatgtggacaggagaaaaggatgtgaaaaaaccatttctcttatctcactttgaaatgtgaaagtgctattattacacttaaaatgcatgaaaaacccctctgctacctgaagagtaggaaaccatccattagttcaataaatactgccaaggcaattttcgtcattttcttcaagaatatttcaagaaccaatttgtttcaactgacacacgctgagttattaatccctagtaacttctagtaacttcctaccgtggcagtgctaaacaatgtttgttaaaaacacctttggggccgggcgcggtggctcacgcctgtaattccagcactctgggaggccaaggcgggcggatcacgaggttagaagatcaagaccatcctgggtaacatggtgaaaccccgtctctactaaaaatacaaaaaaattagccgggtgtggtggcgggcgcctgtagtcccagctactcaggaggctgaggcaggagaatggcgtgaacccgggaagtggagcttgcagtgagctgagattgtgccactgcactccagcctgggcgacagacaaagactctgtctcaaaaacaaaaaaaaacaaaaaacacaaacaaaccaccttgggtacaatttcctgaaccagagtctaaagacagcgagtgtccccagatagaccagagggctccatcgccattgctctgttctctccgcttctgttacgagccattccagagcgagatcctgctggatgctgatagtgaaccacacacagtactgaatcaggttaagctctctgaaccttcaccattctttatccgcagagcaaaattttaaaacaacatctcactatttaaatcacaaggtctagctggcaatcagatgggagcacattacatgtgctagcctgtactgctcgatgaactctgtacggacagaggctgcttgcatgctacactgagacctttttttttttttttaaagatggaatctcgctctgtcgcccaggctggagtgcagtggcacaatctcagctcactacaacctccacctgccgggttcaagcaattctcctgcctcagcctccccagtagctgggattacaggcgcacgctgccacgcccagctaatttttttgtatttttagtagagatggggtttcaccgtgttgcccaggctggtttcgaactcctgagctcaggcaatctgcctgcctcggcctcccaaagtgctaggatcacaggtgtgagccaccaaacccagcatacaccgagaagacttctgaggtctgtccctgcagagggagggagtgtcactggcttctagcaggaagggggtagatggggcaggcatcagccatctctgcctctaaaaatattagttctcattatctggaatatgattctatgggtaaatcttagtgaagaacagcccttaggctataaatacgtaatatgagttattctacattattgtgattctctttctttcttaaactatatagatgttgtgacatcatatggaatttacggcataaaatggggataacagtacttccccctcataacggtgaggattaaatgtaaaccgtgtggcacaaggcctgaccaactgtaagggaccagtaactatattattaatatagttactatatattattatattaatattatattaatattataatcacattaatattaatatattaatattataatcacattaatattaatatattaatattataatcacattaatattaatatattaatattataatcacattaatattaatatattaatattataatcacattatcaatatattaatattataatcacattatcaatatattaatattataattacattattattatattattatatcaatattatattaatattatatcgatattattttaatattatatcaatattattatattaatattatatcaatattatattaatattatatcgatattattttaatattatatcaatattattatattaatattatatcaatattatattaatactacatcaatattatattaatactatattaatattataataatatattaatattttaataatatattaatattataataatatattaatatactaatataataatatattaatatgctattacaataatatattaatatgctaatattataataatatattaatatattaatattgttagtatattaatatatagtaactatattaataatatagttagtatattaatatatagtaactatattaatatagttactgatttaagaactacattaatataacttattttataaattatttcagaaataaggaaactgaggcacagctataaagcaatgtcctgagactggcacctgggggctgccctcttcctgccagactgagtgcctcagagtgctacaactgaccagaggggagaagccaactgaggcagcctgtttacttctaagggactaacccacatgaaaagacccaggcctcctgcgccggcctcacggcccctacacgcgttatcaagcttggagtcaactggacgacctgctgtccctcagacagctgtgagtgccacacttcaccataccgggacaatgtgcctttgcatgtgtgtcctctgcccaccctgggcccatgaacagctcactccccttgcaaaacttgactgtaactccctctagaagaatttttggactttcctaactattacactttttcctgaccgggatctcctaaggcactcaggttccatctttgatttcttcaaatatttgtgtttcttccaagggccaagcattggagatccaaaaaggagcagcaattcccgtccccgtcccaggccttcagcacagggcagggaggtggatctgctcaataccagaagtttgagcaacctgtcctatttgggttacatagcttgggtggtgaacctgagctggccctttagagactttcggaggtaaggcagaccttttggacaaactgagttgcaagaggcgaagcaaggacaacagccagactgtgcgggactcgaacgacaagccaagaaggttaagaataacagtatttagagaacacttgctgtgtgctctatgtgctatcttacttaattctcacaaaccaccacgaggggtaggatgtatactatcatctctacttttgaaatgagaaaactgaggcttcagtggtgaagacaaatgtgtctcttctagggaaccacactaccttattctcccaccccggcccgggggtgtgtaatgagggactcctatcgaagtcagctgtaagtctatcttgcctattcattatacaggctgtcgtcttcgcgcagtaaggataatatgtgttttgattcaaagaccatccagcttgcacactgtgatgaacagagatcaggagctcatgaaggcaagggcaagtcttatttacctttatctccccgaacctagaagcgaggtcaaacagaagcgctcggggtagcaagaaggctttgtagatattgaaatgtgaatgcatgcccagcccttaccaggtgcgtgaccttaggaaatgcacttgtcctttctgtgccttaattttttcaccaacctgctaatgtatgttcctcagtgaaaatttaaaaaaaaaaaagttaaaaaaactaggaagcaatgagtttccatagagttacttcccaaggaacaaggttacgcgcttcgggagagagccgatgaaacatcaaacgcagcatcctacacagcccctatccaccgtccccaaacctgcagagctcaaagtaaacgcggaagggttaacaagcagcttggtccagggcgccgcccgaagtgactgactcggcctgacccggttggaggagtcgccgaaataacacgagtgcagggtctccaagacggcgagagtttccaggtcactccagctcagagaacagcagaggctttcggactatcaagtcagtgccgtgtgcctgtcacggcctgtgccgctcaacgaggaaaccgacgcaccgagaaggacgcagccggccgagagcagcgtggggtccagatcctgccttccggctccccgtgcgccccccgcttaccttcctgagggcccgtgcgcgagacaccccgggcagtcccacgtcgtggcgcgtcttccggcccaggatctggaacttctgcctgttaactttcacctcgaacggattggagttggccttcgccgggccccctcgcgctcccgccggcgccccggaggccttccttcgcgccccgaccttcttcgccttcgccatggcgcgcgccccgctgcgcccaagggcccgagacccgaagagagacaggcgcgcgctaccctaagacacgtgccgggccgcggaaccgcttcctcgtctcgcgagaacagcgcagcacctccgactcgcgagaagtaaacaccgcgcccgcaggctcggcttactcgccgataggctcagcgactacaactcccagcaggccacgcgccgcggcccgccgtgtactcttggcgcagggccttctgggagctgtagtgccccggccgcggcggcgaggggcgctccctcttcagctaagccgttagcgccgagcccgcccgggagcgggtcgccggccgcggcgggcgcccctgccagtgagcccctgtccgaagtgagccacggcattgactcggggctgcccgggggcagggcactgaggagggagttgcgcgcgcgaggcgagggcgatggggccaagaagaaccggggcgatagcgcggcagcggtgacagctgggacccgccgcggtcgggctgccccctcccctcgccccgaccgctcccctgctggtgagggcctgcggaggcggcggcggcggcgcccttggtggcagtggtggcggcggagcagcctcccgggatcgtgtccggagctcgaggagagggtggtgcccggcgagctatgcacgggggcggcggcgtctcctcctgttccgcctcctcagtctcctcggtctcgcagaatccgccggcggcggcggcgccaggacatggagctcgagaacatcgtggccaactcgctgctgctgaaagcgcgtcaaggtgggtgcgcggcaggcgcccccgaccccccccccagagaaccccgaatcccggggaaccctggcccccctgaaggaacccgacatccccggagaaccccgatttccctggagagccccgacacctcccactgggggaacccagatctgcacggagccggagccggggtctgtgcagtgtggtcaggctgcccgggccaggtcccagtccccatctcctggcccagatgagagaagtctgcgctttgctcttcttagtcttgccctgtgtccttgtcctgtcctctcggtgtgacctcggtgacagtgttgcttcaggatgcggcaggcagtgtcctgcttgtgttggacaacctgtcccaccaaaaaagaacggcgtctttatggtcttaagggggacaaagaatagcagcctgggaactactctgggcgagaaccttccgataatgattgtagggcaatgttatttttaacatagctgcttggttttgaggtttgatctgaggctctatggtgtgtcaagtgtgctttagcacgacgtggtcacagatggacaagttggcaaaaattcagccttttatcattattaaagtgaggcagaaatttaaaaatagtaataagtactgcattcattcactccaagaaaagaaaaagccaaggcccagaatgtggcaaggcaagggttaaaaagaaaagaagaacaagttttcttttgcttagcaagctcactttaaggacagttataagataacgctgttctgtttgagaagtcgaatccaaaggaataggctccagacaccccccttccagagcaggggtg

SEQ ID NO: 10036 - DNA, 6000 bp, Homo sapiens
ccgagccgtcgagagacaccgtgggcccgtacctgctggccctgagctccctgagcctgcgtgctcgttgctctgagcgcacacaaggattcgatggcagataaactactgccgcatggggagtgtgcgcagacccccaagagtgatgggcccggcgggtgtgtggggtctggtgggcgtgtgggagggctggggctggagtggggacactggcttcacaaaggttgtgacacagagctgggccctgacaggaggggggcagctgacaagggggccccgtgggtgtgggcagcatccccactgggcaggaagggtgtgagccgcgcagaggcctgccggacgcctggccaccagcactcccctctgggcctggcttcctggtgcagctcctgaggcacagcttcccccatgctttggggccaggaaaatactcactggggacatgcaggcccatgggtgtcccttgaggtggacctggtcaagctctgacgaaccccaactctctcgggaggacagatggggtttgggttcctctgttgcctgggtcggctcagaccctgacacaagcaagcccccaaagtctggaggttcctcctttccgggacgtatggaccctggcatgttgccacaggcccaagggaaggctagggaaacacctgcttagaggctgacagggcattccagggccttctgcaaagggatccggtccccgtgaagggactctgggcctttgcaccgattcccacatggagactgcatgaggcatgtggcttgctgggggcctcaggggccccaggtcccagctcccagctctccttgtctctaattatggacgccgtcaaccctgagtgagccgccatccccccacccctacgagccccattggtgtagcccctagagtgggctgactccagcctggctgcccactctgcctgccattccctgcccaggaagtgcatctacctgcctctgccatcaggatcctgttgccctgctgtgggagggacccagtccgaggtcccacctccccctatcagcctccacctgctgaggacacccacaaccaggtccccaagtaaggtgtgggcccctcagagaacattgttttacatgttttcttattggggtaaaacacacatgacgtacaacttaccaacttaaccatcacaatttttttttttggagacaggatctcattctgttgcccaggctgcagtgcagtggcgcgatcttggctcattgcaacctcacttctcaggctcaagtgatcctcctgcctcagtctcctgagtagctgggaccacaggcacgcaccaccacgcccagctaattttttgtgtttttggtagagacggggtttcactgtgttgcccaggctggtctccaactcctgagcttaagtgagccacctacctcagccttccaaagagctgggattacaggcatgagccaccgtgcctggcctacaatttttattttttacttttttaattagtgcaaatcccatagtatatttatatatttttaattaacaaatgaaaaattgtacaatctgatgctttgatatatgtttacactacagagtgattaagctaattaatgtgtcccatcattcacatcccattttttgtgatgagtacatttaaaatctactcttagagattttcaagggtacattattattgactagtcatcatgctgtacaatagatcttctgaacttaattcatcctgcatagctgaaactttgtgccctttgaccaatgtctccccaattcctacccacccacagcctctggtaacctgcatcctactctctgtttctgtgacttggacattttcagattccacatgtaagttagaccgggcaatatttgtctttctgtgcctggcttatttcactgttataatgtcccccaggtttatctgtgttgttgcagatggcacatttccttctttttaaggctccagagtattcagtaattcacgatgttttctttatccacctaatccatcgacgagcgcttaggtgggttccacatcccggctattgtgagtggtgccgtgctgagcctgggagtgcagacgtctctttgacacactgatttcatttcctttggatacatactcagcaatgagattgctggatcacacggtagttctagttttgatttgttgtggaacctccatactcttttccataatggctgtatcttaaccattgttaagggtacagctcaggggtatcaagcaccttcacactgttgagcaaacatctccacccatctccagaatgcttccatcttcccaaactgaaactgtcaataacttctgtcctcttctcccccgcccctgccacccacccttctactatccgtctctataaatgtacctactctaagaacctcctataagtggaatcagacagtatctgtcctttgtgacgagcttatttcacttagcatagtgtcctcaagggtcatccgtgtcgtagcctgtgttggaatgtggggggacgcccccacaccccgagtcccgtggaagaattatcatccatcccacttgttcaactcaggagtgcctccttaagcaactgtagcctatgagctgtgggtagggccgctgagccgctgcctggcaggcacggaagagcaggtgcacgcttctccatggccctccctgtgccaacagaggccgccctgccagtctgggcccaagagtgaagcctacaggaggagaaccacaggggccagggactgaccacccagagacttgggcatggttctgtgtctagcccctccagatggactgaatgagttttgcttaattggcaagacctaccttttcaaaaccttccagcatgacacttgacaccttctctccgtctcaggcaatttctccccacttctgggggccctggctttcacggggatggactagggtgcttcctcccacagaaacagcttcttgggccacccccctgctgggcatgagttctctcacaggctcggtgacccctcgtatgagctgctcgtcctcttcccctacccctgtccatgaggcacctggaggccgggcaagtgtagaggaaaaagccaaagggaaagaagagacctgcaggtggtgtttccccatctctcactcagggccacttgtccctgccctggagcctcaggaggctgagctctgcggcctgcttccttctggcttggcgctgctctggaagattccaccatctgcgcataggcaggagccaagaaggtccacagttttgggggggccagggtgggggcagtttctttcctggctcttttttttttttttttgagatggagtttcactctgtcacctaggctggagtgcagtggcacaatctcggctcacagcaacctccgcctccggggctcaagtgattctcctgactctgcctcccaactagcttcgactataggcgcgtgccaccacgcttggctaattttttgtattttagtagagatggggttttgccatcttgcccagggtggtctcgaactcctgagctccggcgatctgtccgcctcagcctctcaaagtgctgggattactggcacgagtcaccgcgcctggcctcttccctggctctctctgctgggtcatcaagggctggctgtgtcccttggccataggtcgcagctcctgttaagtatctctctctctttgtctggcttcctgtaaccgctctggccgcgctccttcagccctgcaggtgaaaacagttccctccctgctgttacctgtcccaattcagcaccgccctgtggcttcccggctcccggaccgcgcctctgccagcgggaaccctgctggactcttaattaattgtcccactgagaatgccattggtttcctcctgggatccaaactaatcacacaagactagatgatggagagctgccaagaaaccatggggcggtggcggggacggaggggaagcgttttgagcccatcaaggcaggtgacaggaaagaagcaaacccgagaggggccgagtccctgggcgggcggcagggctggagcgtgaacagcagcgacggatgcgtctcgagggaaaaacgcggcgggagagaatgaggggaaggcaggaaggaaggggcagggagacccagcgccggggaaggaagacacgaagagggcgaggaaggaactccggcctaaagggtgaaggcggcggctgggacagggccagaggcgcaggccggggccgggcagctcctcctctcgtgccagcggtgcctccggtcccgccctcgctgctgcccgcgctccgggaggggcagacccgctggacgccgcagtcaccgcgccgccttcgcgggcgtcccggggcccggagggaacggcctttcctggctgtccccgtggcttcgccgcgggaactcacgccgcccccgaagctgccgccagctccgggcatctgcccagccgaaaagccagggcgccggggcctgactccccacagccaggtttcccgggcacagagacccaacgggagcgggacttcctcggacaccgacggcgaaggacagagacagcccaggcaggggcggctcctcccggccacaccgacctgcccttcgcagggtgtcccgggccagcggaggcagagaaaaccagcttgcgggaacgcagtcgctcccagcaccagggccgggccagtgcgggtacacaccgtgcgcaccagcgccgccgcgcccccaacggaagtcccgcccccggccgtggaggccccgtccctcgcttcttctcatccctgcttccctggcagtcccgttaccacgctgtcccgacgcgaaggccctcgccccgccccgtgccccgcccccgcatcgccccgccccaaccccacccccttggccccgcctcaccaggttcgccccgcccctctccgtccccgcccctcctccggcctcggccccgccctcgcctcgaccccggggggcggtggctgccgaggcgaccgttgcgcgcgcgggcggtggcgcgggccgaagcgcccggagcgggagcgagcggcgcggcccggtaggtgtgcggggccggggccggggcgggggcagggcgcgccgcctccgctctttctttcgtctccggggcgcgcgcccgcgccctccgcctcccggccgatcccggccagccctgcgcggcgcccgtcccctcggggtcgccgcccgcccgccctgccttttgttcgccggcctgactcaggctcctggtcccgggcccggcgcggggcggggcggggcgggggcgggggcgggcggcgcggggcgcgggcctgtggggcctccggccgggcgggtgcgcggcctcctggggccccgcgctgtgaggcccgcccgggcccttggcgggacccgcgggggcggcgccgggcagggggtcccgcgggcgagatgcgcccgggagcgctgggagggttccctcgtcggactccacgagcggccgctttgttagggcagaagctgccttccgagacccgaactccagacgcactgcagcgacctggggtcgcctcagccgcggtgccgcgattgtgcagtgtagacagaggggtcccagagccgtgcggtgtagacagagaggggcccaaagctgtggaatggggacagagaggggacccagagctgtggagtgtagacagaaagggcgcccagagccatggagtataaacagtggagtgtagacagagagggggcccagagctgtggagtgtggacagagagggggcccagagccgtggagtgtagaccgagagggggcccagagccgtggagtgtagacagagagagggcccagagccatctagtgtagacagagaggggacccatagctgtggagtgtagacagagtctcatagccgtgcagacagagaaggggcccagagccatggagtgtagacagtggagggtgaacacagagggggcccagagccgtggagtgtggacagagaggaccacctggc

SEQ ID NO: 10037 - DNA, 6000 bp, Homo sapiens
ggccttcattcagctctttctgtgagctgagagcccagccctggaccaggcagtggggatgggacacagctgagatgtatggttactgatgatggccatgccccatggggcatgcaggaggccggcaaaagtggcccagatccagcccgggaggtcacgggaggcttcctgaaggaggaacatcatgggacaagtcttgaaggaagcgagccccaggaaagatgaggcagagggcatccaggcctgcggacagcacatggtcaggcccagggtccacaagagttaatgagaaatgtcctcacagctcacagcgtggagaggagggctgaccgcaggagccaggtggagctgtgcagaccaggcaggcgaggcagaacccagccgcagccccggaagagctggctgcagcagcaacccagaaatacatcttctcctcagcctaggagggtgggcaaggccacaggtgccgcatatgtgtgtacacatccatatatgcgaagccatgtgtgcacatgcatgactggtgtcatgcatagggacagatgtgtgcagcacaggcatacacacgtgtgtgcaatgtgcatggattcgtgttatctgcacagggaaggctgtgcgtgcccgcagtatgcacaggtgtgtgcacagcatgggtgcatcatttctacatatgccagtgtgatacatatgcatgtgtagacatacgtgtgcaaaaagcacgtgtgtatgatagtgcatatgtatatatgcacctgcatgtgaagagtacacgggcatgtgtatgcacacgcaggcatgtgtgcatgtgtgggaacatgtatgtgtgcatacatgtgtgtatattctgtaggcatggatgcactgtaaatccacatggtatatgtagacagtgtgtgtgtggatgtgtgcatgcatgtgtgtgtgaaggcatgcaagtgtgcatgaataggttgcatgcttgcatgcatgtgtggatatgtgtatgtatgggtgttcatgcttgcatgaacacacgtgtattcatgatatgtatattcatgtgtgtgcatggatctatgtgtgcacaaggatgtgtgtggatacatatatgtgtgtggacactgtacatctgcgtatgtgcatgcatgcctgcatgtgcagggagggggctcaaggagccaaactcccctccacccgagctgaggctgctcacgaagcctagagcgcggcatcccaggcaggcacccagctctctccggcacagcagccagggcccaatgtcccatggctgtatggccctgctggaccaaccctgtcctcctaggccccacgcatcatgggtgagatacaggcaggttcgcctctgcagctccaggacgtgccacttctaggttctcagttctaggaaacacctgtaggtttcccctctgaaatatgcccacttctgccatgtactcccctgcacacgtacacacagacagcccccacaacccccgccagtgcagcctgactcccccagcaccctccttcctcgcccctcctggtcgtgccagctcgcgtcgtgcctcgtcaggacaggaagtcttgctgggtacgtgctgttctgcttgttacggacaatccggagcagttcctcaagcctaatttcaaggtctgggggaagagtcctctccagcttccttgcaaacagctgcggtcccgggccctcccaccacaggcaggcctgcgtgcaatgcaacccctatgcatggcccagggcttcgctcctcctaatgactccaggccccagctttttgcccttggctccatccaggccctggagtggacccttctgacccctccctggtcatgccaggaggtgttgccagcagcatgtcagcctgttggctgccatccccaagggcctgggccgctcactggccaggcactccagatgccctcagcctggcctgtgagtggcccctgccttcagccctcctgggcagtgggaggctcatctggctcagggccccaggtgctccgtgtccttttccctccaaattcccgtgcctgggctgccatctcttgggaacataggagccaggatcctagatagatccccatgcccctgcgcatcccccaaagcacttctcaaaaagagagcccttcaggatgggggtgggaggcacgctgatgccgagggagagagaccttctccaaagcctgcatctggcccctgccactgctctttcctagtcctcctgtctccccacgcccccagtacaaagcccactcccactggaagaaggacagcctacagaggcctcccccttcctcataacacctcctcactctctaagcacagtttggtcacctcctccaggaaggcttccttgacaaccccgctcccaggctgggggaggagccccagggcactgatggttgtcagcgcattcacctcagtgggtggccccatccacccacagatggtgagcacctcaactgaggccaggcccccctcactctctgccatcgcagagggctcaatagagacaagggctccagcgggccgaccatgaaggaagcaggtgtgtgtgggcttccctgaaaaatgcacctccaggtgccctggacaggtggcaccttttaggcaaccagaaccaggagggcctttagtaaggatggtgaccctccaccatccccaggtcacacacctcccacaggacagccatggcctgttgcctccccgaagggcatatgtgccctagactagcacaggactggcacagaaggctttggctccaacgtgcgcccctgcttggcaggcccatcatctgaaatatttgctttctgccgggccctggctcggcctccacacccccaatgcaggccctgctggtgacaaacatggtgaagaacgaagccgtagctcctggcagtgtctctgcggagacagacatgctccccagtagggctgagcagcagagaacacgacaggctctgaggctaaagctggcgcccttcaggagctcagagagaagctgccccaggccacgggcatggataggcatcccgggggtagggcagtcactccagccgctcttcatgatgacctcccgggcactcagaagcgccccttccccgccggttctagccacaggatggacagaccttccctccctctctcctgcgggcccatgcagggagaggccagccagctggggttcgtttctggacgtttgggagaagggtcgtcccttcggtcctagcagagaaacgtcaggcctgagaactccagctctcctcctggatcacctcgtccctggaagtccctctcccacagaccccaggctgcctggaggcagaagccagcacccaacatgggccacagagtggcagtgcacgtggcagtgcacatctgcagaatggaggtgcgcggacgggggcgagggtgcacgggggctacctcaacggccgctctcccctgagcccacccttgcaaaaagctccatcatccaggcagctccgttctgggtgtttgtcagaggtggtgactttgaacacctctccatcctttaaaagcagggcctgagagcctaaggattaaacttcaatcactgctaacatgggtgcagagcttgggagcttgcccagggcttccacagacaccgccgttagttatgattcatgctccagcagcgctgggaagtgggccgagggaactgaggccggggtgggtgcggaggtggctctgacggggagcgccgatccaggatctggtccggaccctgagctcggcaggacctgtgcgcacgcaggtagcgtcgcgtcctcccccaggctgcgagaggttgctctgccatcaggccatggaccccgagccgcccgtgctgcgcgcgcgcgtgtgcgcgcccccgcctgcgcccatgcctgcgccgggggaggcgaaggaggctccagtcttagaaagagcagcttctggaactcaccacccaggccggccgccgctcggccccgtcccgcaggctgcaggcggccctggagggggcgccctcgccgagcgcgcgccccgcgccgccgccccggactcctccccggcgccgcgcgggcaggttcgaccaggcggccgcgggctccggttcccggccagctccccagggcccgcggcccgccccgccccgcgcgcccgccccgctgcgcaactcgacccaagttggaagccgatcgcaggcggccgcactcgcgcccagcgcagggcggcggcggcggcggcggcgcagctccggcgagcgaggcggcggccgcacggccaagcgtggaccgcggggggcgcccgcgcccgggagcagccggaggactcgcggcggcgccggcgccccgcccgggaaagtaaagttggagacggagggagcgcgcgggcgcgggggcccggaggagcggcggccggcgccccggcgcgccgagccctagccggccggatgggaggcggagcgcccgggccgccgccgcctgtcgcctgcgccccggctgggctccgggaccgcggggccgctcaggcacgcccgctcgggcgccgcgtcgccgtgggctcgacgccggggcgctccccgtgagccgggccgagggcggggccgcgcgaggaccccgggacctgcccccctccccccgcagccgcgtcgccgctcgctccgggcgcctcctgctctgcacttacacgctcggcagctgcggggagcccggcagccacgctctccggcgcgccgcccgcggagccaccacggccgagggccggctgctgggcgccgcggtccccggcgggcgcgcccgagcagcaggcggcgatgcgggcgccgaccccggctggggggcgcccgagctgccgcggctgcgccccggctccaggagggacggcgtagctcgcgggaggaccatggcgtccccggcgctggcggcggcgctggcggtggcggcagcggcgggccccaatgcgagcggcgcgggcgagaggggcagcggcggggttgccaatgcctcgggggcttcctgggggccgccgcgcggccagtactcggcgggcgcggtggcagggctggctgccgtggtgggcttcctcatcgtcttcaccgtggtgggcaacgtgctggtggtgatcgccgtgctgaccagccgggcgctgcgcgcgccacagaacctcttcctggtgtcgctggcctcggccgacatcctggtggccacgctggtcatgcccttctcgttggccaacgagctcatggcctactggtacttcgggcaggtgtggtgcggcgtgtacctggcgctcgatgtgctgttttgcacctcgtcgatcgtgcatctgtgtgccatcagcctggaccgctactggtcggtgacgcaggccgtcgagtacaacctgaagcgcacaccacgccgcgtcaaggccaccatcgtggccgtgtggctcatctcggccgtcatctccttcccgccgctggtctcgctctaccgccagcccgacggcgccgcctacccgcagtgcggcctcaacgacgagacctggtacatcctgtcctcctgcatcggctccttcttcgcgccctgcctcatcatgggcctggtctacgcgcgcatctaccgagtggccaagctgcgcacgcgcacgctcagcgagaagcgcgcccccgtgggccccgacggtgcgtccccgactaccgaaaacgggctgggcgcggcggcaggcgcaggcgagaacgggcactgcgcgcccccgcccgccgacgtggagccggacgagagcagcgcagcggccgagaggcggcggcgccggggcgcgttgcggcggggcgggcggcggcgagcgggcgcggaggggggcgcgggcggtgcggacgggcagggggcggggccgggggcggctgagtcgggggcgctgaccgcctccaggtccccggggcccggtggccgcctgtcgcgcgccagctcgcgctccgtcgagttcttcctgtcgcgccggcgccgggcgcgcagcagcgtgtgccgccgcaa

SEQ ID NO: 10038 - DNA, 6000 bp, Homo sapiens
cctggaggagtcatgcccagtttctggcctgcccttggcccccggcccgtgaactcccagaagacagggacagatcttatttgccctgtagtcacaggtcccagctccatggcactgagggacccttccgtgtttcattgaggaattagtgggaatgtgttgctgctgagggcatgtgtgatttctaagtgtgtggataatattgccagctgtaatactttcctacctctctgctattctaaggaattccatgctcatgatctctctctctctctctctctccccctccctctccctccctccctccctccccctctctctccctccccctctctctccctctctctccctctctctccctctctctccctctctctccctctctccccctctctcccttcctccctccctccctctctccctccctccctccctctctccctccctccccttttctctctctccttttctctgtctctctcttccctccacatttcctccctcctcctggaaagataatttctactgggattttacaaaactaagatgctccaaggcaggaaaacaaaattaaatccagtcatgatggtgaggcctccagatggagtgcttgatctaggcttttcttcctgagtgattttctgattttcaaagcatttcgtgctctcacagaaaatgtaaaagtgacaggaaagtgtaaagacacagaaaaacaaccaaccactcctagctccatcagccattggtgaccatgactggtggcctggcatcaggatccggtgcttctataccttgttcagaggtcccagtgttctcagtggtttccgctaaacaatccacagtgggatttttccttgggacatctgcttttctttctctctcgctctttctccctccctccctccctccctctctccctctctcctttttgtcttgtcttttctcttttcttttctttcttagatggaatctcgctctgttgcccaggctggagtacagtggcacgatctcagctcactgcaaactccatctcctggattcaagtgattctcctgtcagcctcctgagtggctgggattacaggtgcacaccaccatgcctggctaatttttgtattttatttatttatttatttatttatttatttatttatttatttttagtacagatggggtttcactatattggtcaggctggtctcaaactcctgatccacatgccttgggctcccaaagtgctgggattccaggcatgagccaccatgctgggctgacacctgctttttaatggccgcacaggactatgctgtaggggaatagaatcacgcacttgccgccttcccgtttttggaagtttcattcatttccctgtctttccaccttcctcctttctcttttccgcctgtctatgagcaatcatttttgttaacatgccagattgttccttccagttgctttcctgcagtcagggcttgatagctgtgggctcccccagcccctccaaggcttctaagtgaccatgtgcgtgcagctctggggagtggtggaggtgtcaggaggtttcacaaggggactttggtgtagccactcacagcggcccctgtcacctctcaatgactccagggggagacgatttcacttgcaggggagcagagagcatctcttctgagacatgagcgcagggaagcttcgccagcctgtattacggaaaggcaggccattcactcatctgcaaggatgtactgggcacccagcgtgtacaagagaatgtgctggatacagcagactgtggtgatcacacaaggcttgatttcttcactttgttgagcagagagaagacgtggacaaagtcagatctgatcaatacaaccaccctggccccccaggagaaacagcaagcttattttgtgagataagtgaattgtatcaattacatcatattgcagtgctatcactgatgacaaattcatttccacagatatacaccgacagcttgttacatgcaactggggaggaaaaatgagaaaagcgggaaaagaacaatggttaactgagctcatttgattttatttaaacttgctttagtactaagcttatttcttttacacctattgaatgtaaccttatttaattcttaccccacccctcgaagatgggtcttcctgcccctatttttcagataaggaaacaattaagccattcactttaattaagcagcagtggcatctcagcctctgcacttcatctcagcccagcacttctgttggggctgagatggaagtctcggaaggtgctctgaggaggtgtgactctccctggctgacaggggaaggcttagcagagctttgtcttagaggagtagatgaaaaggaaagtacagagagggcattcaggccaagtcagcaacacagacaaagtcaggtaatgtgggttaagtgcatgggtgatgagtaaaggggatgtggctagatggtgtgagtgtgtgtgtgcttgcatgtgtgcctgtgtgcgtgtgtgtgcatgtgtgtgtctgtgtgtgagtgacagcaacagcaaagggcccgtcatgagtggctaagaccagatgtaggtagacttggaggggctgctaaggaatttcataggcaatggggaaccatgaactatcactaggcaggggaggagccttcgggaactaatcctgaactttatcattgcaatgcgtatctcagcaagaatgggcaggattgcatagttaggagtactgccttactttttaaagaagtggtgaaaatatttaatattttcatatactttttctttttggaagataaaaggattaggtccagcatttcaccctacagaggatttaaatttttcatcaggaatgagatttgagtgtaagaagatgaaacgatattatactgataagaccacagggttcaaaaccaccccctacaacccagggaaggggggcagccaggctggcaagatctgaggccagaagcactggggctttggggagagcagcaaacagaacagatctagacctatcaaggtgccctcaccagagtccagagatctcaccacacacattttctcattcatgcagttgtccagtacatccttgcagatgagcaaatggcctgcctttcataatacaggctggtggagcttccccatgctcatgtctcagaagagatgctctctgctcccctgcaagtggaattgtctccctttggagtagttgagaggtgacagaggctgctgtgagtggctagaccaaagtctccctgtgaagccacgtgatgactccaccgctccccagagctgcacatggtcgctcagaagccttggaggggttgggggaggcccctgctctcaagcccccactatcacaatcactttgtcccagctattcacctgcaaacttgcttgatctgcagaagctgcagagtggcccactcttcctggacatgtcaggaaaactttgacgtggctgctctagcttcagggaaggtctaatttggtgaaaatttgaaagcaggtttgtgggagtgccagggagaaatggggagagagaaagcctctgtatttgatggatggcaatggcttggagctggtgtgatggcctctctggatgacaaggacattggacttagagccagaaggactgaggtatgaatctcggcattcctggtttgtagttatggggacttggcagagacacttgaatgaaacttcctttgcccaggtataagacggaccccctaataaaggttgactgtgttctgatccttcactgcctgctgggatgtcctcagcattttgtgcatgttggccaatttaaccctaacagcaaccaccagaggcagatgctattgctggctattaatatccccatgtgacagatgagaatgtgaggcccaaggggtttaagtggggctatgaatatccccatgtgacagatgagaatgtgaggcccaaggcacagaaccaggggtgccccagcatgccagttgtgcacctgtggcttttcccttggccactttgcagcaccggcacgagagaggcccacagggtgagcctccacaccaccagccaccctttgtccctcagaaagggctggcagagcctgcaggtgagggtgggtgtggggaggggtgggcaatcgtctgcccttcatttctgtcatgttgtggctgtcactggggagaaaatgccaaaaagcttcctggaagaagcagcttccaggaggcttcaccatatccttgtcctgccaagtggccacgaatggattagaagattcccactgggtgagaaggctcagaagccaccacagaggatggcggaggtgggagaggcctcgcaccgcggggctccaggagccaggtgaaggacaggcatttctgtatggcacccagttctgggtgggtcctcccaaggtgcccccttctttgtctctccctctgttgcttttctctcctcttccctcttcttccccccacttcctcttcactttttcttcactttttcttcttcttctctttccttcccccatgcctttctcaaccttgtttccacttcttgtcgctcttcttgcttcaacaaacgtcgatgcagtcacagttcctgggctgaggctgggggatgggaggaagtcctgagggcagcccccgcccccttccccgccccgtcactccctctgccccgcctgcacagcttcttgccaattcattcccgcccctaccgcccctataagccaccaggtcgctccagtttggtgccagcgcctggagggagaggcgtggcgagggctgtgctgcctaggatccactgagtggctcttgctggcgtgtcagctgcgcgcgaaccagggctgggaggctcggctggaggtgtgaccagggcagggactgacctggcccggaacagaagcgcgcagagtcccatcctgccacgccacgaggagagaagaaggaaagatacagtgttaggaaagagacctccctcgcccctacgccccgcgcccctgcgcctcgcttcagcctcaggacagtcctgccgggacggtgagcgcattcagcaccctggacagcaccgcggttgcgctgcctccagggcggccccgggctgctcctgctccgcagagctacgccctccccccgggtgccccggaccctgcacttgccgccgctttcctcgcgctgctctggaccttgctagccggctctgcacctcccagaagccgtgggcgcgccgctcagctgctccatcgcctcactttcccaggctcgcgcccgaagcagagccatgagaaccccagggtgcctggcgagccgctagcgccatgggccccggcgaggcgctgctggcgggtctcctggtgatggtactggccgtggcgctgctatccaacgcactggtgctgctttgttgcgcctacagcgctgagctccgcactcgagcctcaggcgtcctcctggtgaatctgtctctgggccacctgctgctggcggcgctggacatgcccttcacgctgctcggtgtgatgcgcgggcggacaccgtcggcgcccggcgcatgccaagtcattggcttcctggacaccttcctggcgtccaacgcggcgctgagcgtggcggcgctgagcgcagaccagtggctggcagtgggcttcccactgcgctacgccggacgcctgcgaccgcgctatgccggcctgctgctgggctgtgcctggggacagtcgctggccttctcaggcgctgcacttggctgctcgtggcttggctacagcagcgccttcgcgtcctgttcgctgcgcctgccgcccgagcctgagcgtccgcgcttcgcagccttcaccgccacgctccatgccgtgggcttcgtgctgccgctggcggtgctctgcctcacctcgctccaggtgcaccgggtggcacgcagacactgccagcgcatggacaccgtcaccatgaaggcgctcgcgctgctcgccgacctgcaccccaggtat

SEQ ID NO: 10039 - DNA, 6000 bp, Homo sapiens
ctcatcctgaagcagcttttcccttcaatccagctactccctcttttgttattctgtttgattttatttatagcatttagcactgtatgacattgtttattttgaaattgtttatttctctctcctcaataatataagcccaagaaagataaggaatatgtttttaattctgtttctgtccccgggccctagaatagggtctgggagatggttgcagcagaatccctagctgaaatggcaatcttgtgctaattagaaaaaaagagctcccttgcccccgtctctgtttcttttttttttttttttagatggaatctccctctgttaccgaggctggagtgcagtggtgtgatcttgaagagagccctttcttgatatactttatcatcttctgctagaagtttttctatactcattataaaaacccaccctatctgtcacttacacaccatgtattgtcttgcttccaccccatcaaaaatgcttgtggaatgaatggattggtgaaagtcagggggactggaacatctgaaaacaaatgtcagtgtgtggccagcgtctgtgcacctttcttggttgattgaaacttctgtgcattgatttcatggtgttgggcacagaatcccctttttgctcattaccaacaaagatttgtcaagcacccactcactgtgttcgcttggggaattcagacatgaacaagacacaatttcttgatttaagaggctgagattctagagggccaggcggtgatgtgaaagatggtgtagtccagggtcataacggctgcactaggagccagcccagggctctcctggaacacaggacacctgttcagtgcagaggactcagtaagtctttctggagaactgattgagctggctttgcaggatggagaggttcaaacattgctaagtgctttgtacaacttataaaaatccatgttgcccagtctccaagcagtctcatgttcagtagacaaaaggcaattttcaaactgaaatgttttacttgcatttctacttctattttctttctttctttctttccttccttccttccttccttccttccttccttccttccttccttccttccttctttccttctccccgcctcccccgagtcttgctctgttgtccagcagactggagtgcagtggtgcgatctcggctcactgcaacctccaactcctgggtttgagtaattctcctgcctcagccacctctctctctttctgtagctggggttacagacacatcccaccacgcctggctaatttttgcatttttagtagagacggggtttcaccatgttggccaggctcttcttgaactcctgacttcaagtgatccacctgcttcagcctcccaaagtactgggattacaggtgtgggccaccgcacccggccctttacttgcatttcttaagttgtgtgaagtcagcagggattgttctctagaattcccttttactctcctatccatattcccccagatcgtagttccctcacctctttcacacaatcttccctgcaaaactccacccacagctttcaatacctctccccacttctctgctctttattgggaagacaagcacagtttcttccttttgggaccattcctccctcctccggcttttcaggtctaataatgtatccattctctatcacaaaagccaagctagaatcctctttggagcaccgcccaggtcaagaaactgcacagatagagcagagggagaaaggaggttcagaacactcatgcattaattgttttggtctcatcacagtttctttttttttctttctttcttttcttctttttgtaatggagtctcactctgtcacccaggctggagtgcagtggtgcgatcttggctcactgcaacctctgcctcccgcacaccaccatgcctaggtaagttttgtatttttagtagagacggggtttcaccatgttggtcaggatggtctcgatctcctgacttcatgatctacttgcctcaccctcccacagtgctgggattacaggcatgagccaccacacctggctggtctcatcacactttctaaacgactattattaactcacttcccagatgagagaactgaagctcagagagatcaagcgacctgcccaatataccaaagctagtaagtgcctattcttcctgcctgccatacttcccttccctctgtcttcccctttgcctacttaactgtgattcaacccaaagagaaatttccccagaaagccttccctaaacatcttgccttggccaacctccccaactgctgtacacttagataaggctgtgaactttcccttcacagcccttgtcacatttgtaattgtgtatttctttggattattcctgggttaaagtctatctagactttaaacttttttttttttttttgagacggagtctggctctgtcacccaggctggagtgtggtggtgtgatctcggctcactgcaagctccgcctcctgggttcacgccattctcctgcctcagcctcccaagtagctgggactacaggcgcccgccaccatgctcagctaattttttgtatttttagtagagagggagtttcaccatgttagccaggatggtctcaatctcctgacctcacgatccacccacctcggcctcccaaagtgctgggattacaggcgtgagccaccgtgcacagcctagacttcaagcttttagaatagcatctctctctctctctctctctctctctctccctcccattgtataaccagtgggtaaaacaacatatgggacatgtcagtacttgttaaatatttgctgaataaaagaatgaatgactggaattcaaacccatgtctccaaaatccaagctcttgtctgacatcatgacttggtgttctccaggagaagaagataggggaaggtcattccaggttgaggaaataccacatgaccgtttacaatgggtgttcttttttggtggcggtggtggtggcggcagcttgaatccaggctgtattcggagtagtgaaaggagaagaagcaggagctgtggacaaagacaagggcaatatgaggaaaagaccttgcatgcctggccaggaacaggggccacagggagctgatcatgaaacacactgacggtgtttcatcaggggagtgacatgaacatagtcacattcaggaaagatcactgcctgctgggaagacagagggtcagggcagagactggaggccaggaaagtgccaccatcaaacaggatggaggaggcacaattctggacagggatgtccatggccagaggagtggtccagctcccagaagatgaggagagaccagaggtgaggatggcccttcagtttcaggtttaggcacctggacagatggtcttgccctctccagcggcaaaaagcactgagggggaaggaggttgggggaagggactgtgtaggctgagcagcttaagtctgagaaggtgggccacttgcagatgttggtccagggtacaggtgcgtttggtggagggggagactaggaagggaggagaaagtccagtctgtttctagacctcaccatgctgcaggtgtctgggccagcaggtcgcagccggagctatgcagctggctgctgtcacatccctttctctcccagctgccttcagctgagcttaacgccagtagaggccgaaacacttcacaaatgcaacttgtcagctgggaggtgcactcagagctcaggaacactgttttccctctttattgttttccatcattcttttttttcagtttgggttttgggccccgtcagttccttttctgttaaacactgagctatttatccatccctctcaaggttgaaaaagagaaaggctgtaaaagtgccctgcaaagaagaggcctccaactctatgggggtggggggctctcttcctcctcttgtcttctgagttcattccgaattattccccaaaggaaaaatcgttcaaggactgggggcggtggtggggaaaaggacaatctcccaagaggtcagctgaagccccagcctcagggtgttgagagaggggctgggggaagcgggagcctgttcctaggagacactgtctactggacacctcatcctagacggcttccatgagttctgacactgtcccaggagtaggaatcattatcccacgctgtggagaaggaaaccaaggccgggtaaagttatgtagggcccttaaagtcgcagagccaggaataaagtccggattgggactcgggtctgtgggtaatccaaggctgccccgcttacccttcaaatgctctttccccctccggaagccctcgcgtcctcatccttaccccacctcttgttccccaagcgtggccagggctaaggctccagggatgcgccaagcacccttcggttttcccggggagaattttccccggcccggggactagggtctggcgctggggcgcccctcggacctgcgggatcgcccctacactctggcgcgctgagggcggtgagcgagggcgccaaggcacaggtggggcgggagtcgagcgcggaggctcggggggcgggacgcggggcctgggagcggccagggaccgcggcagcgcctcagtgccagcctggcgcccgcgactgcctgccccagcccctcagtggcggcttgctctcttctctcgctccgaaccagacacagccgctgccgctgccgtccggcgcgctacagactcccgagaacagccctggctgtcagcgagcaccagccgcttcctgtccccatcgcggagactggaggggcgcaccacggccatggagccagaggcgcttcaggaggcaagagaagtccccgcgcgctccgcagcccggcgcagctcatggtgagcgccctctggggctcgagggtcccttggctgagggggcgcatcctcggggtgcccgatggggctgcctgggggtcgcagggctgaagttgggaccgcgcacagaccgcccctgcagtccagcccgaaatgctgccgccaggcagcaacggcaccgcgtacccggggcagttcgctctataccagcagctggcgcaggggaacgccgtggggggctcggcgggggcaccgccactggggccctcacaggtggtcaccgcctgcctgctgaccctactcatcatctggaccctgctgggcaacgtgctggtgtgcgcagccatcgtgcggagccgccacctgcgcgccaacatgaccaacgtcttcatcgtgtctctggccgtgtcagaccttttcgtggcgctgctggtcatgccctggaaggcagtcgccgaggtggccggttactggccctttggagcgttctgcgacgtctgggtggccttcgacatcatgtgctccactgcctccatcctgaacctgtgcgtcatcagcgtggaccgctactgggccatctccaggcccttccgctacaagcgcaagatgactcagcgcatggccttggtcatggtcggcctggcatggaccttgtccatcctcatctccttcattccggtccagctcaactggcacagggaccaggcggcctcttggggcgggctggacctgccaaacaacctggccaactggacgccctgggaggaggacttttgggagcccgacgtgaatgcagagaactgtgactccagcctgaatcgaacctacgccatctcttcctcgctcatcagcttctacatccccgttgccatcatgatcgtgacctacacgcgcatctaccgcatcgcccaggtgcagatccgcaggatttcctccctggagagggccgcagagcacgcgcagagctgccggagcagcgcagcctgcgcgcccgacaccagcctgcgcgcttccatcaagaaggagaccaaggttctcaagaccctgtcggtgatcatgggggtcttcgtgtgttgctggctgcccttcttcatccttaactgcatggtccctttctgcagtggacacccc

SEQ ID NO: 10040 - DNA, 6000 bp, Homo sapiens
tttccctggatacaagaatgctcttctcttcctccttcttccctttcgtccttgctcttgcaaggtaggtgtgattgctggaactgaaattagcaacagtggccacagatggctgagcaagaagacaaagtgtctatttcagtttggaatgcttttgagggccatacctgcactagaccacctacctctagattttcatttgaaaaagaaacaaatttgtcttgtttaggtcactgctactttttgtttctgttgcttgaagccaaattgaatcttaactaatatagtatgtatgcatcatttaaaaaattatttttgcttatcaactttttcccactaactattgatttcattccgataagggggcttttattgagtatgaaaaaagcaagattactttgaatatgtaaacattacataccctctccccttttatagcaattatggctgagatgtatatcattatacaaaatccttgtccatatctctgcttttttctgtagatgagatatctatacatagaaacactggatttagtggcatatatattctataaagcagttgtttcatattgtcagcttcctttctagagcaattgtgtcactatatattactagcatggaggcatgcctgtctcaacacactttcgttagagtttagtaatagagcactgttgctatttcagttaattttatggtaaaaacatgaaacatgatagatctcctaaatggatctatttttatgtattagatttctataggcagaacatatttccttgcatttattggccatttgtatttattctgtgaacagatggttttaaggtcttttctaaacttccattctgtggggatcttagtatatttcttattgatttgaaagggtctttggtctaaaaattttaattagtcatttaaatgttttaattctctttatcttatttgattagataatcacttttttttttcatttttagagcccttttccctttggtaaaaattattttttttcaattttaacggtgctgaagcctacagtgccatctttctaaaaaaccactctagtttgcacagagttacatcatatgatagtatctgtgctcaaacatcatctgtatgatgtcttctccttgagaagaaggtgttaaatatatgtaacataggtgttaaatacagtagctaagaggacacagaatttattttatttttatggaagcttcaccttagaagaacattggcaagagtcatggatttcctggcaatgaagtgggatgttttatgtcttaaatcagatatagaagactatgtccatgagattaaaaatgacttggaagcatgaagtttgagattaaaatataagcagctgccttaaataatgctgccttgacatttgattaagttatacaaaccattaacctattctctttctttcattgcttttctttactcattggttatttttattcacacaccccgatttttggttctttctccctcgttattgtctttgtaattttgcttatttgtggtcaactcctccgtggtgaacacttccaattacttatttaactgactatgcttagttttcagttaatatttcatttatatagatacacatatatgtatatctatgtgtgtacatatgtgtgtgtataaatatacatgtaaaacttttactttgaaatttcattttcctgcatccctccagacctctgttgtgttaaagatgattctaaaaactgatctatagctactatttatttaatattctcatgctaccactaataatctttaatatctatatattgtcattatatatttttatcgatctaaataaatattaaatatgtatttaatgtttctgatgctaccactaataatctttaatatctatacttgtcatcatatatattattacaatgttatttttattacttggttgttttattatacttaatacaaccattaagcatttgagaaatgaattgagtaacttccatttttcctcctttacaaataagagcctcttgtcacaattggctagagtttactctttccaaaactatttaagtaacaagtgactccagatgtcaatttgtattttctttaagtacccaggggagttcatggatgtcctgtattaagcaaattcaagtagcataacttcagcttgtgaacatctagttggtcagaattcagcaatatcattaaatctcccttcccacccccaatttttttaaaggactaactatgcgcaaaggactgtagatataatctttccttatacagatgattaaaactagccatttgcattcaagaaaaactgtaatctgaagaagcaaatggacaaaccattaatgattaaaaaggaacaaggaaaaaggcagaataaaataggtgttagaggagatgtcatcaaaatgttacagggtatcatgaaaggagtgatttttggggaaggagtcttggtgagaagaggcttcttggagaacgttggattggagttgagctttaaagaatgaatgacattttaactgtcactttgtgttgggtatgtttttaattctaatgaggtttcaggttcttcagatatgctaggattgatgttacctcttaaagagctcctagaagtcgttaggtcattctaaatgtatacattgaaatacaatttgggaaatttagctagggatgtaatgtgcttgttgaatgaatatgataaatcttaatgatttgagtgtactggtatagaaaataacatcttagccatttgaaatcacgacattttagagcaggaaaagaccttacaaattatgtaatcaacagtctcctttacaaagaaggcaccaaaaggttcagcaattgaccaaggccactcatttaacttgaccagacttttcctctgtcagaaggcatggttttggaatccgcacctttctgtatccattatggtaatttccattgatgatgtgaaataagataattgaatctccacgattgttcatcagacagggatactttaaaccgtgcaatgaacttgcaggtcgagttaagtttgaaggaacataaaattgaccaaaggcaggaaacattttcagactcggtacttgcataatgaaaatacggaataatccgcacctgaaaaaatgagacactggcaggactttcaagctgatgtcgtttactcacctagggtggagtgggagaggaagacaagaggagaaaggggggagggaggtgatggagagtgggagggggagagagggagggagggacagaggaggaagtggaagagagagagagagaaagaatgagagagagagagagagagggagagcgagcgccgaggcgggcctcgaagccactggagaggtaccctttgtctgacaaaccctgaaagggaagcctctagtagcagccctcccgttcccacctccaagcgtttgccgaactgctaggtggagcccgcgccgcggagcccacgagcactccatatccgggttttgccggccacccctttccctggcgcgagccccctccccggctctcggagctcttgccgctggcccgcccgaccgctgctcattctggcctccgctccggccccggctgcgcctaccccgcgcgcaggctgcacggtccccgcgcgcccgcgctctgacccgctgtctgcgcgtcgcccccctcgcctgctggcccggcaccgctcgctccagttcccaggagcggggatgcagatgctgcagctggtcggggtgggcgccgccgccgccgccgccgccgctgctgctggtttttctcggactgctcgttgcctccgctccggcagctgctgccgccgccaccgccgcctgtgactcgccccctcccctttctttcttctctttttgccttggtcctcttcctacgggtgtgcgcgcgcgcgggttgcacggtttgctttggcaggagctcgctcgtgtgtgcgcgtgtgtgagtgtgcgtgtctggagagcgccagtgcctcgctcgctcttggggagtcgaagaagagaaagaaccgaagagacagcggcggcggcgcagagcccggggccgcgcgatgaagctcccacatgcccgcagctgcccggcccggccggcgagctaatcatccaccccacgggctcggggttcgccggcccccgggacgcagccctcggcggccgggcgcccgctctgtctgcgcgccccctccgtgcaccggggaaggagtttgtgtggctctcgctccggctgtccgcggaggttgcgggcttgagaggggaccctcggctgggagagagcctcgggaggacgaagaggaggacggtttggcggagaagccacccctggccctcgcggctccccctacctattccatcgctcccgctccgaggcggaaaggggaggacgtggaagaagaaaaagaaagagaaggggggtggggtgggagaactggatataaagatcggctggggggatggtggaagatttttggtctcttcggcagcgtcttttcttaagcggcggcggcagcagcagcagcaagagaaggagaagcagccccagctatgactgccgcatgttaatagctgccgctgggtccctcggctgctgctggagacagagcctgactccgaagttgtgcaactgtggactgggagagacatttgaaccctcttttcttttcgctccccttttgcccccttggggtgtgtgaagcgaggaacgtaaaggaaggcgaacatttggctctctttttccttcccctttctccgtggctgtgtagcggaagaaagggaagagagactttttgttgttgtttccttgactggggtctccaccctcctgctgctttctctgcgcttcgattctcgttatttgccgcgtgtggttgggggtgtctgcacaggggccggccggtcttttgccccgggctcaatggctggattgtggaaactgcacccgccttcaggttgttgagcaactgatgggacgatctcagggaccggcgtttacgaaaggtaatttattcttcgcactcttcataataggggtcgccctggccgggcgcaggcggcggcatccaccgggcgggcaacaagagggggtgcggggtgcatgcacactcgcccttccactcacacactcgccctcacacacacacacactcatccggtcgtggtgcggggcgggaagggaacctcctggctggtgggcgctcgggtctggcgcgggttggagttttttccagccattgggcgatttgaccggccgaggggagtgagggggataagagactgggcgcattcgcagctgcacacgctggggaataggaacagttcccaccccgttaattttccctctcctctcaccccagtggcatcccctggtgggggcagaaagcggacaggagggcgacttttctccgtcaggctggaactggtgccgctggaggcgggagcgggctggaggacggacagggtctgggtgagaagctgggctctgggaagatggaaaatgcagggtgccgagcccggcgcgattctccctcaacgcttgcctggagcatccctggccccttttgcccaggtcgcgcccctgagtcttggagtcgcgctgcctccccgcgccctgcctgttgtgtctccttcacggcagtttggtttagacctgcgtgcccaggctttgttaggcggttttggctggagaaagctgccactttcgtgggtggcccgggctgcgctgtgctggtagtgggcactgggcggggggcggcggtgttgcacgaatccgggcggccgcggcgccggggcggggtgggcagagcattggtggtcgcggttggcgggttacaggtaggagagaaggcacctcggcgcttctctgaggagaagggaaggctccaggctgcagcgcagcgtctgagctgccgcgacccagcctccggtcccacgtcggagctcagaagcttagggtgccaggcccccagcactataggtgg

SEQ ID NO: 10041 - DNA, 6000 bp, Homo sapiens
tgccacagtgtttcctttgcctgaagtatccaccctcatccccatctgacgtgtccaaatggtacttattctgtgagacccagctcaaatgtcatatcctcgatgcctctatctgtgataatattttctttttgactccagagttctttctttggtcatgtagttcctatcttacatgtcttgcgttttcataacagacataaataaaagttttctaagttcaggaacagtgtttcatatgtttatctaagttctacctactccgcatcaaaaaactagcacgactttactcaatggtggagagtcaatgaatattattgagtgaccaaagccaactttcagaaagactagaaaacagctaatgtagaaaaggagaaagacagttttctagattgagagttagaatcataggctcttacagcttgaaaaatactagttgaatcttttcatagcatattatttgaaaaaacggacgcctatgtaaataaggatcccaaatgaaaagactgggccagattctagggctcccattttccattctggcatccttttcaatttaaataacctaatattttttaattatacaaaccctattatagataaaaattttgaaaaaatgtatttatccaagatcatgactccagaataaatgaattgctattattcagatgctcatttcagcattatccataaaaatgtatagttttgcatagataatcctgatttacctaaaatatcgtgtttgctttattttcacttaatattattctacattcctttttctttgttattattgtcactataattgaaactttttatggccacatgaatttcattgagttagcataccagggtgctcctggtttcccactatttagttaaagctaatacataattttctgcttgtagcttttatgtttaattgtttccaattggtatatttccaaaaatgagttttctaaatcaaaaatctataaatatctttattgatttttcatcaacactattaaactgttttccaaaggtgttgtttttaaagggattatgctacttttataaccatctgacaagcatgtgttattgttaatttaaatgggaaaaaggtacttgaatgtcactttaatctgcattttcctgattattagcaatgtctacttctttactctttgtaattctactaattgagaatgtatgatttatctatgtcttttgccttttggctattcttaacattaagtcttttttatctttgatgcaatttttaaaattaatctgctttttgcccgtcaagaaaaaaataaaaccaacagcaacactgagtttaaaacaacagaaaaactggatcagaaatgaccacaattaaggttatagtcttctctgcccttcttttctattgccctcccactagtcacttggttaatttctgttcctttcttgggtccaggtttgctttcttctccctgttgtgctttcttgaactgtcttcccaaagcttccatgtagtttgcaatattctgctcttttgcaaggcaacataacagtttatcctcatattccttaatgtaatattccccaaggtggggtacaaggtggcacatactattaatggaatataagataatttaaaatgctctatagacaaactttgtaaaaattaataacattttatttaatctatattattatctacctcctgtttatgtcaagctacactgattttccacttctgtgaagaatttatataaaaagatacttaataacatatatcttttttgtcagatggacttttattcctctctcatggaaaaggaatgcagaggtaggctagtccaaactggagacgaagctttctagggctgtcaaaaactcagattcctttcatcctgtttctctgccaccctcagcatgtggtatacaccccatggttcaaggtggtagcctgagtgccaccatatttaagctagcagtgagaaggatgtatggcaatgtcatcaactgagctagtgtatgttttgggaagaagaccatgattctagttttagatatgctgagtttgaggaaatgttgagacagccattaacactgtcaagtaagagtctggtacttataacagaaatctcgactggagatgtaaatgtagggattgccgtcatatgcatgctaattaaggccactggtgtggataagaatgcatagaaatcagtctagcataagaagagaagtgaatctagcactgagccttaaagaaatacctatgttaggccgggtgacatggttcatgcctataatcctagcactttgggagtccaaggggggtggattgcctgagctcaggagtttgagacaagcctgggcagcgtggtgaaaccccagctctactaaaatacaaaaattatccatgtgtggtggtgtgtgcctctagttctgactagttgggaggctgaggcaagagaattgcttgaacctgggaggcagaggttgtagtgacccgaggtcaagccactgcactccagccttggtgataagagactctgtctcacaaaaaaaaaaaaaaaaaaagctgggtatggtggctcatgcctgtaatctcagcactttgggaggccaagggatcacgaggtcaggagatcaagaccatcgtggataacatggtgaaaccctgtctctactaaaaatacaaaaaattagctgggtgtggtggcacatgcctgtaatctcagctactagggaggctgaggcaggagaatcacttgaacctgggaggcggaggttgcagtgagccaagatcgtgccactgcactccagcctgagcaacagagcgagactccatctcaaaacaaacaaacaaacaaaaaacaaacaaaaaacaaagaaatatctatgttaaatggcagtgtaggaaaataaaaatttaaaaacagcctgtaaaggatacaaaaaatgagtagccagagatgcagggtaaagaaacaaaaaataggggattatgatgaaatatatgccaagaggaggaactgttgcagatagaaatcaagctgttctaaggccaaataagatgcagtctgaaaaatatccattgtatttcattgtatttctcaacatggaagtactgatgatttttgcaagattgtctggtgagaaggtctaactggagtgggttgctaagtggatgggaagtgaggaagtgcaaatgacagattgggcagcagaacagtgcagttgttcctgagaaggaacgatgtaggtattacacttagaccttgcaggaaaacagtgggatttttattttgttttgttttaaatggaagatcttgacatatataaaagccaggaataattcatttcacaaggagagaagaaatatataagagagtgtgagaatcctgaaagtacgggagagggtgggaagaaaagctcaccatggtagacatgggctttagctaggagaaagaaagacaagctcctctattaaaaccagttatagcaaagaatgatgaatgaatgcatggaagttaaagcagggtgtgtaggtgtttacaggagaagtactcagggaaaggtgcatatcaggtccttccctagttttatataattttctcctgcttatggatatagtctactgtttttagtggtggtggaatggtaggggtggggagcaggagaatagttcttgcagtgtgttgtttcatgatacagaaatggaatcatagtttaaatgattgttacataagtttcatatttcttttaatttgtaatagaatcctagcaagctggacattacctcactgtctcatcaaaagcgttgctattgctttcattctttttaatgacttatttttccagtggtatgaggtactgtgtagagcaatgaatcacaattatttttgcactttgatttgagaatttcaggttgaatacaaaatgcttttctcttcttagttttattttacccaactaacttattattctatcctatgactcctgtgttatctctttaacgtctttttcttttctatgactttctgtgccttgagtatcctgataaactttagagaagtgggaccagtatccttaccttgaacttggtaaagtcttgggagaaatacgcctcaatttagtcattaaacacacacaccacacacacacacttgtcaaaatctgcaactttaatccaagaccaaggaatcctactttaaaaggtctgtctcaccataggctttttttctgtattccacgtgtaccagtgatataggcagagaaatgtagcagataaagaaatgaatttggcttctggagcttttctttcatttaaataccacctctgtaatcttagacaagtcactaaaccttggtgcctctgtgtgaattggaaataattatatatcaactcttcacaaacctagagtgctatcgtgaggattaggtctaaaaggctcctcacaggtttctcatgcttaaagcacctttaattatccctttcttagtaattgtataaatctctaagttaatccattaaagtctagtcatcatctctctattagcaagacccaactgggcagatagtgttgttaggatcattgtgagtctccccagggttcttccccttccatttctgattatgctgtgaatatatttccagaatttcagaggggtttgcttgcaagctaaaagatctttgcaaaggctcaaaaaatacggtctgcttcagacagagagagggtttgcaatatgcgatgaatctctcagtcccattagaaccttaaagatgatgatagctcacatttaatgtaatgattaatgtgtaccaggaccattccaggcacttttgcatgtagacaaataattctcagattacttactgattaatatcatcatcatctctattttacaaacgaggaaactgaggcacagagaggctaaatcacttgcccaggatctggagccaagtaatggtgatactgatgcttccttttctttgccgcgctcggattctgagtttcacaagaatgtacctgggtgccccttagcgggatatgaatagcttcttcggaaccccagcggccagctggtgcctcctggaaagtgacgtctcatctgcaccggacaaggaggcggggagggagcgcagagcactcagcgtccagcagcgcggcgggccagcctggagcggaagcctggagtggagcaggcagtccgcgggggacagacgtcggctgggattgagccggcagactgcgaaaagtagctggagccggagcagggacagaacctgttgctgcagacgggcttggtggattctggttcctgccgccgacagggctcgccgggagaggtaacagcatgggccagtttgtctgggggcccccgcttgggggcgcgacccctctctaatgcccaacgcttgccttgatgacacatattagcgattgtggaccgacaccttggatttttcaaatcccttcctaattacacaggcacccgcttggtcactggcccaacactggggggcttctctgccctggatgtctgcaccacagatggctgtggccccaggcttgcagagcagggacctggtcaagggatgtggggcgctttcttcaccttaaagttccccccaagccctctccggggctgtattgtgttgtaactttgttgaatttccttagcgggtctgaagctagcgagtttctaaactgtttttatccgtgatgcttctaagcaatgatctttgtgtatctgaggcttcatcttgtgcatttccacttgctagaaaagctgaaatcaggtttctgagctgcgtacaggacaccagagtccttattgaaggcgtttggagaggttttatccccttctgggagtgagatagggtttccagacaataccattttagttcttctgtcaaaccatcaggcattttccaacagtgccgccctaggtcaaatttagggtctggaggagaggaaaatgatcttcttcaagctgtcgttctagttaaagaca

SEQ ID NO: 10042 - DNA, 6000 bp, Homo sapiens
gaactattactaataaattcattactgtgatctcactgttgtgatgtatgcctttcccccaaggttttggggtattttgatgtatgcctgttttgatgtatgcctttcccctaaggtttgggcacattcatcattatggacagctaggtgatgagcagggctctggggagtggggctgccatgccctgtgagtaggagaagggcgagtgatggggtgatgggcagagccaaagtggaaagggagaggagctgaaagttgggcttggacagcttttgttactggatcagaaaaagagaaggaacgcctcacttttggcgtttctcaatttaatcaccatttcactccataaaggtatttttttgtgtccatataggtaggaaaattctcaggggtaccttcttgagaatttgatgaacagagattcccctattctcatgttatgttgagtatcatttaacatttcaaaaaattcacagctgtcttatttttttaaaatcttacttatgtagctcagttaatcttaactatcatatttattatcttacccccagagcaaaagcacccatatctgccaccctttgttgttaggataaaaagccacagttccatcaaactatccttagttgaatcaaaaaagtatttatcataagcaagagctaaggcaatagtcatacatttaacaagactgaatcatactttaacaagtttttctaatttattgaaatggaataatctggggttttagcctgttgcccagttggtaaactactacagtttctccatttttatcttctaaaattttttccctgataaaatatgtgaatctatatttattcattataattatagttattgtattgatctttttaggcttatcaatataagaggttatacagttaataacttaatgattattatattctattgttatttaaatactttgcgttattatttaataaatgttttttaggtggttttagaggtggaagaggaggtggaggtgggggcttcagaggaggaagaggtggtggtttcagaggtgagtattttaaaaagtctttaaattgcttaatgtttaaaattgatattatctggcattttctgtttttacttaagtttaattttctctgccagcaagtatatagaacaccatggtgttctttgcttagcctaatttgtggtttcattttatatcactttttttttgccttttcttttcaattttttcacctaattctaatttgttttgctttattattaatttgaaaaataaaggtgtaatatgaatgacagttaaatttggtaaagtatgtttgctaaacattattggaactaatgctgattttaaacttgagatttaggttataatactattaaaaatccattttctgtgcccttaatactttaattttctcttaatcagggagaggacattaagtgaaacagttgacagacatcaccagttgacttctgcattaacctgcatgatctgtttctactatggattggaaacttgtttcttgaacaagtcttgaagatcttggtcattttatgacaatggatctaaaatgtcagcatcatgcaaagtgcaacggaatagtgaattttgctctaaaagagcatgaacaagtctttctaatgttttgtacagtgcctggcactctgtgggtgctcaataaatggataggagttttcatttgaagcatatttgaatttttaaaataaagtgttttattcccttaagttatttagagtgtgtttattaaatgaaacccattttttaaagtagaaaggaataactaaagcttaaacccagtgaattgcagatcgaaaaaaggatttgtttatttatattactgatcttttaaaaaatagactactgtagcagtactttaagataatttacaagttgacactgcctttcaaaaccctggccttttatgtatgagaagatagctttgtatttgccttttgtattttaatacataaatcagttaagctgtttctctaattgcaattaataattgatttaaaaattttccatattagtaatgtattaaagatgcagtagctctgttgaagtgaaaactatagcaagaaatttctaaagttaatttttctcatccaacataaatggaatattagaagttttactgaatgttattttatttttacttttttaaagggactctaaaagtttaaggtgttatttactacacgtaaatattcgtgtagtatactacacgaattcgattgcatactacatgttcagattgctgggtaaggatgttagaaatgaaattggttttggtcaccattgctagtggatgtaaagaaatgactgtggtagcaagttagaatgccatgatatggagccatttaccctgccattcatttttcacttctcaaaaggaatgatgtttctatatcgtttgttaaattttctaacatgcccatggaggaacgctcttgaatgctcatttgaggagcatacagtgttgtctttgtcagtatttggggttttatctttttctgattgatggaattgcagcaggatgaataaatacataggccattaatatatatgatgagcaaatgtgttgaaaattacagtttttacaggaataggcagttatgcttttacagcttaggacaggagattatttgatttggaattgtggtgatgaaattttcatggagtgttagggccagggcttttgctcgtggtttggaaaagatgttagtaagcaccaaagggtgatggcattgtcccaaggacaaataataatagcgcaacatttctacagtttgtttttttaacattaaaaataaatctaaaatggcaataatggaaataacatatagatcagtagacaaaccagttggaaattttaccgtttagcttatgtatatctttttttcattgtccatctttaagcttttatttccacatcttttccttttttttccttatagtttctgggtttatttatttgtttatttattattattattttttgagacggagttttgttcttgttgcccaggctggagtgcaatggtgcaatgtcggctcactgcaacctctacctcccgggttcaagcgattctcctgcctcagcctcccaagtagctgggattacaggcatgcgccaccatgcccggctaattttgtatttttagtagagatggggtttctccatgttggtcaggctggtctcgaattcctgacctcaggtgatccgcctgctttggcctcccaaagtgctgggattacaggtgtgagccactgcgcctggcctagtttctgggtttttttgaggcatttcattttgaatcaaattcacatgtatttctaagccttatcccaatatagcttttctgtatcacccatgaaggaagcataaaaaagaacttcaaatgcacctacctcactcatatcaaaactttcatctgcagcagaaagctgactatctgaaattatatatttttcagttcttagaaataattatttctggaaaatttttcatggatgctacaactaggtataacttattacagaaaaggaaggtagtatgacccaaagcaaattcaaaaattttaagttttgttttgcatattgaatgaaagaaaagacaaagactttttaaagggagtgatttcctcttgggtattatgttttttgctctagggtcatttgaaaacaatactgacgagattcgcttttctagtataggtataacaatattacatttataaaaatgtgagtactggtagctataagatttgggacagataaatcaacctgttcatcttgagtttatacacaggcaagagaactgaagcaaaaggattatcttaggtttctgctgtgccattctaggatttttataaaattaaactaagtgggtaaatatagccctctagtggttctgttttatgcttacactgttaactttggtgcatctaagcatttctctaatgtttactgattttaggaaactgaggagaatcagattttaataatgttaatggcataaagaatatgggaaaaaaggtaatagggataccttattattctaacaaaacatgctcaggttggttttcaggttgtaatgtgataatccagaatatttttattctgtactttacaatatcagtgattgaattcagatactctggcaaagtatacaatgattactatcatcagataatattaattactcatgtgcatatcaaactataggggaaattaacggatggtggagttgatcatattatatccatgctatgaaatacatagctactaataaattagactttattagattctgggtttattaacttggatattataatacagccttatgggaaaacaagttgcattatatatatacatttgtacttatttttttccctcatttttatttacaagaagaaagtggaggaaacctgaaacacttgtatgaatatgtgtataagcagagaaaagcctaagaaaggatatgcaccaaacaatactggtacctttaggagagtgagatttggaagtaggaaggagactacttctttgtcactaatatttaaattgttaagaaaaaaaaaacaacaaaaggagccgaaatggaaagacttgaatggtcaacagaaaacagggaccttaatccgaatagttttagaggactaaggctggctcctatactgatttcctgagtttgtttattgttaaatgggatgtgtgtgcttgataatctccttagatagaagactgatgcccaaataggttaaaatgtgtggtgcttggtatttctttttgttttgctaataagcttttcccttattctgggaattaaagtcctttcctctttagcccaattaaatttgttaagggagggcctctatgaaaaggcccttctttgaggtctctaagtggaaatgattggtcctaaaaaatctttcctcagtagctcataaagcagttcataattatcgaaggcttattatgaagggtgtttcggtatcttccctccaaaatgctaagaaataatttaggcaacagttcagactctaaaaatgaagatggctcggtcttttcacagactgaacacaatattgttgcaacttacttgattatggcaggtatggatatttaagtaagttatttttctttagaatgggtgaagaaaggcagaagttttcagcataaggcatgcattgtttcaagttccatattattggccaaccttgacaagtcatttatcctgacttggcttgctcgttggtaaatgaggatgatgatactctatttctgggctgtaaagatcaaataagataatgtgggtgaaagaataagggaaagcattgttagtgatggccattgccacaggttattttgaattttggtaaataagagcagtgaagtggggctgagaaaagttttctatgtgataaatagttctttcataaaaatctatgtatttgattattggattgttaaagtttttattggagaagagtatgcaccatggcaaaaacatatttttatgtcatttactattcttatacataaccctcatatttttgttcttggtggtagaatttagctaagaacttaaaggttctggaaagaaaaagtcctaagaagacagagcagggtatattgtcattgaggacagagtctgaaaattcagcttgttccagaatgcttattggaaaactcttgagttttggatttcatcttttagtatatttgcaactgtgagcatgtatcttccctttttgttcttccattttctcatctgtaaaacaaggataagaataagttatctgtcatgattgttataaggagtaaaattaagtgacacataaatgccatatagtaggtgttggacaaatatttgtttctttttccctttcctccctacacactcattgatgtaaaggattgtttgcagaaaaaaagggatgggggaatgacagaaactttttatctttttaat

SEQ ID NO: 10043 - DNA, 6000 bp, Homo sapiens
ttggaatgagaatatctgtcttatgcctgtccaccactgtatttcattgtacttttcactttttttttaactcatgtcatgttaacaatgaaaccacatttctcaaaacatatctccatcattaagacacatgtgccttgtttgtttgtgccttggtagttaaaagtatgttatatctccccctaaaagaatctctaagatataagaccattcttctatatatccaaaataacattttcacatttaatacaattaataattccttaatagcatctagcacctagtctaaatccaagtattctcagctgcctccacaaaaaaatgagctttatagttgctttagccaaaccaggatccaatccagaacagcacaactggatgttgcgttcctttaaatctctttcaacctagaaaaagataatcatcttttcattgcttggcttgttgaatagacaggttaattgccctgtaaaatgttgtaacttccagatttgtttatttgcatcctcatggtatttgtttaccttgttcatctattcccatctttgttggaaactggaagttacagctgaagacctgattatattcaactgaaacatttttaaatggatggaatatatgatcagtggacacttactatctggttaccctatcattagtaatactaagattgattgatttctcagctctccaatggggccaccagcaatttaaaaaaaactttgggctacttgatatattaaatatattttaatgggataacctggtctaaaccaccatgtgcaacattgttgcaatgcataagcactttagaatctccagcagcagctcatctatagactaattttggagtacagtcatgtgtcttcatgatggagatatgttttgagaaatgtggtttcatcgttgtgtgaacataatagagtgtacttacacaaactagatgatagagcctgctacacatctaagctatatggtatagcctattactcataggctacaaacttgtacagcaagttactgtactaaatattgtaggcagttgtaacacaatggtacttgtgtatccaaacatatctaaacatagaaaaggtatggtaaaaaaaatatagtattacagtcttttttcttctttttttttaaaagcatatttctcaaatctcttgcaacttaggtattataatcctatgggaccacgtgtggtctgccattgaccaaaatgttatggggcacatgactgtgtttacctcaaaaacaaattgcctctagtcagttttaattaaaaatggatcttcaactaatagggcttgtcttttcatctccagacaggtgtgtttgctgccaatagtcttggccacagcactaaccaatgagaaggctgtagtgacagtttcaggtctctgacatacatttccccaatttctctgcctttactctcacaaccagtctttgtggttcttctctgaaaacttcaggtttcattgctcctagagaccttaaccatgaacacatctctagcaaatactgtgagactcaaaaccactactgcatttcaagtttgaggatcttgggagttagcaactgtgaaatggatttacaaatttaaatcaagaaacttaaattcagaagaacatttgccccaaggacacatgaaaaaatggttttttaagtgctatattgagtacttcttaatcttcagcactttttgttcatgaaatcaatacaatactaacatgatgccaagataagttcattacagtaatcctccacttagtgagctacttgaaccagaagtcaagtgtgatcaggatagtttccccgaaacccagaaaacctgcaaatctgcatccaacccactttccaggggaaagaaataacctttggaagtcaagttgaaaagcttagtcaaatatattaattatatgttctttgaaagtaaaaagcatggaatatagagttggggcaagtatataaagtattatctatggggagaaaggtaactggaggtaaagttaacttgactaaaaactggttcgagtcccctgaagtcatttgccccaagtaaagctgagaaaatgaggatataaatctccaacagctaaagaacatttatgttgttctcatctagaatgaggcaatcctattctcttacaaaggcaggtctatgctgattattcacataaatacacttacttatgtttaaagatcttaaaagagacagtaaactcattttatgaatttagagggcagatcaacaggtaacgtatagaggcagatttcattttgatgtcaggaagaattgattacggtaaaagatacataacataaatttaccattttaaccatttcaaagtgtacagttcattggcattaagtacattcacattgttgtgcaaccctcatcaccatccgtcactggaactttttcatcatcccaaactaaatctctgaaacgtatgaaacagtaagtccccattctcccctcggcacctccaagcccctggtaatcactattctaccttcggtgtctatgaatttaactattctaggtacctcatctaagtgggataataaaatatctatctttccttttatgtctggcttatttcacttaacataatatcttaaacgttcatccatgtggtagcatatatcattcttttttaaagctgaataatgttctgtgttatgtacatgtatttatatacatatacatacatgtatataccacattttgtttatccattcttccactgatggatatttggattgtttccatcttttggctagttttcaccttttggcttttctgaataatgctgctatgaatatgggtgtacaaatatctgtttgagactctgctttcaattatttaggtaagtaccaaaaagtagaattgctggatcatagggtaattttatgtttaatttttggagggctgccatgctgttttccacaactgctacactatattttacattcagactggcaatgcacaagggttccaatttctcaacattcttgccaacacttgttctttgctgtttttgcttttgttttactataatggctatcctaataggtgtgaaggaagaatttttagtaactagtcctacaccacagtgagatcagctgtctcaataggtgggtcatgatgaatgtgttctagcaaagactggacagattgacatattcagatatgcaggtgatgcactgtccaagtgtgtctggccacagagtgaataagggctgaaatccagcacatgtttcacgggccaagatgtgaactgcctcttttgggaggaagcagtaagtttttctttcccgaaaatattgtcagcttgccaagccacatgcccaaagggtcacctttttttaatataaacaatggcacttataaaagctattagttattctggttggctgattctccctcctagagaagctgtaagattagtgaacagggtaatatctagtctaaccctactagatgactattaaggcctctttcaatggtggttttctgtagatctctttgatggttttacaaaatggtccctaaattctttgacactcctcacactaagggttgggctctatataccctcaccttcaatctgggatttgtgactgcttgactaatagaatcaagcagaaatgacacggtgccagtttctgggcccagcccttaagaaactggcagcttccactttctgtctctggggacattcactcttggatccccgccaccatgctgtgaggaagcccaaaccacaagtctccacaagtctttgtggagagacgcacgtggagaaaaactaacactcaacaccaagcaagtgaactgtcttggaagtggatcctccagcccctgctacatggagcaaaaacgagctgtcccagacaggctctgcccaaactgcagactgataagcagagtaaatgagtgttgttattttaagccactacgttttatagtaatttgtttagctgcagcagatagccggaacagcatgggatataacatgaccagtgctccaacctcacacttctaccatgtgctgactctagcagtgcactgaaggactccaaggcaggccttccctgaggagaccccagtttttactcacatgtcacaggcagtggcctttgtccctcatctcctctcccacccccaatttaggataaagtatctgccgtgataaagacgttgagacccactttctgtaaggtcggcttcttcattgtttgaatttcttgaggtttcacggagccacgcgctggaaccttccatagtctctcctgaggctccttctttgccctgggctggaggtctgtagccgtgggatgctggctacaagggacaagatagaagcaaaccacctgatccagtaaactgctgtccacttcggctcctcaacggcctctaagcttaagagggagcacgcaagccaagcaaaggcggcagggaagacggagaagaaaccacccgtgggccctggctctgtgtccagttgttccgtcacagatcaaatctgcctgcactaagaggatgggttcctctgcaaggcctttcggaattctgagtcttgtctgtcaaactctaccctctctcctccacatcccccaccttttctttcaggaaggaaatagttaaaaaagactcctgcccttcagggcctggaagggggcggcagctttgtgctttttagtggccgcgtcccaggatagctggaaggttaggacgctcttgcggtcccagagtggagtggaaggtctggagctttgggaggagacggggaggacagactggaggcgtgttcctccggagttttctttttcgtgcgagccctcgcgcgcgcgtacagtcatcccgctggtctgacgattgtggagaggcggtggagaggcttcatccatcccacccggtcgtcgccggggattggggtcccagcgagacctccccgggagaagcagtgcccaggaggttttctgaagccggggaagctgtgcagccgaagccgccgccgcgccggagcccgggacaccggccaccctccgcgccacccaccctcgccggctccggcttcctctggcccaggcgccgcgcggacccggcagctgtctgcgcacgccgagctccacggtcggtgcaagtctttcttatcggggactgggactggggcgggtgcggggatggcggagacgctgcctgggcccctcggtcgggagaagacgagagctgggaacgttctggcccgaccgccctgcagcttgggcgacccgtcgcagcaggggctggcacccacttgccccagggcgcgcggggaggcgggcgccttccgtgaggggtgcgctgcggacacgtgtagagttcggggaacttcacctctccacgttagggtttaggattcggagttttaggaagaggaagcccaatagttttccctgggtgaccccttttccccaggcatgcaagaactttgaggaacgccaagctctgtggcttgctccagcgccttcttgtgaagttggctccacagccttttcttactggcttgcttttcctcccccacatctgggtctgggtatgccaagggtagccaagggcactcggtgtgagggactgaggtgtttggggaaaccccctgtgtagctagttttggaaacctgcctgtggaggtctgggcgttttgttctgtgctcgcctttaaaggacacttgttgcttctcacgtgcagaaaacaagggctgcttctagataatcaccctctgtttacatcatcctaatggctttcccctgatagagttgggggtgggaggcatattaaactcaggcgttgtctctaaggagagttgctcatttcttaaccagagagcaaaacctcagaaaacttgtaaaaagttcctacttttacttgttttttcctccacctgtagttgtctatgtgttagctaattgagaaacaccttggcagtcatttcatgtaaattgaatgc

SEQ ID NO: 10044 - DNA, 6000 bp, Homo sapiens
tatgacctattgagaatctatattataaccaaatggccattaggatatctaggttccataatttttgctacaaggcaattattgaaactttaaatactagttctacaagagggacttaataagcttaaaaatattcactaaacgtatcaagcatttaaataaagcaagacaatcagttttcaatatactaaataccataactacatgttcagctagtttgattattaatatttcctaactaggaactcattagtctttgtttgtttaacctaagaagttaagtacatgactttattagcttctctgagcttttcttacattactggagttaagataattcttccacttcagctggctgtgctcactttttggtcctgtgctcttcctcccttcctcaaatttcttccttttggccagtggcctgatttgtgggtttacttcttttctttgggaatcagcttccacattccagcggaactgcaccactttgttctgtctgtggcttaagtcaggttgatatggcttacaagttactcaataatctctcagggaccgctgatattaaggtgaggggaaaaaaaaaaaaacgaaaaagctagctttctggcagagtgaaaacaggaaaccctggaatccaaagaaacttattctcttgtgcttttttttcctcctgatttagtttccccacttcaatcttccccacctggggccactgaaattttatactgaacactttacgtggactccatgttacctgaagtatttgccttttcatggaagaagtttcttggttttcccatcattcaatttaacctttgtggttaaggtttatgtaatgtgaacttggcttaaggaaaaaattttaaaatacctcgctcttactccctgctggatttatgtgaaagaaataactggacaaaggtactgcaaatatatccaagatcatttctcacagttttgtccataacaacaataactcatgagaatataatcatacagtttatgactaggcaaccattaaaggaaggatgtatatttattatattaaggaaatggaaatatgtttttgacatatttttaagcttaaaagttgagaaggcaggctacaagttaattaaaagtagagattttacaccaatatgctgatgatggtcatgctggatgatgaaattttagactttatacagtccaccacttacgctccctatgtggttacagttgtcattctgtatactggggcggggggcggggagagcagctattggtttcaggacccctgcatatgccaaaatccttgcatattcatgtctggcagtcggccctgcagaaccacatatatgaaaaatggaccttctgtaaaggccatttcacatccgcaaacactgtattttccatttgtgtttgggtgaaaaagatctgagtttaagtggacctgtgcagttcaaactgtgctgttcaagggtcaactatatttagttttacattcaaattaactacaactcaataaaatttaaaatttcagttcttcagttgcactagccacacgtcaagtgctcaataaccacatatgtctagtggctactgtactgcacagcccagatacaaaacatttccattattgcagaaagttctgtgggactgcattgttttagataatgcctatttcttctatgatgtttttgtttattctaacttttacaatgattataatttttataatcaaaataacaatgaaattatttataccgtgggggaagcatctttgctgttaaaatgaaattacagtgcaggaaatctatatcatgattttctttatctaataagtatgtatcacaagtggtcctcaatactgatattattgaacttttttaatggagagcttttctgaaatttcatctagctatctaaaatatttggattgttcagttattcaacaaatctcttacttcagagtctccttgggaatatctattcaaccagaaatggaaaagaaaattacttatttggcaactaatctttggctgtattccttttgtatttctgtgcattgagaaatggtctatggggtaggggaaatggtagtagaactatgttttaaatatctaaggagatttgtcagacatcaaatactaatataacatgttacaatattggaggcccatgatgagtcaggctgctatctatctatctatctatctatctatctatctatctatctatctatctatgatttcttatttattttggcctgtccactaggagttttggatttttaaaaattaatttggtttatttaaaattcagaagatttttaacaatatggattttgcttctcttaaaaatcgtatctgacaatactgaatcaagatttttgcaggccagctgagtgtactctgagaagcaatctccccatttagctatagcatgtgtttttgtgctcttcaaggtgttatggcaatcaacattttccactctctcctacaacctagcatgctggtccatttatgtcattggccctaaccatgcaggcatctgagtttgagtctgttgtctatttgaagagcagtcacagcacatattctggttagaaatggaatttcctgagcaactaaatgatttgatacaaaagaaatcaagcatcaataatcttgtcctatttcaatttggattaatcgatatttcaccaccacttccacaaactcccaaactcctgtcagtgtcacaactgggtttatggacattcatcagagtggttcattgttactacaatacacaggatatgtatgcacatttaaggatatgaattagactgtgatgcacaaaagtgtcataagctaattcccacagctctccttgataatatgatacactatgaagtgactttcatttcagtttatcagtttctcatccaattctgaactttattaaaggacattaatcatagagaccatttactcttttgaggttgctgactagatgtctgtggaactatatgaatctactaagacaaacacacgtctataagagagtgaggcaaatagttggttatggctgctaatacgcttctgaaaggcaattttaaagaagataaaatgtgttttgtgcaatcaatgtcagtgaaatcagttgaattttccaaagcaattgctctaaaagacaacactcatctgttttgctggatatttgatttgtttttgtggtcgttgtttaaatccatttctactcttttaaagttataacttattggtatatggttcattcttcaccaatgcagatatattgagaagaatggaacctgtcacatataacacatatttgggcaaagagtactttcttaaggaaaaaacaaacaaaacaaaacaaaacaaaaacaactactaaaagactttaagtggaactgtgtagaacatgttaaatatttccatttctgtttacctttgtttctaggtatttgaaaagcccaggctgctttgttttataaacaattcctatactcctgtgggcataattctatattaactgaagattaatttcaggttacactgtaaaaatgccttacaaatgcaatactattagggtgtggaaaaccctgaaggaactgaaaatccaatccatttgagggaagcctttaattaacatcttggagaatatgtattacctttttaaacagataaatattttttttcattttagagtagcggaatctaatcttaatctaatcttttaggagtatatttcagagaaattccaagcacaccagtatgaccatccttatttcagaaatgacaatgcatagaggaaaagtaatgtgtgcaaagcctccgaagaggatggttaagtaaagacttaggttaccagtatcaggctttcgtttttgtatgtaggtagctctactgcctcctcttaaaaccaacaaaggaaagagagactggctgcaaacttttagaaggaatggcttcgaatagggttcctgggaggaatcccgaggaaatagacgctgctgctctgctgattgtctccactatcctgttttgctcctacccactaatccagcctgggaggctctgggcattagcggaaggcttcaccacaaggagacaggagcgagtattccataggcatgcgctcctagtggcacgagtggcttgggtcaggatcaaagagtgaaggattcggaagtcagctatctggagagagagagagagagattgtgttttattcgtgtcccatagctttcctatcctatccctatcctagcttttaacctgagccagagctcactacacaggttcctggctatcgagtctgaatctgcactactcaacttataaactgtctgcagacacctgttagggaaattgctgatcatgggcagcaggatctgaactcgctttaccttctcgtttggagcacagggaccgcccagctagaggagcaccagcgcactgcgccccagccctgggcgagggtgcggaggatttgttctcggtgcaatcctgctggcgcttttccggggttctgcgcggatccagctccccatctctgctcctacacacacaaaagaaaacaactctcgattggaagttgtggaattttctcagcccctacgaggcgcggggattctccagccccggccctcctcccgccagcctgaggtctccttcgctcgcctgccttgctagggaccgcagtccctcagccgcagctgggtctgtccgccccgcctttgccctcgccttttcccggggcggatttggtgaagtcggcctcaagtccaggaggtctgtcttcgccgggccagctctcgcggaactggggggtagagagcaaagggagagattcgtggaagggaagggaggtaggggtggcgcaaacgcccagagtatcaaacttgggggtggcacagtaggtgacagcagcagctgcaggtggtggctggggacccgcgagggggcgcccctctgggtagggtctggctgagcgggcttgcaagcccgggaggcggctgagagaccctggacactgttcctgctccctcgccaccaaaacttctcctccagtcccctcccctgcaggaccatcgcccgcagcctctgcacctgttttcttgtgtttaagggtggggtttgcccccctccccacgctcccatctctgatcctcccaccttcacccgcccaccccgcgagtgagtgcggtgcccaggcgcgcttggcctgagaggtcggcagcagacccggcagcgccaaccgcccagccgctctgactgctccggctgcccgcccgcgcggcgcgggctgtcctggaccctaggaggggacggaaccggacttgcctttgggcaccttccagggccctctccaggtcggctggctaatcatcggacagacggactgcacacatcttgtttccgcgtctccgcaaaaacgcgaggtccaggtcagtaagtgtaattcctaactctgatcacctcctgggaacaagaaaatccctagaggagcgctcggttcctatgaagagggacatgaggaggtcctcatgagtgtatggactttttcctcctcctttaggcgggaggtggcgatttggaggatgtaataccatccccattttctactttctctagattttcccttttctgttgaagattatttactatttccttgacccttctttgagataggtcattatctttccagaacagtaagttgttattgttcctgcctctttaaaaatcaaacacttgtctaaagcagaaggtcctattggattctccaaagccgttcaagaggagacacattcatttaagcgtttgctcattttccatcagaaaggctcacccactggcaggagcttttggtggcagggaaagaggcaaaattaaaagctttgagactttttgcaataggtacacatcatttaaaattcagtgacatgaaatggagatgctgtttccaaagaaaggcttcccacaccctttggtgaatattttcaactttcta

SEQ ID NO: 10045 - DNA, 6000 bp, Homo sapiens
caaggtatagactcaatctaaaaacccatctacagatgattgaagaaaactagatagatagatgatagatagatagatagatagatagatagatagatagacagatagatacaatggaatactattcaaccataaaacgaatgaaatcctgtcgtttacagcaaaatggataaagctggagaacatgtcatgtgaactcaggcagatacagaaagacaaacactgcataatattatatgtggaatctaaagaagcttgtttcacagaagtagagagtagaatagtggttaccagaggctgggaagaggttggttgacaagtacaaagttacatttagacagggagaataacttctggtgtttctgttacacagtagggtgactatagcaaataacaatgcagtgtacagtcgaagatatagttgaagagactagaagattttgaatgttatcacgacaaagcaatgataaatgtttaaagtgatagaaggtaattaccctgatttgaacattataaaatgtatacaagcattgagacataacataagtatgtacaattaccatatgttgattatgaatttaaatttaaattttaaaataaaaaataacctaatgtttgacactttccaacaagtaattattccatagctctccaataccaattatgttattttctggccataaacccatccagacctgctatgtgcacatgctgagcatttgcactcacttgtctttgatatgaaatgttgtttccattattctctctcagtctatgtctttctttgtcttccacactcagtacacagctctccttctctaaaaaaccttccatacttgaccctaccctgccctccaaaccaggctccttgatgatctctcatatctcctttaatacattatgttcatggcatcaatttatatttattgatagatgtagaaaaaatatatatttcagacaatcagctatgtgcattccgtttccataattcataaattatcttaaagcagagtatcatatttcataaaatgacagggctataatgcagctaaaagattgactgtttgttttactagtgaggtaacaagactaaagcttttaagtgacttatcagagtttacatgtctaattaggagcaaaagtgggaccagaactcccaatgttctactggtattcctggaacaagccacttttacttttctaatttattctgtcttccagcatgtaggaaatgcccccgtataaatcaggtagtctcaaatgaagcacgaagaagcatcagcaggagatagtgcccaaaggagagaacattgagattatcaggatagggcaaagagcaccagatctccaatggggtgatcccatggggtgaaaagcaggctagatgataggcaagtgagtgggcttagagacaaggctccaatcatagcagagtggctgaagtgcagtcaagaaatctgaagcagctgaggcttaaccacagtgactgagcatgcgccttaaggttgtgagggaagatggctgcttagggagcagacatgttaccagacatgaaacagcaaggttaatttccagatcccacccactaacccagtcaacagactatatcacttattttatcccatcagtcttgatagatagtctagatagaatgaacctaaagcttgaatatgttcaattaagggaactaagtaagataaagttaatattaagctctgcccagagtttgcacttaccgtgtaagatgatagagagatggatagataaggggcaacacaaaaatccacatggcacttggcttacaatgtaatggttgattttctgctaaaatgacaatagcttctggtcagttttcatctagggtgaaattgtttagattttatataaaatattttctgaaatacctgtgcctactaactgtctgctccagttgcacattttgctagctatcactccctaaaagtcatttcatttcagaattgtttaattaatgctaaatcaagcagctagtatttttggtgttacacagaggtgatgaattcctcaagggtcttgcctgactgacagctgtcaactagaaatggatgcatagaatgaacaatttggcagcatgcattttagcccttagattgcacttaatatttttaacgtatggttgttttactattatctgaatatctctacatgatgaagctcttattgaggttttaccagcctctcgcactgggactttctcaggtctacaataaaaaaaaacacataataaaatggctttttctactgttgaaaatggtgattatgaataggttcagaaacgtggacagaagccctcaagtgtcattacccagttttaaaacatgatgctgaaaaaaagaaagtcgtggtttatttccgtcatggtaggatgaaaaagctgcaagattactgtggatgtgtatagtgcaaacaggttaacaatgcttgtttggtttgactcactaggttggttcgagaagtaattttcaaatagaaggttttgttattcaaagagcctcaacgaggttttaagaagagattcaaagataagaaagggtatcagcctctattagcctatgtcgagggcagaaacccctgacatgctcagccaagtggaggcgttgacatcacagattctattgggcccagagtgcaagtttataattgaacaatgtaggcaggaagtgaaggctaagaacatacaccatctgtttgtttttaaaactctttaatatgtgtcttcaaactgcaaaacaagagaatgagaaaacacactttaattcaaatcttaataagaattctatttcagtaatctggtaaaaataataataataataataataatacctaaacattactgaggggagtcttttgctacaatgcagtggttctcaaccaggagcgattttgtccttcaggaacatttgccaacggctggagacacctttaattgtcgcaactggagagtgctacaggcatccaatgggtggaggccagggaggccactaaacgttctacaatgtaaaggacagcctctcacaataaggaattctccagcccatagtagaaacagtacctgcctcaatgtatggccagggtgtgctatattcacttttgggttttgccaccaaaatacttctataaaactaatatgccagattcactgtctttgccaaaaataagacagaagtgacaccctgagaaaacaaaccatgaaaattattcattcagatgaatatctattttagtaaaacctaatagattcttaataaaatgagaggtgatttggaaattttgccctgataatttgagagattaaaaatacattgttaacgagtacttcctggctacccgcccactaattgtatgtatctgtgatattcgctcaggcaaaagtttcaaagtttgcaaaataacatcagaatgattttgaagacctctgtatcaacagcttactttttgttgacaattcccaaagcaagtccttcaattttactattaagaagcttcttatgggtcccccttctgaaactgcccttgacacgttccacagcatccttccaaaaaactactatttctaaataaatttaaaaaaatccatgaaccactcacataataatcttaaaatacttcaagtattattaaaaatagtgaacattttatgggactaaattcagttaaccataagcatgtccatcaaaagaacagtgtcttcactaaatctactactaaatgaataagggtttgtgaagatttctatattaaaattcttctttcatggaattaattatatttatggagggaggaagcagtgttagtataaccttttagccctcatttagaaataggcttattatattgaagtcaatgatatacagatatgtaattcaagcagattctacgtgtatatctacgagtagggagcattaacctcaaaaataaattcctcatgtcaaagggctactactcacttgttccagaaattcattagcaagttgaaaaataagaatgacccagtctggttaaaagaaaatgcagtctacagaaatgttcattgcattttcatacttttccccccactggtccaataataaaaatcatcatatgaatgactgacacttagtaatcacctataatgcagtaggacctacacccctcactatgccctgtgctggccatcacagctaccttgctgcatacatattttgctccagaaaagcaaggctcagccaagagtcagcacctgcataactctaaagtcacaggggacctacaattcaaacccaggccagctttgctccaggacatccactgacatgtcatggtctccattgtagcaaaattcacaagttcaaaaggattttaagttgttttattcctttgtattcttctttcaacaatatcctattgttcgaattcccaaactcaaacagtttataaacgattgctgtagttagactttaatcgctgtcccacagttaattccacaaaggcattttgccctgtgtaattccattcttttcctattcctgtgtcattaggggaaaaaatatgtttttgcttatgagatatctctagctcaatttctttctggtagtgtgtctttgatcagttcagacatttctcagacttcgtatacgccctcgtttgtagatagcgttatgtgttctctgaaactttttattgcttttcagctttgtgtgtgtgtgtgcacgcgcacgcgtgcgtgtgtgtaaagaaggagattaggacatttagagaaggagggcggggaggagagatcctgagaatagaaaggaggaaagaaaaaaagaggaatggaaagagacagagaaaggaaatgggagtggaaggagggaggactgctttgtaactgctaagattgcagacagaaatagcacacaaccactgtgagctgtatgcgattcagaaaccaagaccaaattttgctcactttcattaatcagttgctcagatagaaggaaatgacatctggttctgtcttcttctacatcttaatttttggaaaatattgtaagtatgctcagtatctaattttgtataccttagtattttgtggaataaccacaagcacaaatgtttactccttatatttatgcttttaagataaaatgcacttgctgataaaattgtaatctcacttcagaattgttcttcttagtatatgtctggtatttgtattaaagaccataatatcttatcatagtcaatagtgaagcgagactgatgtgccgtgtaaacctaggcttcataataaccaattcatataattgatattttaagcaacattataatatttaaagagtagtaattcttaaactgtattcaaggaatatattcattgaaaactcctaggaaagttctcacatttgtgccagtttctgtatagttgtaatgctctgtcgcccttattctttgtcatttgctatcataggtgtgcttctgggcagggagatgcattcataaaactctttttatttagcaaggtttatcactgttccttgaaagaaaaacaagggaaagcacaaagcaatgaaaaacataggcacaaaagaagctccaaatgggcatgttatttttactataatgacaaattttgttttctctgtgtgtgctatggtttatttttcagaaaatcttttttaaattcaagggaaacagttgttgtgtgttaagctccatttgaattatagtatgtagacagaaataaagtgtttttgtttcttaggtaataaatgatgaaaaagtcaaagccaaaccaagaacaaaactttctgggtatctttaatactttatgattccgggaatgtgggcttttactaatttagaaattaacaagcctttttatagtcctgtgtctcttaaaagtttgcataagttttgttaactctgagctcttctattaaggaatgtctcagggtaactttcaatcctgactctcccaattgtaatatgtcaaagtga

SEQ ID NO: 10046 - DNA, 6000 bp, Homo sapiens
gtgtctcaagtgaagggccaaagacatcctttttaatcaacattttcagtatcatcctctaccctatacactgcagtcatacgaaaccatttacatgattctgaatgcctcatactctctcaccttcatgctattacaacacttctcgattctccatcccctccatctgcctgtttaactcttaccaaccctttacatttcagttcaagtgtcttctcaggtataaagccctctgttacatccccagtttatttttaagaatgaattacccaggaatataaataagaaataaacctagagtttatttcaattgcagaacttatcacattgtattgccattaattatgtagctgcacatatctacaactatactctgatttcttactgacagtgactgtttttttttcatctcttaaacttaggagcctggaagggcatctaacacattataagatactgaagaagttttgttgaaagattgaaaaactaggaatagggtaggactacaaaaatttttgaatatcacaaatcaagcccatttgttcatctcaaacattaaaaaagtgtcttcagcatttgcagctatgatggatgattgctactttatgcatatacattttatgcatagtctgcttactaatacactccttctgatgatctgcctcatatttttggatattcttatgtgttagctctgcctcctctattaggtataaacttgaatatggaccctacttcctttgaaaatgcttataatgtctacttgaggaacggtctcatatttttttctacctgttcaataacatattttaatagctgtattacgtgtgagaataagactaagaatgtggtaacatacattttaaaaggcatatcattcaacttttggtcctgagcttatgctttgaacagttctgtaaacattctttttaaagattaaaacaaaccaatataccaaatataaacaaaccgtttccctttcatttccacttaaatatagtaaagctatatttagacttataattagatttaaaatattaactacaaaaaatagataggaaatggaaacatttttaaaaatattacaggatacttatcttttctcagaggagttttaaactacaaaaggaaataattgtatggcctatatatggattgacataataaaatgttatattttcaaaggaatccatgctctcttcttgtacatatatatatatatatatttgtgctgcaaaactgaaaaacaatgtaattaaagaatgaagtactgatatgtaagacagccataactttttgaaatgaatacatgaaatatagttaatactagctgcagagaagagaatgtgccaataataatggaaaactttagcatcagtattttctttgtaaattttaatatagagggaaaataaacaatgcctatggctatcaaatttttctgaagatctaaaaatatgatttttctacacatatgtttgtaatgcatgctaattaatggcataaagtcataagtagtcaggtctcaaaggggactccagatcttcgattcaaaatatttcattttataaagaaaacgaagactgaaaaatcaagtgcctatctaaagccacaccattaatttgagatcaagcctggctacaactcaggtgttctgataagtgtctattataaaaatatgtatgtaatacatgaacatataaaatacatctgtatcatatctatgtgtgtatgtatttttaacatgagtatttgctagtaaaaataattatacattctctctgaaagtcagtcactgttttatggtataatcattagggcatcaaaaggataaataaagtgttgcttaaggagcacagtgtttatcagaagtcaatacaatgttaatgatgcccccgtaggacctcacaattatcgttaagttgcctgggaaatggactcaatgcacacaatactttgggctaaacttcttttcaatagcttttgggttttttttttgttcaaaaaaaaatcatgtatttcataataagaagttggctcctcatttgaagtcctaaatattgatttatgtgacaaattattactattccaaagaaatcaatgcagcatagagcatcataaaatatttttgataacacatcttttaagtattaaggatttaaatttaccgtgatagaaaaagtggatgaagaaacatttacccttaaggaatacaacgaaattctcagagaaataaatgcataaagtaaaataatactgttttctctagtttatttacctctacttgttctataactaatatatcaaagtcaaatatcatttgagattataccaaaacactttagtaattgctttccacaaatagtagctgttattaaaatgcagcagtagctttgacaagaaccacagccatgttcctcagcaaaatactaccccaggaattgttgggtgactgttttatcgttcaataatttgtcttaggagtcccaagtcacctttaacttttacctttacagataagctttctttcataactgataatgaactgtaataacagggcaatagccagtttaattttgtaacatgcataaaatccaacttaatttcccaaatgagcattttataaatagtgagtaggaaaaatacataaaacagaggtggacattactacttctgttctggtattccccttcgctaagatgttactccataaaataaaaataaaattattatgttctacaaagagtaatgatgatcagtctcaaatcccccctgggaaatttaaaggtaaaaacacacttatcttcatatcttcctctttatgtagcatattgcttaaatttgtaaatttataatttcctcaaaaaaactcttaataacttgtccactccaagtgttcttaatactgtgtattgtcacgtgtatttaaagaagaaatgccaactcctgtttttgagacttgcttgtttgtgggtgcagtgggaagggaaaatagccaggttaattagaatctttgtatcagtggcaggtagccttttattttcaatactctaataacagtgacttcaacctaaaggttcatatcatcaaaatagaaaacaaatttgtggaaaataaaaaataagattttttaatacttttaatatgcaaaagcctgtagcatagactagtgttttgaaagtcacaatggggttcacttggaatttgttttaaagacaatgtgtatttgaagtgtacatgttatgactgtgcaagagatggaaagatagaaatttatgtggcaatgtgtactgcattaaccgcagagacagtggagttaagaaagtctaaaaaacaagccttattttctcaaggtcatcccttcttgacactttcatcccctactccttactgcagaatcccaggtgcctgctcagacggcctattctgttaagcttttggggagaatatattaatatttcagaaataacacacagaagaataaaacaggaactgtgtttacttgagttctttaaaagctcttggatgactctttgactgatgaaatagcaatctatacagatcccctgagtattgaatgctgaaatccagcagaaaggggacacaaaaaattttctttgacctcttctgtaacagtgatgtctgccccagatgttagaattacaagtcacattgctcccaaggggtacagttctcttcggtttatcccacacgactctactcagcaggagatgctgtctgttacataatagttctcagtattaaagggtacaataactacaccctttctcatggtaaagctatgtccaaagacacatggacatctacccaatgtctcttttctcccttctctccttctctctctctctctctctcacagacacacacacacacacacacacacacacacacacacacgcgcgcgcgcctaaagtacctgccacctaatgattagctaaaaataaagcaaacctgcgcaatacagatttggaaacattagggatggaaatcatgttgggaaggaacagaaggacaggttttctcttcttcttttgtgtgggcttttttcccgtctttttttttttttaacctgtgacaattcgtttttagcccttcgtcttctctttgctattgaatatagtcttgagcagcgttgatttcatttcagcttcactcccctgctcctgccacttgcccacacccacagctgccactccttggagtggggaaacttcccttctattctgctgggctcattaccgcagacgctgttgcctctcctgaacattgggtcagcctccccacctccactcttccttacttcaaagaggtgcaaaggaagagcagtgttttgtcttttttctttctttctttctatcaccacaccaccccccaccgtcccccaccccaaacaaagataaaacctgagagtcgaagcttgttctcaggaatactaagaacttaggggcacagccatcctcacaccagtccaagacttctcagagttcactacacagggttgagggctggaccggcaaaactcgatttgcccatcaagttaacttggtcggcctgggacccgaggccagggtgaagggacgacatcccggggccctgtggcttctccctagagcgcccaaacagcggcgtaggtctgggacgcccccggcccccggctttggaagaggctggcgcggagcaggcgccttggagcagggtctcgggggtccccggaacagtcacgtgttctcgagacgccgttaaacccccgccccctcttccccaccgccgcctccaggtcctgctcccgctgctgccgccaccgccggggtgcaggagcgatcgcgctgggccgcgctcccgggagcccagggcctgcagcggccggggcgccccgaggtacgggctcccgcccctccctgccaacccctttcgcgccgggtaggcctgcaccgaggggccgtggcgggtccccgcgcgggctgcgagtctgcgcaggtccctgggagcccgcacccgtctctggtgccagggcgttgtcgggggtcccaagagagcggggtggggaaggtgaagggagcgcggctggaaaaatggggattagggtggcggaacaggcacttgtcaggagtgaagagacagcggagagggtactgggctgaattctttcgtgccgagcaggtccctccggttcccaactcacccgggtggagcaggcgcgggccgaacccgggaggagagtgtcggggatccgcgaaggagcctcctggggatggggcgggggatggacaaagcgctgcccccggctggacgcgctctggctgcagcccggctggcatccggagctgggaacagcagcccgcggggtgcccgggtcagggctcaaccctagcgggtctctggcgaggccgggggcgcagcccgcggggcgccactcaggccgtccagctgccgcgcggtccagcgctgacccgagcccgggaggcagctgcgctctaaggtttgcgctcctgtttgcgaggtgtcttcatataacaaatgcgagcaataacaaacatccatagaactcgaattccagaaacgggaattcttttttccaagttcacagacctttagttaatcttttaaaggaactgaggcgttgtgttggaccaaagccaaaacgattttaccttagaccatggaaaatagcctaaggctctttcagcagaattttgcagtccgaatgcaattttagatttcagatttctcaagggaagagaaactctgctgttagaatttggaagggagggtggtgcatgcctgtgtgtttgtcagctgagcagagctgtatttatctttccaattcaaattgtgccagattctggctttaagaacaaaccatgggaatatttgagaacatggaatcatgctgctgttccacgatcacagcaaaacagacaatagttgatattgtatcattgcaggaggaaaaagaattacatatattttattcttttg

SEQ ID NO: 10047 - DNA, 6000 bp, Homo sapiens
caagacactaataaaaaagaggagcagagccagaagactgtcttctagtcatcagggtttatgaggctatggaaatgaaaccagtgtggtattagcagtaggcagagataaattggccaatgggatagaatggagagtccagaggcagacccatgggaactttgatgtacaacagaggggatgatgtgccttgtcagctggggaagagagaccaccattcagtaaatggagctggagaaaatccatttgaaaaaagattaaactgggtctttaatgcctcatgccacattaaaaaaaaaagtcaactctaggtggtttaaagacttacatatccaaaccaaaatcttaaaaccctttaaaaaaaagttggagaccttaagataaggaaggccaataagacagtgaaaggcatccactagaaaaaaaataattttgactaaaaataagaacttgtatttatcaagagcccttaaagaagctgaaaaggtaagttacaaattggaggaatctgtttacaatccacacaactaacagagcatttgagtaaaaaatatatcagtaactataatcagtgagaacatcacaacaagtcagaagaaaaagtagcaggagaatggatgagcatgtcgtagaagagcgaacacacgggttcagcacatgtgtgcagaaatgttcaacagcatgggggtcatggagatgccaatgaagacaattagttaccattttatgccttttccatcagcagaagttaagcctgacaatgccaagtcttgatgaacatgtggacccacaggatccttttacatagttggtgggaatgtaagcggacgtcccctgggaggcattgccttctatagttacatgttcatgtaccctggaacccagcagccccactcctgtactcagagtaaccttgcctgtgtgcacgtgaatatgagcatggatatgaatattcattgcagcactatgcacaatatcaaaaacctggaagcaacccaaatgcccagcacagagagagtgaactaacaaaccctgtgttattatacaagagtcagaaccaatgaattatagcaatgcagaaaagcacaaattagttttaagtgaaaagttgaaaagtaagtccgataaattaacattcaccatttgtttttttttaataaaggtaaaaatcactaaaataaacagcccactttaacaaaaaataggtgcaataaaactataaaagagaaagcaagggagtgatgaacagaggttgtagggtgatgatacagaggatataatagggtgatagttacctgtgatgagggggtcatatgattagataacagattattgacaaggtcctaccttgtgtcttgctggtagattcttatgtacttatcatactattaacagtaactaaataaaggcaggttgtgctgggcccactcattagactgtgagatgatactgtggcttatgattaatccaatattgtatacctgagatccaatttaaaatgtgtgtgtgtaacaattgttgagaggattaaatgactcaagcatctcaagagtaccaggcatatactaactgttcaataaatgttacctgttaccactattatattagtattattgatgaaattacctctcatctgtgtgatatatttttgttttaggctgttactacacatctgtaaacaaactgcctacaagaagtcagatgatgggtctcagatcaactacatccatgtgtagaagatagctcctctgtgttctcagtctttctcctcttcttcatgtcgctgactcccacttaccttgcaggtctcactttattgttactgtttcggagattctgttcctgtatcccccagtgttattctgtggacctgtattattctgttttcatgctgctaataaagacatacccgagactgggtaatttataaaggaaagaggtttaattgacccacagttccacatggctggggagacctcacaatcatggtggaaggcaaaggaagagcaaagtcatgtctttcgtggcagcaggcaagagagcgcatgtgcaggggaaatcccctttataaaaccatcagatctcatgaaagttattcactttcgcaagaacagctcaggaaagacccaccctcatgattcagttacctcccactgggtccctcccatgacagataggaattatgggagctacaattcaagatttgggtggggacacaactaaatcatatcaggtccttactaaaattccatactgcctatgaaactttatgatttactgtttaactatctctgaactctaagctctccctggactccaagctctacaagcataagaattatagtagttgaactttgggaggctgaggcaggcggatcacgaggtcaagagatcgagaccattctggccaacatggtgaaaccccatctccgctaaaagtacaaaaattagctgagcgtagtagcgctcgcctgtagtcccaggtaatcaggaggctgaggcaggagaattgtttgaatctgggaggcagaggttgcagtgagccgagattgcaccactgcactcctgcctgatgacagagcgagactccatctcaaaaaaaaaaaaaaaaaaaaaaaaagaattacagtagttgattcactggtgcttatccagggatcagtacaaggcctgacccataatagatgctgggcaaatgtttactgggtgaatgaacaaaaagaagcctctgtctgcacattagaaggcattcaaacctggagccattttgactctattaggagagtactcagcacacagtggcaataaaggtcttcattgtgtctaaaagtattcattgatttcttgaagcagacacataaatttatttcactaaggaaatgaatggaaagacgctgttgtaaagatgactgcctttcattgtcctgagtggaattttctaccatttctaaatggaaaaagagaggaattgcaatgagtttttagggcttcaagaacaaatgccattaaaggtttacaaaagggaaaggcaagtctagacgtttcattgtcgttctcttctatgtttataatgtgtttccctttgatgaaagacatagcatcattcttatatttctgactcagacattctttgcttcactttgtcactgtaatactcaattcaggtaatcaccggccgagagcagagtggtagaatgcaaaaaggactagtctaggattccagatcctagtagctgggttctaattttgtgtcctgccagaacagcttatgtgaatagtcccttaacctagtaggggcttaacgtttcttctataaaatgggtcaggctagttaagttaaatgattgttaaggttcttacctctgacaacctgagccctcatgtgtacatgtttttatgtgcagtttgtctttattattccctttgcgagcttacatattttatgaacagtataaatgggttgtaatgtagtttcttccctcacagtgattgcttgaagttattaaaggtgctaccagccaggtacttctcactctggtttctaaattcatttcaggtaggaccttaggtgctttctacggcctttaactctcttttgctaaaggtgctgaaggagaactaagaagttgagtgacgaagtgcaagggccgttgactcaagtctggaagggatctgtgttctggttcatgatacactgccaaataattggttgttaattttttggtccttggttttcttagctctgccataaaaggattcagctggatcttatctaagataccttgttgctccaccaatccatgattgaatttattaaatgtagtgccacccacccttgttaggtgcccttgagatctgttatttagaggattgctgcaatggcacaagagatgtatttggaaaaatctgatcagtgaatattaagaccattctacttgtcaactactgtgcatgttttatgtcttaaccttcatattaaccctaggaggtagtttttctttgtgtattttataactatataaactgaatcatagacaactgaaataacttccctaagtcactaggaccattaggtggcagaggcatgattcaaatgctagtccgtttgattccgagtgcctctcagcccccatcactctgctttagtacttagtagtggacaccgtaggggagaagaaagggcaagggctttggaaccatctaacttcagtttgaatgacagccgtactattgactgtgtaatctctagtgggtgacttctctcagtcttagtctctgttttcatatctcaagattaacactgacctaatggtgatgataaaaggataaagtgaaatcacatgcaagaatatgtttttggatacatagcaggcatttattaatggaagctgttaatattttaattgtttacatattcatcatctatatgcttgtattcatcataaagtttattttttggcacaattgttatgcataatgcactgctgtaggcgtattggttgttaaatgaactctagtatgtgagagtttacagttagataacaaatacatagagtggaactttttaggataattattttatacccattttacaactttggaaattagtgtcccgaggtaaggtggctttcttgagtaataatctactgcatttaacattagttaataatagtaattatttacatgccttatgaattagattacttctagataatttacagaattgccatgtacatctctgatttatttggaagaaaatgtgatagcaaggttgtatttcatgtagacaaagtgtgagatggagaatacagtaggaagtactacattccaaaagattaaaaaatctttcctactagattttaatcactcattttttctgaaatttgtagaatatttagtgatttgctttcctgactgtgttagcagatgtcatcatacccctaaaattccactattggtaataatcaggcttcagtatctttaagagtaaacctcctctggaaatttagaaatgccatagaaaacacttcagtgcctaaagatgtgttttgtcccctgtagaaaattctttgtttgacacctcctatgtgggagttgcctttaacctgtatttttacttttgtattttagagccctacctcattcttttgacctttgtgtcagagacacctccagcaatagtagagttgaccattttgagtcagcatctgatttgttttgaatttattggtttctatgcatcaaattcatttatactatttttacttacagtatttggtgtgacttgatagctcaaaagggttattttatgctttctgttccacttctgtctataaattttgctttcacagcgcagtcagcaaaactaatgggaaccatgaagccacttttctttttaagacgatcatttctgacgtttgtagttgggccaaacttgatcccacctcccagcacctcagagccactgcaaggtttatctggagaggggccaccctggctttctcctgcaaaagaagatttgggctttcaggtcaccaagtgtttgctgcagattggttctcattaaaataaactctggacagtggtccataattttattatcgacctttgattttcttgaggttggagaggcatccctttagaatgacagattttttcttggaatttcataattatataaaaaagcagtgattaaaaaaaagcaagttactggttaagaaagctggattatgtccttgatactccagtgacatatgacatttacttttcttaaactaaaatttaagcttctctcatttcctcacatcttcatctagaatttcatcctcaactagagttgcttcatgtataggtcatgtgataaatagaaactgtaagtgtatcatttgcatatattgcagttatcctatacttactgagcacctattatatcccatgaattgtgtccattcaattcctacgaaacccctagaggtggcgattgataattttctactatta

SEQ ID NO: 10048 - DNA, 6000 bp, Homo sapiens
caaatatctgtgtttagccagttcttggttttttctttcaacgcagctacaaggccaccagctatgcaaggccacaagttatgccaagtcatcagttatgctatagattatgtgacctgtcattatatgattaactgcctttgttttgcttctgtaagtttgcttataaaaatcctgcttagtctttgttcaaggctcagctttttggatgtgaatccactgagctggtgcgtaccttaacataaatatcctcctgttttcacccatgctggtctctctagtcctctgcatcccgccacaaaagcatcagttggtccagcccttcagcgggagacccccacaatcctctgtgcaatcctctgtctcggacctcatgtctcccttgcctgcgtctcaagagagctggcgacagagcctcggacctcaagtccctgtgctagccacggtagttcttcacaccccgtcactcttacggaattgctgatttcctctatttccttgcgtgatggagcagctctgctcggactgtgctccaggacagtgtaaatgccgactgaagatgccacagcagccggcgatgcatatttaaaggacagtctggagccgaaggtggcggccacgcttgtagtcccagctactctggaagctgaggtggaaggctcacttgggcccaggagagtccagcctgggcaaaacacagcaagaccatctctttaaaaaagtctaaaacaaagacttcatcttctcagtatttttgtgcaccaactcacactattttgaatagaagaactgagaatgggtgggaagagaatgggatctttttcccttaagataatcagggagtcccagagcagtatgcgttctcagcagccattttcagtggagcatttgactgtgcctcttatccctgactgtgaactccaaataggtcatggaaaataatcatccttagtggaagtcagattgaagctaagccagttttctttttacactaccttcctatctgcatgtaatttacaaaaaggaactataccaagccgccttccttataatgctgcagagattagataatgagataaatacaagtgctctataaatgctaaataacataaaaccagattctgtcacaaaacctaagaccacagtgatagtttgaaaaatgaaagttttggccgggcacggtggctcacagctgtaatcccagcacttttggaggccgaggcgggcggatcacaaggtcaggagattgagaccatcctggctaacatggtgaaaccccgtctctactaaaaatacaaaaattagccgggcgtggtggcgggcgcctgtagtcccagctacatgggaggctgaggcaggagaatggcgtgaaccctggaggcagagcttgcagtgagccgagatcgcgccacggcactccagcctgggtgacagagcgagactccgtctcgaaaaaaaaaaaaaagaaagttttaattttttccctgaaatatctcatattaactccacagtagtgtgattatgaggcctgtccccattgagtgagagtatttgctcctgtggtcagaaagcatcattatgtatagcttgattaatggttagagaagttgaatatataatattagatatacatggatacatgctgagtattggttataatttagggctttttcccaagttgatgactgtgtttgttactttaaagtatctcccaggaagtaccaggaggtgtcttcttggacacataacttcatggacagctccttgtttagcttcactggctcatatactagaaaattaacctttgaaatgaatgaacgtagcacaagagttatattctggtcctgagaagcgcaatgttgatttaatattattagtgagtccggtcatttcctggatttatttcaaatagaatcagtcagtctcaatcccccctccctctctggtccctgctatggtctgaatatttgtgttcccccaaaattcttatgttgaaatcttcactacgaaggggatggaattaggaggtggggcatttgggaggtgattgggtcatgagagtggaaccctcgtgaatggtattagtgcctttataaaagaaactagagagacacccctcactccttctaccatggacacagaaagaagatgccagctatgaatcagaaagtgggccctcaccagacaccaaatctgtcttgatcttggactttttagcttccagaactgtgagaaatacatttctgcaatttataagctactcagtttatagtattttgttagagcagcttgaacagactaagatggtctaaacagaagattgttagagccttttcctttcaggaatgttggcagatgatgctgcactgaaagtgtttgtgtgtcactctgccagggacatgaaggaagcgtgaaatgatcatattggtttggtcttattttgtttcgttttgttttgagacagagtctcactctgtcacccaggctggagtgcagtggtatgatctcagcacactgcaacctctgccgcctgggttcaagtgattctcctgcctcagcctcccaagtagctgggactacaggcacccaccattcccggctaattttttgtatttttagtagagacaaggttttgccatgttggccaggctagtcttgaactcctgacctcaagtgattcgcccacctcagcctcccaaagtgctgggattacaggcgtgagccactgcacccggcccgtattgggtttttgttggtgttttgttttatttttttttccttgatataattcataggttcatagatcatattgttaataaatataaaaacaatttttttttgaggcgtcgttttgctcttgttgcccaggctggagtgcaatggcgcaatcgtgatctcggctcactgcaacctctgcctcccgggttcaagaaattctcctgcctcagtctcccgagtagctgggattacaggcatgcaccattatgcctggctaattttgtatttttagtagagacgggggtttctccatgttggtcaggctggtctcgaactcctgatcacaggtgatccacccgcctcagcctcccaaagtactgggattacaggcgtgagccactgtgcccggcctgttttgtttttttttttaatttaggattttttccctgtataatattatttgttaagcaacttataacttttatgctttaaataagcttaaattatttcacatcatacttctgaggagactttaacaccgtcttatctcttggagaaattgaaaacaaatgcagagaggaatacgtaatacgtgcatttaatgtgggttttggtcttatatattgcaattctgttctgatttcaggctgcggtgttattgagcagtttctttaacacctgcagcatggttaatatacctgttattattaatgctgtctcttgctgaggcttcctccctagaacttttgctaacttaagcaaataggaaatttatggagaagatattgggtagctcaaagaatcaaagtaagaacctaacaatcagtctggaaagaacaggatgtgggactcattcattcatgcattcatttggcagatgtgtgctcagaatgttccaggtactgttcctatagcaataaacaacatgttcagaaattcctgccattctggagaccacattcttataggggaggcagtcttgaggcacataaataagacgtgtggcatattagcaagcagtgagtgccacgggagactacagcagggatgggggtaggaagcgcccaggtggcattggtagttgcagttttggatagttttagacagggggctgctgattgataatcaggtctccacggtcactcctgtgacagagcaggtatctttttattttatttatctgattttgcctcatgaatttcatgattcttatcctgggagagagcaccaattggctggcttggctctggcccccttcctgcatccgtggctaagggggaaccaggcagctggaatgacagtcccaccaagacatacaccgtgggggagaagtaagggaagggctgcagaagaaaccaacaaagggccattgcaagggcctgtttacatgacatagtaagcaggcataggccatatgcgctagggccagaggggtagctaggagaacggagaggaaagaggagatcagagagatgctgaaggtagaagacactggatagaggagcgattgcagagaatcctcaaagttgcctttgaaattccctagctgaggaaattaaaagactgctctttctagtcttgaactcctgacctcaaatgatccacccgccttgcccttccaaattgttgggattccaggtgtgagccactgtgcctggccaaattttcttttcttttcttttctttctttctttcttttctttttttttttttttaaagagagtttcgctcttgttgcccaggctggagtgcaatggcacaatctcggctcaccgcaacctccgcctcctgggttcaagcgattctcctgcctcagcctcccaagtagctgggattacaggcatgcactaccacgcccggctaattttgtatttttagtaaagatggggtttctccatgttggtcaggctggtctcgaactcccaacctcaggtgatccgcccacctcggcctcccaaagtgctaggatttacaggcgtgagccatggtgcccagccttttttttttttaaagacagggtctcactctgttaccccgctggagtgcaggtggggaaatcatagctactgaagcctcaaagccttgaactctggggccaagcagtcctcctgtctcagactcccaagtggctgggaccacaggcatgcgctgccatgcacagataattttgtggtttttgtggagatggggtctcactatgttgcccaggctagtctggaacccctggactcaagtgatcctaccctcccacttcagcctcccaaagtgctgggattacagggtgaaccactacacccggcctattagaattttcaacagcatgtaagatcaagttttctagaaagagttataaacttagtatttcttatctgtcagatatttgaagtaatctatgtagtagtcagccaaattatttctctgccaacaaaaggttaccccattttccctaagcaataatgtctaccgtctgttactatcattatggtacagctaatttgggatgctatcaatcagccaggttattagcaaccaggtcagtttggttttcttatattttctactttgtctatctagattataatggctttaaatcaggatttttatttcttggtcagtgaatcaaatattgggttattggctttatgctactttaggaccaaaaatatctataccactgatactataaaataatattcttggccaggcacggtggctcatgcctgtaatcccagcactttgggaggccaaggcgggcggatcacgaggtccaggtatcgagacaatcctggccaacatggtgaaaccccgtctctactaaaaatacaaaaattagccaggcatggtggcatgcacctgtagtccgagctactcgggaggctgaggcgggagaatcacttgaacccgggaggtggaggttgcagtgagccgagatcgtgccactgcactccaacctggcgacacggtgagactccatctcaaaaaaaaaaaaaaatgttctttttttttgggggggtcagtctcgctctgtcgcccaggctggagtgcagtggcgtgatctcagctcactgcaagctctgcctcccaggttcacgccattctcctgtctcagcctccccagcagctgggactacaggcacacgccgccatgcctggctaatttttttgcatttttagtagagatggagtttcactgtgttagccaggatggtctcgatctcctgaccttgtgatctgcccgcctcggcctcccaaagtgctgggattacaggtgtgagccaccgc

SEQ ID NO: 10049 - DNA, 6000 bp, Homo sapiens
ctgctgaggggaaccgtgttgaggaggagctgggactcgggaatggcaggtgtctgctgaggggaaccgtgttgaggaggagctgggactcgggaatggcaggtgtctgctgaggggaaccgtgttgaggaggagctgggactcgggaatggcaggtgtctgctgaggagaaccgggtgggagaggagctgggatccgggaatggcaggtgtccgctgaggggaaccgtgcaggggaggagctgggaccctggaatggcaggtgtccgctgaggggaaccgtgcaggggaggagctgggacccaggaatggcaggtgtccgctgaggggaaccgtgtgggggaggagctgggacccgggaaatggcaggtgtcctctgaggagagctgagcaggagaggagctggggcctgggaatggcaggtgtctgctgaggggaactgtgttgaggaggagctgggacctgggaatggcaggtgtccgctgaggggaaccgtgtgggggaggagctgggaccctggaatggcaggtgtccgctgaggggaaccgtgcaggggaggagctgggacctgggaatggcaggtgtcctctgaggagagctgagcaggagaggagctgggactcgggaatggcaggtgtctgctgaggggaaccgtgttgaggaggagctgggacttgggaatggcaggtgtctgctgagaactgggtgggagaggagctgggatccgggaatggcaggtgtccgctgaggggaaccgtgcaggggaggagctgggaccctggaatggcaggtgtccgctgaggggaaccgtgcaggggaggagctgggacccgggaatggcaggtgtccgctgaggggaaccgtgtgggggaggagctgggacccgggaaatggcaggtgtcctctgaggggaaccgtgtgggggaggagctgggacccgggaaatggcaggtgtcctctgaggagagctgagcaggagaggagctggggcctgggaatggcaggtgtctgctgaggggaactgtgttgaggaggagctgggacccgggaatggcaggtgtccgctgaggggaaccgtgtgggggaggagctgggacccgggaaatggcaggtgtcctctgaggggaaccgtgtcggggaggagctgggacccgggaaatggcaggtgtcctctgaggggaaccgggcgggagaggagctggggcctggaaggccaaggcaagggctgtctccagtccacgctgcaccccaagaagggaagtgtggagaggtattgactggtggctcagtaaaatggcctggaagtggccttggtgattccagaatctgccagctcactccctttggcaccgtgtcctgctgtgtccagggcgggcaggtccatgctgctctgggtccagggaaggtctgggaagagtggccagggacttggagggcctctcaggtgaatgatgggaggtggctggatgcagggatggccagtgcgggtctgcatggggcgggtatcagatcgtctggtgtgtgtgtccctgatgaggtgggaggggggtgccaggtgggtgttcggcagctgtgggcactgtgaggtggtggtggggggaggctgctgggacatgatgactatgggagggtgtgaggtgggcaggcgcctgcgggggcaggtcccaggtggagaaggtggcgtggtgtcttgctgtctcaggcccttcctctgtgcatccacgtaagtgtgggtaagccaagaatagcctgggttcaaatccacctttgccgttaattggctgtgtgctggtagacaagttacttagcttctctgtgcccccactccctcatctgcacgcgagaattgtaacagagccttcctcagagcgatgatggtgtttaggatgacatgcgctgcacagcaagtcctggccgtggcggctgccattgcagcccgtggggtcaccctggaggccgtgattgctgatgttgtgctgttcttgtgccttgctctcttcttctcggtgcccccagactctctctgccttcggaggacggcgtctctctcgcctcacactgtgtgcacgggcagtgcggacgggtgctggcttggtctttccagccctgcctcgctcggggcctgctgcatcgtagctcaggcctaggacccatctctgtacctgcaggtcttgggtgctgcccggcatgagtggaggagtttatcagaacaggaccttttataggaggttttaactttagaagggaatagaaaagtgtcatggcagcaatatttatttctagatcaccctgagttttttttctttgttttgttttattgtcctctttacaccatgagtttttaatgatgaatgagtgaaggagtgacagtgcgggttgagcatcccttatccagatgctccagaatcggaaaccctctgacaccgatgtggcacctcaggcatagctgagctagtgacacctttgctttctcatgggtcagtgtacacaaaccttgtttcatgcacaaaattatcaaaagtaccgcacaaaattaccctcaggctgtgtgtataaggtgtatatgaaacataaatgaatttcctgttcagacctgggtcctatccaaacatatctcattacgtatatacagatgttccgaatcagaaaaaatccacagcccttctggtcccaaaaatctcttctaagggacactcagcctgtgtgacgtggtcggtgactcctgatgggaggtggcagtgctgtgcggcgagtggggaccttcgtgtcacatcccatctgtgcctcagggcttggatgaattacttctggctggaccttgttcccttttccacacagtgaagaggctgggttaaatgatctccagtcaaggtgattcagagttagctggaaggtgtgtagggggaagttggagcttcctggccttgccccagacttactaagtcagagtccctgggaggtgcaggggcttgggagcaggcgttcttactggtagccccgatggtgtaatggaagttcagctggaatccagtaccccatggtcttctaaatttcactgtctgttctgctagctttactattaattgatacagttttaaaaaaaattaaactataagctgaacttatgtgattattttgggaggccaaggtgggaggattgcttgaggtcagaagtttgagactagtctgggcaacatagtgagacctcgtctacagaaaaattaaaacattagccaaggttcactgggtgtcttctccttggcccctttgcccacgtggtgaacactgtggacctgtgagggtgtgagggttgcgttcctgcgttctggactctttacccactactgagaagcagccgtttgaaatatgagttggcaaggaagatcagcatgtaggcttagaccaagacggtatgtgcagcctcctgagctaactgggcctgtgcttgagcccagtgatgagcagcctcagcaagaggaaccaccacctgaaagtcggggtcttacctggccaggagagagaggaagatcacggtgctgctgagattcttgtgcttgaccaggaagctgatctccgggagctgtctcaaagactgggatgaatgtggagatggtcctgatgtccggggaatattctgccgaaatcagagcaatttaaattgccagaaggaggtgaagggcaaccacaggttccaaggaagacaagctgaaacaatgcaaactggttttatattagatacgtgacttaaaatatctcaatacagttttctccaaaaaaaaaaaaatagttagccgagtatgggggtgtgcttggtatggcttgagcccaggagtgagtttgaggctgcaccgagcaatgactgtgccactgcactccagtctgggcaatggagtgagaccctgtctctaaaaaataaaaacaaagaaacgtgattatagataataagatattacttacatgagttacaaaccatttctttttaataagcagaggcccatgacagtaagagtctagtagaaaaattgggtggactgcatagaagacattgtccatcattatgtcacacagtgtgaggcggatggtgcgaataaactgggaagtcatgtctttcattgaggcagcatctattcctgtttggaagagaaagccgagaggtgttctgttccccgaggaagccatcaaggcttcatgacctgctgtcctggggctgttcacagtgatagctggcacttgccgggaacagcagcacctttgttgtgtgacagatgcttttctgagcgtgctttagtgagaccgtttcacgcatgtcctgctttccctctcccctcacccgtgacaaagtgattcccccttgtatttgtttcctggggttgctgaaagaaattactgcaaactggggggcttaagacaacacacattcattctcctgcgttttcgggggcctcgtgtctgcagtcagtgtgacctggctgatggcaggtgtggcagagctggttcctctggtgactttaagtctgcttccttcacctttccggcttctggaggtgaccgcctgcccgtctgcctgggctcgagacccatccttgaatccctgcagtctccgcatccttcctcatgtggccgtcccctctggctctgaccccaggctcacacaggcgcaccccacactctccccatctctagagccttcacgtggtcacgtggatgggaggagccatccaaaagcttgggagtgaggatgtgggtgtatcaggggccatcagccagcctgtcacacctcttaagaagatcgatccccagacgtgtttcttggccaacttttacatttatttatttattttttaatgatgatttttaataatttttaattattaaaaaattataaaataattttaattattttattttttaaattcattttttaatgattttaaatagttaaatgcccagtcctaatatttaaattattaatacagtactacttagatattgagtaatgtaatttatattcattttttactcttttccatcaaaacataattttactaagtacgcatgttctgtgtccgtgttttgtcatcactgaagccacttttggagtcacctagtaatagcctttccactctatctagttctgtagcttttatgtgtgtaaattacttcaaatctgtttatgatcctattgctggaaactttatcccaagacacaaaaatcttttctattagaagttattaactttaaaacaattatttattttattttattttattttttgagacagagtctcgctttgtcacccaggctggagtgcagtggcacgatctcggctcactgcaagctccacctcccgagttcatgccattctcctgcctcagcctcccgagtagctgggactacgggcgtccgccaccatgcccagctaattttttttgtatttttggtagagacaaggtttcaccgtgttagccaggatggtcttgatctcctgacctcgtggtccacctgcctcggcctcccaaagcgctgggattataggcgtgagccaccgcacctggcctaaaacaattatttctttaaaaaaacataccctctattctattttgtgtcttcacaacacaatcacttactgtattgctttttaaagtgatctttaaagagtcttgcagaagagactacacagcaggcccgagaccatcctgagaggcctgtgtgcaaggctggccccccgctggtgtcaggacggtgcccaccaccctcaatgaagaggggctccctgtgcttagctgcttgtgtggggaacaaggtttgtgctgagaaccttcctttcttctgggagtccagagtctgggcacgaagcaggcagagggtgcccatgtgcccagcccccagtaaaaaccctggcaccgagtctctagtgggcttccctggtgacgacactgcacatgcgttgtcacggctcactgtgtagggagttaagtgcgtcctgcgtgaccccgctgg

SEQ ID NO: 10050 - DNA, 6000 bp, Homo sapiens
aaaaaaccactctagtttgcacagagttacatcatatgatagtatctgtgctcaaacatcatctgtatgatgtcttctccttgagaagaaggtgttaaatatatgtaacataggtgttaaatacagtagctaagaggacacagaatttattttatttttatggaagcttcaccttagaagaacattggcaagagtcatggatttcctggcaatgaagtgggatgttttatgtcttaaatcagatatagaagactatgtccatgagattaaaaatgacttggaagcatgaagtttgagattaaaatataagcagctgccttaaataatgctgccttgacatttgattaagttatacaaaccattaacctattctctttctttcattgcttttctttactcattggttatttttattcacacaccccgatttttggttctttctccctcgttattgtctttgtaattttgcttatttgtggtcaactcctccgtggtgaacacttccaattacttatttaactgactatgcttagttttcagttaatatttcatttatatagatacacatatatgtatatctatgtgtgtacatatgtgtgtgtataaatatacatgtaaaacttttactttgaaatttcattttcctgcatccctccagacctctgttgtgttaaagatgattctaaaaactgatctatagctactatttatttaatattctcatgctaccactaataatctttaatatctatatattgtcattatatatttttatcgatctaaataaatattaaatatgtatttaatgtttctgatgctaccactaataatctttaatatctatacttgtcatcatatatattattacaatgttatttttattacttggttgttttattatacttaatacaaccattaagcatttgagaaatgaattgagtaacttccatttttcctcctttacaaataagagcctcttgtcacaattggctagagtttactctttccaaaactatttaagtaacaagtgactccagatgtcaatttgtattttctttaagtacccaggggagttcatggatgtcctgtattaagcaaattcaagtagcataacttcagcttgtgaacatctagttggtcagaattcagcaatatcattaaatctcccttcccacccccaatttttttaaaggactaactatgcgcaaaggactgtagatataatctttccttatacagatgattaaaactagccatttgcattcaagaaaaactgtaatctgaagaagcaaatggacaaaccattaatgattaaaaaggaacaaggaaaaaggcagaataaaataggtgttagaggagatgtcatcaaaatgttacagggtatcatgaaaggagtgatttttggggaaggagtcttggtgagaagaggcttcttggagaacgttggattggagttgagctttaaagaatgaatgacattttaactgtcactttgtgttgggtatgtttttaattctaatgaggtttcaggttcttcagatatgctaggattgatgttacctcttaaagagctcctagaagtcgttaggtcattctaaatgtatacattgaaatacaatttgggaaatttagctagggatgtaatgtgcttgttgaatgaatatgataaatcttaatgatttgagtgtactggtatagaaaataacatcttagccatttgaaatcacgacattttagagcaggaaaagaccttacaaattatgtaatcaacagtctcctttacaaagaaggcaccaaaaggttcagcaattgaccaaggccactcatttaacttgaccagacttttcctctgtcagaaggcatggttttggaatccgcacctttctgtatccattatggtaatttccattgatgatgtgaaataagataattgaatctccacgattgttcatcagacagggatactttaaaccgtgcaatgaacttgcaggtcgagttaagtttgaaggaacataaaattgaccaaaggcaggaaacattttcagactcggtacttgcataatgaaaatacggaataatccgcacctgaaaaaatgagacactggcaggactttcaagctgatgtcgtttactcacctagggtggagtgggagaggaagacaagaggagaaaggggggagggaggtgatggagagtgggagggggagagagggagggagggacagaggaggaagtggaagagagagagagagaaagaatgagagagagagagagagagggagagcgagcgccgaggcgggcctcgaagccactggagaggtaccctttgtctgacaaaccctgaaagggaagcctctagtagcagccctcccgttcccacctccaagcgtttgccgaactgctaggtggagcccgcgccgcggagcccacgagcactccatatccgggttttgccggccacccctttccctggcgcgagccccctccccggctctcggagctcttgccgctggcccgcccgaccgctgctcattctggcctccgctccggccccggctgcgcctaccccgcgcgcaggctgcacggtccccgcgcgcccgcgctctgacccgctgtctgcgcgtcgcccccctcgcctgctggcccggcaccgctcgctccagttcccaggagcggggatgcagatgctgcagctggtcggggtgggcgccgccgccgccgccgccgccgctgctgctggtttttctcggactgctcgttgcctccgctccggcagctgctgccgccgccaccgccgcctgtgactcgccccctcccctttctttcttctctttttgccttggtcctcttcctacgggtgtgcgcgcgcgcgggttgcacggtttgctttggcaggagctcgctcgtgtgtgcgcgtgtgtgagtgtgcgtgtctggagagcgccagtgcctcgctcgctcttggggagtcgaagaagagaaagaaccgaagagacagcggcggcggcgcagagcccggggccgcgcgatgaagctcccacatgcccgcagctgcccggcccggccggcgagctaatcatccaccccacgggctcggggttcgccggcccccgggacgcagccctcggcggccgggcgcccgctctgtctgcgcgccccctccgtgcaccggggaaggagtttgtgtggctctcgctccggctgtccgcggaggttgcgggcttgagaggggaccctcggctgggagagagcctcgggaggacgaagaggaggacggtttggcggagaagccacccctggccctcgcggctccccctacctattccatcgctcccgctccgaggcggaaaggggaggacgtggaagaagaaaaagaaagagaaggggggtggggtgggagaactggatataaagatcggctggggggatggtggaagatttttggtctcttcggcagcgtcttttcttaagcggcggcggcagcagcagcagcaagagaaggagaagcagccccagctatgactgccgcatgttaatagctgccgctgggtccctcggctgctgctggagacagagcctgactccgaagttgtgcaactgtggactgggagagacatttgaaccctcttttcttttcgctccccttttgcccccttggggtgtgtgaagcgaggaacgtaaaggaaggcgaacatttggctctctttttccttcccctttctccgtggctgtgtagcggaagaaagggaagagagactttttgttgttgtttccttgactggggtctccaccctcctgctgctttctctgcgcttcgattctcgttatttgccgcgtgtggttgggggtgtctgcacaggggccggccggtcttttgccccgggctcaatggctggattgtggaaactgcacccgccttcaggttgttgagcaactgatgggacgatctcagggaccggcgtttacgaaaggtaatttattcttcgcactcttcataataggggtcgccctggccgggcgcaggcggcggcatccaccgggcgggcaacaagagggggtgcggggtgcatgcacactcgcccttccactcacacactcgccctcacacacacacacactcatccggtcgtggtgcggggcgggaagggaacctcctggctggtgggcgctcgggtctggcgcgggttggagttttttccagccattgggcgatttgaccggccgaggggagtgagggggataagagactgggcgcattcgcagctgcacacgctggggaataggaacagttcccaccccgttaattttccctctcctctcaccccagtggcatcccctggtgggggcagaaagcggacaggagggcgacttttctccgtcaggctggaactggtgccgctggaggcgggagcgggctggaggacggacagggtctgggtgagaagctgggctctgggaagatggaaaatgcagggtgccgagcccggcgcgattctccctcaacgcttgcctggagcatccctggccccttttgcccaggtcgcgcccctgagtcttggagtcgcgctgcctccccgcgccctgcctgttgtgtctccttcacggcagtttggtttagacctgcgtgcccaggctttgttaggcggttttggctggagaaagctgccactttcgtgggtggcccgggctgcgctgtgctggtagtgggcactgggcggggggcggcggtgttgcacgaatccgggcggccgcggcgccggggcggggtgggcagagcattggtggtcgcggttggcgggttacaggtaggagagaaggcacctcggcgcttctctgaggagaagggaaggctccaggctgcagcgcagcgtctgagctgccgcgacccagcctccggtcccacgtcggagctcagaagcttagggtgccaggcccccagcactataggtgggtgtgtgtgtgtctgtgcgtgtgtgtgtggtgtgtaggggtgggggcgacctcctctaccagccttacttggcggcggagtcagcgtttgagtgtgtgcgcatttttgcgccccagggacggcagagagatatttgcggggatgccggagctgatgctgctggagctgagcttgcttattgaaatcgcctgggatcctcttaactggaaaatctggtttgaggaggccacgggggcccccgcagggtggcgaggaaaccttgccgtgtccccttcccctggagaggcgcagctcggcgacatgcgtgcggcgcgtgagagtcgctggtgcagcgctcgatgcaccccagaatggccctgatgagaacctcatagggtagtcatctctccagcaggttgaagtaatcgagtccagccagcgtaactcctggtccctggaattctctggccactttcctacctctgatagaaacatgcgctgcttttatttatggccagagatatcatagcagttgggagaactcgaggcttgcgagccacctccagggtgtctcctccctgtgtctgcgtgtgatccctgcctgcggtagttagagcacattgtaaacaacggtgtaagcactcctgccacagtctcctttagagtctaacctgctgtcgtctgttgtgtttactttcctggttgtattactcattaggaagtataaggcttcttgcacctctgattttacatccttccagccagctgctggggaaatgaggagacgcatagactctggcaggaaggaaaaattgccttctgtgttttgctctgaagtaaataggcagtctgctaattttagtgtcatatgggctttcatcactagttaaagaatgtcatcgtagaatctgcaaagaaacacttctttagcactttttcatttggagactttcctatatttccctatgagaataaacagagtttggtaagatttcttttgtatatttttccatctgtaatgattctaaatgatctggacttctggcgcccaatttatctgcatgtggatt

SEQ ID NO: 10051 - DNA, 6000 bp, Homo sapiens
gatggcacgaaggagaaacgccaagccaaagggggaaaagccccctataaaaccatcagatctcatgagaactcactcactatcatgagaataacatggtggtagctgtcctcatgattcaattacctcccaccaagtccctcccaaggacacatggggattacaagaactacaattcaagatgagatttggatggggacacggccaaactatatcaatatttatatagtattttaataatcttaacaaattgttctcttaaacatatgaattttatgcttaccattaacctgatgttaacagctgattttcttttcctctctgtttccctttgattttaagttccagctttttggataagttggttcttaaatgaattttccaattgccttgaaactgaacattaagggtccagggagaccttcactccattaaactagaaggaaatggaaatatactgcccatacaaaaagatgcaatggtccctatagcagacagctgtttagaatgggtcttgtgtccttgctttgcggagttttcaaatacaagacttctaaaagtaaagaaattaggtttcttcccagtcagacttctaactggctctgtgcctcaggcaaatcatttaacttctctatgtctaagattcctcaaacgtaaaaggatgaattataatttgatttctaaaattattttacccctctagatttctctgtttctatggtagaaggcagaggatacagagtgagaaagctcagatgtccttgctttgccatttgagagcttctgcccttaggcaaggccctgaaattctgtgacatcaacacctcatctataaaatggcctaatagaagaaattaatagaatgatctattatgctggatacagtgtctagtacatagaagacgcacaagaatgtttttaaggcacccatctctgaaaaatctaaagggatttctgcctgtggcaggggaggaaatgacctaaaagcagaggagtctatcctgcatctgcaggtaggcatttcgcagtatagtttctatagtattcaccagagaccaggaaaagagagggccagagcctcaagcatagtatgaatgcctccttggtatctttccatagtttagccccccctaaaaaagtcaaagtgagtcaggacagcataaatattaaacttaatgccacacatgactgacaagacatgtcctgttctggtttccatgtcaaactaggcttgattctgttacagctaagcataccagctaggctgtataatgaccatcagaataattgcacaatccaaatcacaccacaccagtaattagaaaaaggaaagaaaaaacaaataaaataactcctgaaatgccaaaaaattggttctctttcagctgtatttccatttaaaatttaaagttttcaaatgttatgaaagtatatttcttactttttttcttcttgggctattgtaagagtctcatttaggtgtctgcatggagtctgggttccatgtggcagttgcagaataaagcacctgccattagaactgatgtgcctttttctagtccttcaaacaagtctcagttgatccatattttcagaactctggagggtttaccaaacagaatattacagttctggttgcattcccacaaaatttagaaagcatcaataaatctttcccaaagccaaacgagatcaaaatatctaaacttaagtgagctgcaaccatacgcattatctcatttaatcttcatgattttagaaattgagtatgcttacaatcccttttcggtggataaagaaactgaggctcagaaataatttgccaaagtaaacatgtttactaggttgaggaaccaggataatgaactcatgtagtctcccagtctacatgcttaaattctacactgcaggactcccaagtatgtagcaacaacagcttataatcaaagtaccaatttctgtatatactgatcctttccacatgaaagctatatacctaggaagagataaatattacagtcctcatgaagatttttctaagtggaagtaagaagcatcagagttatttgtgaaactttcaaatgtctcaccacagattagtgggctggagttgggttcgggtggtgtgtgtgtgtgtgtatatatataatgtatatatacatttaaatatatagtatatataatgtatatatacatttaaatatatagtatatataatgtatatatacatttaaatatatagtatatatatgagattctgagtcaaaattattttcatgatttcccataatgaaaaaaatttgtcccaatccacaatgccattttgcagccatagacagactaatcttaagaatcttaagtgttgtcttggacaggaggtatttagaaaaattataatgagaggataaacatttctttaatttagcctcaccagaatgtgagttaaatcaaatagatgtatatattagaatttaccagctgcaaacatgcaaggaaataaggacaaatttcgattaagtgcttgcacatgaccttatgattctcatatcttgggagagtttgcgacttataaaaactgctttatcttaccaagagtgacatctcaaacaccctgtctccttgctaaatgtaaacatttaaagaggtgatacttgcagcgttcaggatttctctcaaattccctacttttccttaaagtatggagtctcatttaaaatctttaaagtacctcatttaggccaggtgtggtaactcatgcctgtaattccagcactttgggaggcagaggcaggaggatcgcttgagctcagtttgagatcagcctaggcaacatagtgagatcctgtgcctacaaattaaaaaaaaaaacaaaaaactagctggtcatagtggtacatacctgtagttctagcaactcgggaagttaaggttaaggtgggaggattgcttgacccctggaggttgaggttgcagtgagccatgattatgccactgcactccagcttcggcaacagagcaagatcttgtttgaaaaaaaaaaaaaaaaaaggacctcatttaaagtctctaaattttccttctcattttactttctgtccttgcattcttggcacactgataataaactgaatgtggggtctttctaggatcacatcttccagtctttgtaaggatgctgtatctcatttataatagacaactctctcagcagagttcgtagtcttgtgtttccctttctacttactcatgatctcctcttctgtctggaattcctcatcctccacaggtgtgcaaactgttttgtttgtttttgtccttgggtagccgtttatatcatttatatcagtgttacttaaggcttcaaagcctttggctaaaatcttccctgtttgagggagtttcctttgttcctgctcttttttcagctggaaaaactacattaagtaatttctgtgatatatgcttctttcaaaactagtggccctatgcttcccttaacacagaagtatcaaagaccagcatgagcttgaccaatatcctgagcttgcttttgatattttgattatctaggttttagtaactttttctaattcatgtttacctacagaattagtgcccgcttgaagattctacagtatccaaagccttacagtttctcactgtctctatcctcagctctcatcttttttcctcctttgacaccctcgagtcttgaacatgccaagctcattctcaattacaacttttgcacgtgatgctctccctgcctgggaatcgtgagtctcagagctgcagggaaggggttctttaagtcatttcatctcgggtctggaatgcttctccacactactagtcctcacagtattgtctgatttgtgtcaaagcccacttgctagttgagactttctcatttatgtgttcacttattaatgattttattccccaaaatgaaatataagctccatgagagatgtacagtatgctttcatatttattgctggccttagtgcctagaacagagtctagtgcatagtagatactcagaaaatatttgttctgtgaaaattttacttccatttccctattagattatcctgcatctttttacaggtccagacaagttgccgaaacttcaaccttatcattcctgttttttaattcctttctgttgatcctaccttagctaaaataccaatcagtatattttttttcctgtaatatggaaaaaaatttgaaaaagctatcattgcaccattttaatatacattcaggttgcatagtatctgtatatgttgatttcaaagaataatctggatctgagtactaggaaaaacgaaaataaaaagtagcacaacgtttactttttattaaagttacattagccattccactgttttcactggcatgatttttcatgtttaaaatatattttgaaaatatatacatatatagagatataattttgcataagtgcctaaactaaattatatcataatgttgttttttaattcttgatttttaaatttcctttctttttttttttttttttttttgagatggagtctctgtcgcccaggctagagtgcagtggcgcaatctcggctcactgcaagctccgcctcccgggttcgcgccattctcctgcgtcagcctcccgagtagctgggactggcgcctgggttttttgtttttttttgttttttgagacggagtctcgctctgtcgcccaggctggaatgcagtggcgcgatctcggctcactgcaagctccacctcctgggttcacgctattctcctgcctcagcctcctgagtagctgggactacaggcgcccgccaccacgcctggctaatttttttgtatttttagtagggacggcgtttcactgtgttagccagatggtctccatctcccgacctcgtgatccacccacctcggcctcccaaagtgctgggattacaggcgtgagccaccgcgcccggccaatttcctttcttagttgcctctgcccacctcttctcttctgcttccatattacaggtaaccaatcttaattgggttctattatgttagatttttctctactcttatacccattcacatatatacactctcaaatcaatctttttgtcatcatttaaaaaatatatgcatcttgttttctaactcatgatgaccttgtggaaagccctccatgttgattgttatggataaaattcaattctaaatggctgtatataatataccgtgatatggataataagaaacaaattcaaccattcccttcttgataaacattcactttgtttccagaggtttctatcttgttgggttttgtcacaaaacaaggctacaataaaagtagttatttaaaaactactttatctccaggtttaaagagcaaagctatttttcaattttaatgtatgttgccttattgctttctaagtactacaaataattacatttttaccagaagactatgacactgttctttactcatgtccttacagcaataggtgttgtaactgtttatgttattagttgttaaattaatttgaatttcttaactacttgtgaaattaaatatatttttatcttcttcagatgtttggacttcttgtgtaaatcatttattaatattcttgctcattttactgagatattagtctttttctcaatttatacattctttgaatattgtaattattaatgcttatcatagtaggtgttttccatattgtcggctgcctttgttcataactttatcatgcacatttaaaatatttgtatagacaatatatttattattgtatacattttggattccagtgttgattaatatgattttttcttattgctgcattagacatgtagtcttctagattttactgaaggatttttatttttaaaaattttagcatgggtttttaattcaagtggagttttaaaacacatgccataaatagtgagccaactttcacttcttccaaacagctt

SEQ ID NO: 10052 - DNA, 6000 bp, Homo sapiens
gtgaatcacatttattgaatcatgtatgttgaactagccttgcatcccatcagtaaagcctacttgaacatgacatattaactttttggtgtgctgctaaatttggtttcctactattttgttgaggacttttgcatctatgttcatatgttcatcaataatatacgctgtagttttgttttgttttgttttgttttgttttgtttttggttggatctctgcctggttttggtgtcaggataatactagcctcacagaatgagttgggaaggagtcctcaacctcaattttttggaatagttttagcaagattggtataagtttttctttgtacttttagtagaatttggctgtgaatccatctggtgcaggggtttttttggttggtagattctttattaccagttcagtttcagaagttgatgatggtctatttagggtttcaatctcttcctgattcaatcttgggagattgcgtgcttctaggaatttgtccatttcctccagatattctaatttgtgtgcatattattgttcatagtagtctctgaggaccttttgtatttctgtgagatcagttgtaatactgcttttgtcatttctgattgtgtttatttgtatcttctctgttttctttgttaatctagctaggagtttatcaatcttaatttttttttttttttttttttggagaaccaactcttggtttcattaatcttttgtatgaattttggcatctcaatttcattaagctcttctctaattatagctatttcttttcttctgctagttttggggttagtttgttctcttttttctacctcttttaggtgcaaatttagattgctaatttgatatctttctaacttcttgatgaaggcatttagtgttataaactttccttgtagcactgctttggctgcatcccagacattttggtaagttgcattcccattttcattaatctcaaataattttttttatttctgccttaaatttgatgttcacccaggaattattcaggagtaaattaatttccatgtatttttgtagttttgagggatcttgatattgatttccatttttattgcactgtgatccaagaatgtgcttggtacaattttgaattttctgaatgtattgagacttgctttatgaccaagcatgtggttgatcttagaatattttccatgtgcagatgagaataatatatattctgtggtggttgggtggagtgttctgcaaatgtctgttagatccaattgatcaagtgtcaagtttaagtacagtgtttgttagttctctgcctcagtgatctgtctaatgcggtcagtggggtgttaaagtctcccactattattgtgtggtttttctaagtctttttgtatgccaggaaaaacttgttttatcaatttgggtgctttaatgttgggtgtgtacatatttcagttaattaaggcttcttgttggattgtagcctttatcattatgtaatacccttcattgtccttcttaatttttattggcttaaagtctgttttgtctgatacaagggtagtaactcttgctcttttttgttttccatttgcatggtagattttttttccatcctttaaatttgagcctgtgggtgttattacatgtgaaatgggtttcttgaagataacagatcattggatcttgtctttttatccaacttgccactctgtgtcttttaagtggggagtttagcccatttacattctagattaatactggtgagtgattttgatactatcatcatctggttgttatatagacttgattgcgtagttactttatagtgcctgtgagctatgtgcttaaatgtgttttctggggtagcaggtgttattctttcaattccatgtttagcactcccttaaggatgtcttgtaaggctggtctagctgaaaaatattccatcagcatttgcttgtctcagaaggattttatatctccttcacttatgaagcttagtttggtgggatatgaaattcttggttggaatttcttttctttaataatgctgaaacccccaatctcttctggcttgtaaagtttctgctgataggtctgctgctaaactgatggggttccttctgtaagtcctgccccttttccctagctgattttaaggcttttttgttttgttttgttttttgatattgactttgctgaatctgatgattatgtgccttgagaatagtcatctcatatagaatctaactgaggttctttgtattttctggatgttaatttcaacctctctggtgagattagggaactttttgtagactatttcctcaaatatattctctaagttgtttattctgtctcagtaatgccaatgagtcatgggtttggtctctttacataatcccatatttctgaggtttttttcatttttcttaattattttatcctaatttttgtctaaatttattagaagaaccagtcttcaaactctgagattattttctgagattggtctattttgctgttaatatttctgattgtactaaaaaaattcttgcagtgaatttttcagctcaagtttagtttgggtcgttcttaaaatggctgtgctgtctttcagctcttgaattattttattggattgcttggcttccttggattgagtttcaactttttcctggatcttaatgagcttccctgttacccagattctgaattccatgtctgtcatttcagacatttcaaactagttaagaaccattgctggggagatagtggactcctttggtggtaaggggacactctggctttttgaattgccagagttcttgtgctgattctttttcaacttggagggttggcactcctttaactgtggtataagttgagtttagtcagttggttttgtttctggaagttttcagaggactaaggctacatacaaggtctttgttgttgaattcttgtccttagtttcacaggaaggaaaattagcaaaatgttttttggtggtgtagtttttgggctgtcattcaataaatggcacttgagagcaaggagcatagacaggctcttgctaagccatgtggctcctttgtgtatcctcacatttgaagctgtgctctgcagtgggaggggaaagaggtgaccccctcatcagacttgctcctgagcagttaggagccacttccaatcactggcacagtgcctgcaatttttgttgtgttgttaggtgtttccagctgtgttgctcccttagggctatgtccaataggggaatgggccacactcttactggaccagtcctgtgaaaggcggcacacctaggacccataccagactgcaaacccatacaactcgccagtctcaattttctgagagcgtaggcttctccccactcaagtgctgagcacagatcttggcttggcacttccaagatgcaggccacagctccgagtcaccaggacctggtcatggctccctccggaacctcagggttgggttccagatgtgttgtgggatccaaagccctcccagactgctgaaacacactcaggtagaacaaacacccaggatgggcagtggaggctccactgtgtacacactcttatggggcagccaggcagggaccctcagaagggctggtgggcaggtgggcccacaggacaggcatgacctagtcctgtggggaagcaggccctgctttttccccagcagttagctggtggcagagcctctcagagggagactgagagccctggaggatggatgtttatggctgggttcccccagagcagtcttgtgcacaaaggtccccaggtctgtacctgctggagctccatctctatctaatctctgggaagatcccctgccagctcaaatgtccatgggtggcatggggttgcctgcagctaggatctcagaggaccagggtgagagtgagcagtcccctagtccctttactcaccctttccccaggagccatttagggccagaaaccagccccagtgttcaggtaccccatgagagcttcccagcttctccctcttcagcctcatcaactgcatcttatctccatccacattcagcattttgtctccaaagatttgttcaaatgttgttgttttagtcaaaatccccatctttctctgtgagaactgcacttcccagctgcatctagtcagccatcttgagatttctcccaattaatcttttagaaacaaaattatgccctgactgagagtggaacaccaggaatttttcttgtgtttttctctatcctaaaagaaagctttgaagtaactattttctctattctggggaaaacactaaaatttgaacatgggccacttacagatgttttagagaatatgtgtggtcttcaaaaatgcaatttgaatatgtgtttcaactaagctataactctgctgcttgttttcaagattgttttttctaagtggatttagccataatgtgactctatactaaatttcatcttcttgaaatgtgtgcatgtgattagccaagaaatttcttaatagacatatttcagaggctgagtcctctacttgattatttattcaagctggaagaaaaacttcaagaaaacactggactgggtttggctacatttagcatgcatgactcacagattgttctagatagagtaatagaattgttcacatgccaaacactattctagtttctggattcagtgttttagtcttaaacttggtctcaaggggcctactttccattgagagagagaaaataaataagtaaacaaatgaacatgaacagaaaaagaatgtcaaatagctctaaggtctatgaagacaagcagacagataatgtaatggcagaacgatagacggaagtaacaggatatttaaattgaatagaaagggaaggccttttctgaagacaggctattgagctcaggcttaactgtcaagaagccaactctaaaaagctccagtagaacattccaagcaaagggaaccacaagatcataggccctaaagcagaaacaagcttaaactatggaggaatagaaagaagacaatgtgagtagggtgtgaagcaagggagaaagtcgtagggaatcgagactggacagacagaggcaacaaaaaccattgagaaccttgtacgtgttggtaagtgctttgaacttgatttaagatgtaacaagaagtcgtttggggattttaagcaagaggtttcctttatgtattcatacaatctcattataagaatcttccactagaatcatgtcttatgcttgtattttttcacagcttttatgttatgtgtttatttgtgagagtttttataatacatgcttctttttttacataagctccatgagggaaaagacttttgtttaccactgaatatccagaggctaactcagtgtctactaggtacacagtatgtgctcaatacgtaatagttgaatgaataattgaatattaaatgcttatttacaattctttttaaagtcacaggataaggaaataatcccctccttgtaataacaaggaatatctgaccgttgcactgagtgaatcaattccaggcatcatctcaactttctcagcatgactgcatccactaagcccagaaaaaaatgtgtggttacatacttttcaatatttgaagtcagtgtacttgtttataataaaacacagaaaacccaaaagataaaaaattcccaacacaaaaatgaaatacaatagtatcaagagctccacaggcaggattttcatatctattgttttatatgatagaagctctaaaatggtttttgtctgtaacctacagttcagtagatttgatggctaaactgcattagtaaatgagagaactgaaaggactttatgaccattttcttcaagtaattctgtcctggatagaaacattacagtctaaaattttgaaacaataaacttacaatggctttgtccaaagaaagactctttctgcttgaaaggtattcag

SEQ ID NO: 10053 - DNA, 6000 bp, Homo sapiens
aataggggtttctgagttccattcattcaaaacgctgcgagactcaggttatgtattgaagcctgctaacacaggatagactagagaactgatgtgcccaagagcaacgtggaattatatccccagtctctcattttaagccctgaactcatcccgctcccctcatattttcagtcatgtttagtatgctactgctgctgatcattgaggccatccttttccttttgttattttttaaagttttaattatttattttctatttgtttttacatttttatttgctgctttcttaaattagatgtgagtgaacccttcgagtaattctagtgggaattcagttagggtaccttttaggttcacctgatatttgacagaaaaattcttatctagctttaatatgcttttaataattgtatttactactttgtgtaaggtgaagcataattttcttcttcacccttggaggaagtgttttctaatcgctccctctttataagcattgaaactttcatgagttctttacaacattatttaatgactgtaggatgctttagaaaatatgaaataggataaaatgatagataattgtatttttaaaagtgaaattgttttctgtctttcagaaacctttcggggaatttgttttcttcattatctcaaggaacttttgattatcttgcgtcattacggtctttgtaagtaagaatttttttctctctttttttttttgattttcatgtctttttgaaaattaaaaacatttattatgtggtttcagagactttgtgaggacaatcttgtcaaggtagagtctcacttgagagcttgcattcacattgaaaaacatacagtaaccctgaataatgtggtttagactaggacaactgttttctccttaggataccatattactctaatctatatttagagtaagtaaactggtaattgtttctttttgacttttttttcaaatcataaaatgttgccttgtttgactaattaaatttccaaagtataaaataacccttcctatgaagaatttgtaagaatattttatactttaggaatttaattttatcctgtaaacccccccccccacttaaaatcaaacttacagcttattactgatgtttctagggatattcatttagaatgcttactttatgaaatcagtttaagttctgatttacagtttcttgtagctttagaattggttgattttttttcccccagttttgttaactgagagattgcatagaagttattttgaaagtaactattttcagataaaccttaacatatctcagactataaattatcctaagcttattggaattacagttaaatataatgttgttcaggttttcattgtgagtaatttatgggattgagtgtctttcttccagggaaagagtttttctctcctgattcctctcttccctgtactctgacttctcctctcatctctgttcctttcctgcacccgtcatttaaatctcatttaggagtcttccttgggatgtagctaatagctattaggagccccaaccagctcctcaccatcatagcaggcatgtgtgtgtacttctggagtcactttggctcacactccatactccatcttgtttctctttttggcacccttaccattcttatccagaagactacctttgagcagaaacatctccttttggcttatttagtgggctcaggtcaaccatttctgcaaagattaggaaataaaaaagacaaaagctagtctggcttttgagaccctgggtagcaggaacgtgggaagtattttcatcccccaaatgggggaaattgccagtgtttttacctggtagtgttaggaactgaccataaagtggtgcttaggaattaggagtctgtcacgtcctccttctggtattatttaaatttattttctgtgctgtattacatcagatcctttttcttttttccttattcttttttgccaaaactactgaggtgaaccctgagccaacactctagctgtgttagaagcacacacacttaaacattattgcactttgttgatttatttttatagaacatgttgcattctattttagttatgtttacattttgattcttctattatatgatgccctccatgttggcatgaacagggtcctgcattcattgttattagctggacttagcaaatgtgtggcacatgaatagtcagtgcttagtaattatagtatttaagagattttgtgcttatatctcagctttgtttatcctttcttcttcttgcacccaagtgccaaattataaagctttttgcctcatataaagacatttctttactatcttttatatcaaagctgaggtattcttatttgtatgcttttgatttgttgggtctttatctcttacatttgtaaatatctatagtgtcacttggcacatagcaggaggggtcagaaacagtccctaccctagggaagttcacagtctagttagacatacagaatatagccataaaacaatctgtattgctttaggttgctgtttgattgccagaatcagcagagttggtaggcatttaggccaagaatgtggcaatgatggtggaaaattggggatggcttcaagattcaatattaatgccacacactgcatgataaatgggtagaagttcgatagacaaaaaggaatgggatttggtattccagaactctggtgttcagtggcttgttgcatagaagagggatatctgccaaagagtctttgtttgcctacaaaatttcatccaaagcagaaacccgggatcagcaagaacagtgttggggtccaacactctgcaattcagctccttggagagaaactgtagctagttgatgaaatgtactttaggcatggtatgggtgaacagtattgtgcttgccaccagaaatgtaacccaatataaaacaaaagtgctatttaattttattcactataatctctaagttgtatttgcatgttacagggaattccagactgagtatcttttgtgtgactgtaacatactgtggatgcatcgctgggtaaaggagaagaacatcacggtacgggataccaggtgtgtttatcctaagtcactgcaggcccaaccagtcacaggcgtgaagcaggagctgttgacatgcggtaagggagaaatccaaactgagaaagcatttaccatattttgacttgctaccatgtttttcttgacaaattgtaagattctctttatacttggacagaactagtatgcagccagtaatcattatggatttgataatatttagtttatgccaacgattaagccagctagattaaatgaccttttttttttcagttgtctttaaggtagctgtttttaggttcacatcagctttctttatgcaaaccaatttcaaagaatagattttcagattttccatcagttggcaactcgtgaatttgtctgtagtaacacaatctcaggatgcccacatcctgtgtgtgggtgggaatgtgaacgatacagcctttttgaagcaacatgtttcagtgttcttaaaagactgatacaggcagggcgcggtggctcacacctgtaatcccagtggatcacttgaggtcaggagtttgagactagcctggctaacatggtgaaaccctgtctctactaaaaatacaaaaattagctgagcatggtggcaggtgactgtaatttcagctactcgagaggctgaggcaggagaattgcttaaacccaggaggtggaggtttcagtgagccgagatcgtgccattgcactacagcctgggtgacaaaagtgaaactccatctcaaaaaaaaaataactgatacagttagatctagtaattctgtatcttatagttaattcttaggaaatgatcagctttgtatgtaaatcttcagactctgtgtataagcatatcctaaattctcaaaaataggggattggtttaattacttgtgacatatccattcagtgaatgcagctattgaaaatcatgattttgaagaatatctggggaaaggagggaaataacatatttgccacgtgttaaatgaaaaagaaacaaaaacaaaaacaaaaaacaaaaaagcacacctacacacacaaccccataaaacaaaaacagtcctaaagtgatggggggaggtcccagtttagtctttgtttggaaataagctatcatatttttttccttttctctttattattattgttgtatcacaagtaaaatatgctcactgaatgaaaattaagatttgtgcaaataaataaaagaagcagagaaacaaagaccatgtttatgttcatgactgaaaatagctagtgttaagacctttttgtatcatcttctacgacttttttctattttttaaccaaaatatcgttacactctaatgatattttataaccttttttaagttgaattaatgtaaatgtattttctcatttaaaatagatgcatatcaattcattgtatagatgaagccatagtttaacaacttctctattacagcatatttagctcgttaataatttcttgcttcataaataatggaaggactaatttctttgtatgcatttttgcatattttctattattctttaggatacagtactactaaaagtagaattgtcatgttagaaaaatggactacatatttagaagtcttttaatgaactagtgtcatttgtgtacatttttgtacatatatttaaaatattttatttttctgactgaaaggaaaaaactgattaaaaactgtttacggtatatgggatcttaacatactgtttttttctgttttctttaaatgttctgatttttctggagtgaacatgcattagttttacagccaaaaactcgtgttgtaatcaaaggtattgcagtctccaaagtgtattttaaagttgtaaatatcaacatttacttatcactgatgccattttctagagcacagcttgttcttttagttcatttctgtaatcatctgatactcttaggatgccactgaagaggaataactctaaatgtcagaactggttatgaaattgtttctttttaattttgttttaatctgttatcactaaactcagtagcagcctggttgatactagcagtagcatgctgattattgaggaatatttgttgttctgtttttattattttacctagaatttctgtaacttttaattatggtgtttggaaattatatttgtttactgaatctttgtttgattgtctctagaccctccgcttgaattgccgtctttctacatgactccatctcatcgccaagttgtgtttgaaggagacagccttcctttccagtgcatggcttcatatattgatcaggacatgcaagtgttgtggtatcaggatgggagaatagttgaaaccgatgaatcgcaaggtatttttgttgaaaagaacatgattcacaactgctccttgattgcaaggtaaactttttttttttttttgaatgaagaattgtgcctgtgtattttatttatccttttggaggtgtaatgtttagtggaatttgaattaatatttcatcttcttgtatttaaaaatgcaaacatctggcatttccttttcctggttcttattcatcttctaaaattaaatagccatcttttcatccagtttttaaagaaaagacttaatttcaaagaaactttagaaattgaagacttttttaaagtttttggaggaaaaatgtaaacttttagtgctaaacctaatttccaactatttcctgctgctaagcttacattttctcttttagtaatcacctgatattgactctagtcaaaatattgactgatacaatattttaaggtacttatcttctccacctactagtataaaagaatataacatctgaactatcaacctcataattggtgtgaataccaaaataattaaaagtaaaaatactttataaagtataatagactaagaatatat

SEQ ID NO: 10054 - DNA, 6000 bp, Homo sapiens
ggagcactgacaggacccttcgttcgcctcactcagcggaggccagttcaccccgtcccacagccggctcagggaccctgacagtgagcagagtaaggacggcctctggaggcccaggcttggagccgctccttctgcccacccaggtctgggctggggctgactccacctcttcatgggaggagccacagagccgcattatgaggggcacagatacagggaaggggatggttgggaaccacttgtgcagccagcctaccactgtacaaactagtttcctgaaataatgctcagggaaaagagacctcagactaccggaaggcagtgccgacgaagtcacagtccaggcgacgtttccattggaacgatgtgcatggggagctgtgtatagagaggacagggtgctggaacccagagccctgggagggagtggtcctcacagggcagcttcagtgggccccgcaggacagccctgcttctgggtggagaagcccagatgtgccttctgagcacgatggcccttgaggcccagagctgagagaatgatgaccgctctctcgtgttaattcacaaaacccagcacctcaggcagtgtggactgagcctgagatgtgtgcacctggggagctgcaggtgggaccgtggcagggcgccagcctccccagcacgtgcggcctgggccagctgggctgctctgggaggtgccccgcacccctgtgacgctggttccctcacggctgcttgtctcgctgctccccagtcggaggcctgcaggactttggcacccgagaaggacaaggccaccaagcactgctgcattcatctcccggatgggacatcctgcgtggtggctgtcaaggcgggcttctccatcaaagacatcctgtccggactctgtgagcggcatggcatcaacggggcggccgcggacctcttcctggtgggcggggacaaggtactgggcccgcctgaccctcgtgctgccctcaggccatgacctccccgctccctggcccccagctttgtcagagtcctcaggctgccccctcctgcgctcctcatttcaacagcgcctggggcggaggccggattatctgaactgagctatctgctgggagcactttgcacgtgggtgctgggttggtgtggaaagggtgatcgctttctttggatggctgtttttgaagctgctcttctgctctgcacagctgtgtgcctggggcacgtgggtctgcgtttggggggctgcctgctgtgcccacgttgattctggtctctctgttcctcagcctctggtgctgcaccaagacagtagcatcttggagtcaagggacctgcgcctagaaaagcgcaccttgtttcggtaagaggaagatcgctgtcattcacctgaggctcccagagccaaccccgtgtgcccaccacctgctggtctctgcgcttagcgggcggcctgtggatgctccatgctgggctacgatggggtgtcggggcggggggagggtggaggcccacacgaggcagcccccctacaagcccgggggtgagaggcgccctctcctccctgtcccgtgaacagggactgccctggcctggtgagcccagccccctaagatgccgagagggaggggcaggagtgctctctgtagggtggatgccccacaggtagccaggctgctgtgcaggacactgctatccctggaggaggagaccatagcccttgcttggcctgacttttcccacgtggaggaaggcacgttctgatcagctggggctgaactggggggcacaccgaggccttgagggcggcctggggctgtgctgtagttctgctcgtgagactgatctcctaatgagggctgacatgagttggtagtgaattttttcatcccccaccaggctggatcttgttccgattaaccggtcagtgggactcaaggccaagcccaccaagcccgtcacggaggtgctgcggcccgtggtggccagatacggcctggacctcagtggcctgctggtgaggctggtgagtgttgcacggggcccgggcgtcgtcaccgcaggcactgtctgttccctttggcagcctctgtgttgttcactgaagagggcacaccaagaagcggtgtcttcccctgatctggttgtcccccttggaggagaggagacagcctctgccatccccagttctcgttctgtgcagtgggagccatcatggtttatttgtaccttggtcattccaaaaagaattgatatttgagaggtggttttgctccagggaggccaaaatgagaaacaaagcaaccaaccctggactatcctccgctgttggccaatgtgatcagataagagagtgcggatggccctgcccccactgcacctgctgggcccgggcattgtgctcatgcccccagtgcacggtcacatggagatgtcctgattctcacctgcactttgtagatggaagaactcagctggcatttccaggctgcgccattatgatgtgaatggggttaagaaagaaaacaccgcgtggggtggtgaccgcaggtgctgggcaggccacgcgagatggcgagagctgggccccgctgagggtgctctggagcgtgggggttccgggcacagtgtctgcctagtcttctttccttgaaaactttattggagcaatgatttcaagtattttcaggattttagttttccctgaaactacactcaaaattattcaagagctttgaagtgaacaagaagaacctattaaattatttacagacaccacctccgagggtaacctgaagcctcttccccgcgctgcaggctccatcctggagtccagaaatctgcaggtgggagacagacctggcctggctcccaggtgtgcccctctggccgactctggggagacgctgcgcaattgtttagcccctgtgtgtcacagtttccctgactgtaaaatggggttggtcgtggcagcgtgctcgtggcatggttggggggcaccagggtggaagggctggctgcggtcaggctcgttccctgtgagctgcggccctcggctgccgaggctgtgggggctatggaggattcgtgtggaatgggttgtttgggatgtggcttttccttggacgctgtctcctgacctctccagtgaattctgtggccccctgtgtccacgaatgtggtggagaaggcgggacctggggcagttcctctgcttcccccgcagggcccaccacgcctgcccagcggaccagccccttcaggagcttagagcctctcccgcctggcattggacagctgtcattcccctgactgacagatcgtgaatgccaaacatgttcagatgtcttttcttaacagtgactatggcaggtgaagagtcagattctctgccagaggagagctctgatgcagagacaagaactccagcccggtggctagtggcgcttcatttcagcctcaaacctggtcctaaagttgtctgtctttgcttccttgtttacaaaggggaacatctgctctcagtattcccctcatagcagtttcgagggtcagtatttccctcatagcagcgtccgagggtcagtgttccccttgtagcagcgaccaagggttgccacctcctgcgtgattccatcgagcttaggatggtcgtgtagtcgggacccatgtcaggagcatggctcagccccagcttgtgtgcctcagtcaggcaggcctcacctcggggccatctcctgcgtgactccatcaagcctaggacagtcatgcagtcgggtgggatcacacacatctgttccctgaagttccagtctgggtaaattattcagtgctgatctctgccctagagtggagagaaggagcccctggaccttggcgcccctatatcgagtctggacggacagcgggttgtcttggaggagaaggatccttccagaggaaagggtgagtagggctggtgcagcggatggggagagggtgagtgggtccagtgcaggggagggggctatggagccggtgcaggggagggggtgagtggggccagtgcaggggaggggcaggtggggcttgcgcaggagagggggtgggcggggcctgcacagagtagagggtaagtggggccagcgcaggggagggggctgtggcgttggcataggggagagggtgagcggggccagtgcaggggagggggctgtggcgttggcataggggagagggcgagcggggccagtgcaggggagggggctgtggcgttggcataggggagagggtgagcggggccagtgcaggggagggggctgtggagttggcacaggggagagggcgagtggggccagcgcaggggagggggctgtggggcctgcacagggtagggggcaggggttggcataggggagagggtgagcggggccagtgcaggggagggggctgtggagttggcacaggggagagggcgagcggggccagtgcaggggagggggctgtggggttggcataggggagagggcgagtggggccagtgcaggggagggggctgtggggttggcataggggagagggcgagtggggccagtgcaggggagggggctgtggggttggcataggggagagggcgagtggggccagtgcaggggagggggctgtggggttggcataggggagagggcgagcggggccagtgcaggggagggggtgagtggggcttgtgcaggagagagggcaggcggggctggcccaggggagggggaggctttggagttagtacacaaaagagaattggtctgggccccctggtccctccttggtgccctgatctggcgcccttccctccaggcacaaaacaggaagccagggcagtaggcgcctgtgctctgcccggcaaaatggaggctgcaggctcggtcatttgggctggttctgcagttccttgcgtgcagggaatcgggcggtcgacagagctctttccaacgtgttgccttggtcatgacagtcctgccctggggaagctgggtccggccagcagccttcggagatgggctcgtcgcccggcccccacctcatcctgacgcgcaggagccggccctccttagagcccttgttgagaaccgtgcgtgaggaaggttactcagacccaggagggtgggtcctgtttgtagctgtccccagggacaggcagaggcgtggccttggggcctgcaggtgcaggtgccgtagggaggtgtgtcttggaaagagctttctggaaacccacctgcagatgttctaggtagagagctcactttgtgaggagccacttcaggtgacattgggctgcccctctgcctttcaggttgttggccctgatgatgtcacgcagggagcacgtggctcacttgtccccacccagggagacctgggccatgggtcccagtcagaagcaagcgctgaggccattagtcctggagctccaactcttgctcccctccccaactcctcacagagcagagacccttccccgagcccaccctttgctctagggaaagccttacgctgggccctgacacccacccaggcaggtggggcaggcacagcatgtgtaacccagcagggcggccagcagctttgccccggctgaccctctgtgcccagggcctgctgggcctcggggcttgtttgtgtacaggcaagtcctgtggtggagcttggcgctcagcgtttttgtagggctgtatgtggggcaggagcgcgactcctccagtcacatttgggccacagaaatgggcttgaggccgttagtgccagcagaggccagcctgtggccctggcatggggcaaaggctgtatttgaaaatatgtcatggactggcacagtggctcatgcctgtaatcccagcacttttggaggccaaggtgggtggatcacctgaggtcaggagttcgaaaccagcctggccagcatggtgaaacctcgtttctactaaaaatacaaaaattagctgggtgtggtggcacatgcctgta

SEQ ID NO: 10055 - DNA, 6000 bp, Homo sapiens
ctgagatgtatatcattatacaaaatccttgtccatatctctgcttttttctgtagatgagatatctatacatagaaacactggatttagtggcatatatattctataaagcagttgtttcatattgtcagcttcctttctagagcaattgtgtcactatatattactagcatggaggcatgcctgtctcaacacactttcgttagagtttagtaatagagcactgttgctatttcagttaattttatggtaaaaacatgaaacatgatagatctcctaaatggatctatttttatgtattagatttctataggcagaacatatttccttgcatttattggccatttgtatttattctgtgaacagatggttttaaggtcttttctaaacttccattctgtggggatcttagtatatttcttattgatttgaaagggtctttggtctaaaaattttaattagtcatttaaatgttttaattctctttatcttatttgattagataatcacttttttttttcatttttagagcccttttccctttggtaaaaattattttttttcaattttaacggtgctgaagcctacagtgccatctttctaaaaaaccactctagtttgcacagagttacatcatatgatagtatctgtgctcaaacatcatctgtatgatgtcttctccttgagaagaaggtgttaaatatatgtaacataggtgttaaatacagtagctaagaggacacagaatttattttatttttatggaagcttcaccttagaagaacattggcaagagtcatggatttcctggcaatgaagtgggatgttttatgtcttaaatcagatatagaagactatgtccatgagattaaaaatgacttggaagcatgaagtttgagattaaaatataagcagctgccttaaataatgctgccttgacatttgattaagttatacaaaccattaacctattctctttctttcattgcttttctttactcattggttatttttattcacacaccccgatttttggttctttctccctcgttattgtctttgtaattttgcttatttgtggtcaactcctccgtggtgaacacttccaattacttatttaactgactatgcttagttttcagttaatatttcatttatatagatacacatatatgtatatctatgtgtgtacatatgtgtgtgtataaatatacatgtaaaacttttactttgaaatttcattttcctgcatccctccagacctctgttgtgttaaagatgattctaaaaactgatctatagctactatttatttaatattctcatgctaccactaataatctttaatatctatatattgtcattatatatttttatcgatctaaataaatattaaatatgtatttaatgtttctgatgctaccactaataatctttaatatctatacttgtcatcatatatattattacaatgttatttttattacttggttgttttattatacttaatacaaccattaagcatttgagaaatgaattgagtaacttccatttttcctcctttacaaataagagcctcttgtcacaattggctagagtttactctttccaaaactatttaagtaacaagtgactccagatgtcaatttgtattttctttaagtacccaggggagttcatggatgtcctgtattaagcaaattcaagtagcataacttcagcttgtgaacatctagttggtcagaattcagcaatatcattaaatctcccttcccacccccaatttttttaaaggactaactatgcgcaaaggactgtagatataatctttccttatacagatgattaaaactagccatttgcattcaagaaaaactgtaatctgaagaagcaaatggacaaaccattaatgattaaaaaggaacaaggaaaaaggcagaataaaataggtgttagaggagatgtcatcaaaatgttacagggtatcatgaaaggagtgatttttggggaaggagtcttggtgagaagaggcttcttggagaacgttggattggagttgagctttaaagaatgaatgacattttaactgtcactttgtgttgggtatgtttttaattctaatgaggtttcaggttcttcagatatgctaggattgatgttacctcttaaagagctcctagaagtcgttaggtcattctaaatgtatacattgaaatacaatttgggaaatttagctagggatgtaatgtgcttgttgaatgaatatgataaatcttaatgatttgagtgtactggtatagaaaataacatcttagccatttgaaatcacgacattttagagcaggaaaagaccttacaaattatgtaatcaacagtctcctttacaaagaaggcaccaaaaggttcagcaattgaccaaggccactcatttaacttgaccagacttttcctctgtcagaaggcatggttttggaatccgcacctttctgtatccattatggtaatttccattgatgatgtgaaataagataattgaatctccacgattgttcatcagacagggatactttaaaccgtgcaatgaacttgcaggtcgagttaagtttgaaggaacataaaattgaccaaaggcaggaaacattttcagactcggtacttgcataatgaaaatacggaataatccgcacctgaaaaaatgagacactggcaggactttcaagctgatgtcgtttactcacctagggtggagtgggagaggaagacaagaggagaaaggggggagggaggtgatggagagtgggagggggagagagggagggagggacagaggaggaagtggaagagagagagagagaaagaatgagagagagagagagagagggagagcgagcgccgaggcgggcctcgaagccactggagaggtaccctttgtctgacaaaccctgaaagggaagcctctagtagcagccctcccgttcccacctccaagcgtttgccgaactgctaggtggagcccgcgccgcggagcccacgagcactccatatccgggttttgccggccacccctttccctggcgcgagccccctccccggctctcggagctcttgccgctggcccgcccgaccgctgctcattctggcctccgctccggccccggctgcgcctaccccgcgcgcaggctgcacggtccccgcgcgcccgcgctctgacccgctgtctgcgcgtcgcccccctcgcctgctggcccggcaccgctcgctccagttcccaggagcggggatgcagatgctgcagctggtcggggtgggcgccgccgccgccgccgccgccgctgctgctggtttttctcggactgctcgttgcctccgctccggcagctgctgccgccgccaccgccgcctgtgactcgccccctcccctttctttcttctctttttgccttggtcctcttcctacgggtgtgcgcgcgcgcgggttgcacggtttgctttggcaggagctcgctcgtgtgtgcgcgtgtgtgagtgtgcgtgtctggagagcgccagtgcctcgctcgctcttggggagtcgaagaagagaaagaaccgaagagacagcggcggcggcgcagagcccggggccgcgcgatgaagctcccacatgcccgcagctgcccggcccggccggcgagctaatcatccaccccacgggctcggggttcgccggcccccgggacgcagccctcggcggccgggcgcccgctctgtctgcgcgccccctccgtgcaccggggaaggagtttgtgtggctctcgctccggctgtccgcggaggttgcgggcttgagaggggaccctcggctgggagagagcctcgggaggacgaagaggaggacggtttggcggagaagccacccctggccctcgcggctccccctacctattccatcgctcccgctccgaggcggaaaggggaggacgtggaagaagaaaaagaaagagaaggggggtggggtgggagaactggatataaagatcggctggggggatggtggaagatttttggtctcttcggcagcgtcttttcttaagcggcggcggcagcagcagcagcaagagaaggagaagcagccccagctatgactgccgcatgttaatagctgccgctgggtccctcggctgctgctggagacagagcctgactccgaagttgtgcaactgtggactgggagagacatttgaaccctcttttcttttcgctccccttttgcccccttggggtgtgtgaagcgaggaacgtaaaggaaggcgaacatttggctctctttttccttcccctttctccgtggctgtgtagcggaagaaagggaagagagactttttgttgttgtttccttgactggggtctccaccctcctgctgctttctctgcgcttcgattctcgttatttgccgcgtgtggttgggggtgtctgcacaggggccggccggtcttttgccccgggctcaatggctggattgtggaaactgcacccgccttcaggttgttgagcaactgatgggacgatctcagggaccggcgtttacgaaaggtaatttattcttcgcactcttcataataggggtcgccctggccgggcgcaggcggcggcatccaccgggcgggcaacaagagggggtgcggggtgcatgcacactcgcccttccactcacacactcgccctcacacacacacacactcatccggtcgtggtgcggggcgggaagggaacctcctggctggtgggcgctcgggtctggcgcgggttggagttttttccagccattgggcgatttgaccggccgaggggagtgagggggataagagactgggcgcattcgcagctgcacacgctggggaataggaacagttcccaccccgttaattttccctctcctctcaccccagtggcatcccctggtgggggcagaaagcggacaggagggcgacttttctccgtcaggctggaactggtgccgctggaggcgggagcgggctggaggacggacagggtctgggtgagaagctgggctctgggaagatggaaaatgcagggtgccgagcccggcgcgattctccctcaacgcttgcctggagcatccctggccccttttgcccaggtcgcgcccctgagtcttggagtcgcgctgcctccccgcgccctgcctgttgtgtctccttcacggcagtttggtttagacctgcgtgcccaggctttgttaggcggttttggctggagaaagctgccactttcgtgggtggcccgggctgcgctgtgctggtagtgggcactgggcggggggcggcggtgttgcacgaatccgggcggccgcggcgccggggcggggtgggcagagcattggtggtcgcggttggcgggttacaggtaggagagaaggcacctcggcgcttctctgaggagaagggaaggctccaggctgcagcgcagcgtctgagctgccgcgacccagcctccggtcccacgtcggagctcagaagcttagggtgccaggcccccagcactataggtgggtgtgtgtgtgtctgtgcgtgtgtgtgtggtgtgtaggggtgggggcgacctcctctaccagccttacttggcggcggagtcagcgtttgagtgtgtgcgcatttttgcgccccagggacggcagagagatatttgcggggatgccggagctgatgctgctggagctgagcttgcttattgaaatcgcctgggatcctcttaactggaaaatctggtttgaggaggccacgggggcccccgcagggtggcgaggaaaccttgccgtgtccccttcccctggagaggcgcagctcggcgacatgcgtgcggcgcgtgagagtcgctggtgcagcgctcgatgcaccccagaatggccctgatgagaacctcatagggtagtcatctctccagcaggttgaagtaatcgagtccagccagcgtaactcctggtccctggaattctctgg

SEQ ID NO: 10056 - DNA, 6000 bp, Homo sapiens
ggtctgagtgacagtttgttgtgatttctgttcttttacatttgctgaggagtgctttacttccaactatgtggtcagttttggagtaagtgtgatgtggtgctgagaagaatgtatatgctgttgatttggggtggagagttcggtaggcatctattaggtccacttgttgcgagctgagttcaagtcctggatatcattgttaacattctgtctcattgatctgtctaatattgacagtggggtgttaaagtctcccattattattgtgtgggagtctaagtctatttgtaggtctctaaggacttgctttatgaatctgggtgctcctgtattgggtgcatatatatttaggatcgttatttcttattgttgaattgatccctttaccattatgcaatggccttctttgtctcttttgatctttgtcagtttaacgtctgttttatcagagactagggttgcaacccctgcctttttttgctttccatttacttggtagatcttcctccatccctttcttttgattctatatgtgtctctgcatgtgagatgggtctcctgaatacggcacagtgatgggtcttgactctatccaatttgccagtctgtgtcttttaattggggcatttatcgcatttacatttaaggttaatagcgttatatttgaatttgatcctgtcattggcgagagtgtcccgattttccaggtacagtctgtcatggcttcccttggctaggaaagggaaattccccaaccccttttgcttcccagctaaggtgatgccccgtcctgctttggctcaccctccgtgggctgcacccactgtccaaccagtcccagtgagatgaaccaggtacctcaggtggaaatgcagaaataacccatcttctgcatctatcatgctgggagctgcagaccacagctgttcctatccggccattttggaacggaacctgagaatatctacctctttaaaagcaacatacctactaaagtttcagtaataagaaaatgaaactattgaattttccatactttaaaaataaataattggagatggtaaaatttccctatttttcacactacaatatagacgtttctaacagcagaaatgcaaatgagctaaaatctgaaattttatctagattttaagattgaaaatcattcatccattcattcattcacacatgttgttgagcatttatgatgtgccagatactgggctgggttggtaacatctaaaacaaattagaagtgctgcctcaggaaggctacaatctggcggagcaggcaaagtcattaacaaatatttacaaataatgctttctaataggtgaccagtgtttgacagctatgcaaaagagataataatcaattctacctattaggacagggagtagtggattcacaaaagaagtgagaccttctgattcctggagaagtcagaaatttacccttagaagaaactgggaaaagggcatcccttaagacaagtatatacttatggcattgaaataggaggcacttgttcagagaaatgtagagaggtagttcagctggaacaaggcaggtgaagtggtacatttgtccacaaagagagagatttattacgagaaattgactcataattatgaaaactgagaaatctcagaatatgctgcctgtaaattggagacctcagaaagccagtgatattattcagtccaagtcccaaagcctgagaactagggatagccaattgtgcaattggccatttgtgtaaattgcatcctgtgggcaggagaatatgatatgagatgtcctagctcaagcaatgagtcagggaaaaaagggggcaaattcctccttcctctacttcttgttctattcaggccctcagatgactggatgatgcctacccacactgggagggcaatccactttaccgaatccactgactaagatgctaatcttatccagaaacacttttataggcgcatccagaaataagattcaatctcagcaccccttggcccagtcaagtcgatagattaaattagccatcacacttttgtagcagagactgtcagtgctctgccagatctcttaaactttcagtgggttctgtcttacatccaactgccagtatcttcatctctgtatctcaaatccaaattgtgcaaagtcttagttcctaagcagaacagacaagaaatgtcagataattaatacccctagaagtagccctcaactaaaatctcatgagagttgatgtactcaccattctctccccttgggttgaataattctgcaacaaatggtttgattcacatccctcgttacctaccttcccattaatgaatgacttctctatactttcagttatctattgatatataatgaaccacccccaaatcaaaccacttagtgagttaaaatgacagcaatatttattatgtcatgaatctgtgatatgtacagatttagaaagtacagcttgtctctgttctacttgatgtcaggtggagcagcttcaaggttagggctgaaccttctttcactctcctgttggtacctagtccagggagaacttgaatatgtgggggcctaagagagctttgtctctattggtctctccaaatgggctctccagcaaggctacttgaaggtacctggacttcttatatgtcagttcagggctctgacggtttgtgtcccagaagagagtaccagcaaaaatcatgatgtggtatcatttttgttgcattctattcatgagactgagtcatcaatccttagccaaggaaaaaggaatagaatttggaagcaatgtcaaagaacttggaaatgttttaaaactgccacatctttatttcttgcacttgcactcaaatgctttttttttcagggctagcttttgcaggaagccaaactaaaaaaattcccaagctgatttctcctgactgaatcctttgcctgaattttacagttacgttccaaagcacctactgtacaacttcaactgcacattcaacaaaaggcaccttaaattaaacatgcccagagctgaactcattattccaagccccacaccatacacaaacaaaataaaaggcagctgtttttttcatgctccccaaatcagtgaaaggcaggaccactcactcaattcaaacaaaaaacctgagctttatccttgaatcttctttctgtcaactttgctggcactctccaaattctattatttctgagtgctaactagttctgaaccaggccactgccctttgccacttggaatactgagattgttttctaactggccttcgggctcaggaagccaacctccaatttattttcttctcatagcagcccaaataagcttcttaaattgtaaaaatgatcctgccttttacaatgtaaatccttcaatgaatccccattgctctttaaatgaagtccaaactttttagcagaattttagtaattattatacagtttttaatatttttatatttccattgactttctcagcagggactattctctatcttattcatctttgccttcctgaatatatacacacaaacacatatatatgtatgtttacaaatatataagtatatatactcatatatgtacatttattaaacaaatatgtaagtacatatattgttataaatataaatatataaatacatatatttgttataaatacaaatatataaatacatatatgtacagataagcatatgtacttttatatttgttcattattacttttattgttaatagtgtctgctatactccatttattcaaattttgagttaaaatttatctcctatataaatatatgtacttatatatttgtttaataagtaaattgaacaataatatccaaaaccctattagtaggtattcaaaaagagcaaaatacatacgtttgtgtctatgaaattacccataatttcacggcaggtgaatgggagaattcttggattagaagactggaagaacgcttgaagttgaagagagaagatcttacacatgaaggagttataaagaatgacaacagagcagtcaaagcccaggctaactagtcattctatgaagataagttagataagttaatttggagttgctgctcagccacttaaagctctacattttcttatctacagatctggaatgtaacaattttcataacatttcagttttatggagtcataaaaatcaaagaagattaaataggtaatagttactttgaaaaaatataaaatgttacacagttgcataatagtgtgattatcttttgattaacataatgaaattcaataataataacaagatccacaatatcaaaatcatagtaaaatgaatcaggcttactctacatactgatgctgaatttttgtactcaccagaggacatagaatgttaggaaggctcataatcagaactcataatgaatactctcagatttttacagctgtaaagcaaatcagcaaaacatttagtggcttcaaacaatattggtttattacatctcatgattttgtgggttaattgggcacctctttgttcatcctcctgctccatgtgttataactggaatcactcatgttgcagcattaatctgggagctaaactggggctggaacatccaaaatggctaagctcttatctcccggaatctttctctacatgcctttcatctaattcaagcttcttggaaattgaagtctggattttaagaggaagcattccagaaggacctgccccacatgcaagtgtataaaaagcttctgcttgcatcatgtttgctaatatcctattggtcaaagcaagttacacagataatgcgtaggggaccacacaagagcctgagggataaaaggttgattgattgctacagatcagcagtctaccacagcctaagagctacccatctaaagaggacgatgtagaggttgagtttgagctctgaagccaaactacttgtgttaaaatcctgtgtaattattggtaagatttttacatttccaagtctgttttgctatcttttaagcaaggaggcttaaagagacggtccatgcaaattaatggaacagagtctgaaacggttttaggcattcatgttcattattactttttattattaatagtgtctgctatactccatttgttcaaattttgaattaaaatttatctcatatcaattacagaaaatgacaatgcatgcctttctactacaaatggtaactttctatatttttgaggagactgtagggtgagaggcctgtaactacataaataaatttggtgtatgacttggtcagaagtgatgaagcagtgcctcatttatatttgtgtttaattgcaggttccagtgtgtggtctacccttttaaaccaaagctcactatcaagacagcgtttgtcattattatgatcatctgggtcctagccatcaccattatgtctccatctgcagtaatgttacatgtgcaagaagaaaaatattaccgagtgagactcaactcccagaataaaaccagtccagtctactggtgccgggaagactggccaaatcaggaaatgaggaagatctacaccactgtgctgtttgccaacatctacctggctcccctctccctcattgtcatcatgtatggaaggattggaatttcactcttcagggctgcagttcctcacacaggcaggaagaaccaggagcagtggcacgtggtgtccaggaagaagcagaagatcattaagatgctcctgattgtggccctgctttttattctctcatggctgcccctgtggactctaatgatgctctcagactacgctgacctttctccaaatgaactgcagatcatcaacatctacatctacccttttgcacactggctggcattcggcaacagcagtgtcaatcccatcatttatggtttcttcaacgagaatttccgccgtggtttccaagaagctttccagctccagctctgccaaaa

SEQ ID NO: 10057 - DNA, 6000 bp, Homo sapiens
ccggccagatccactgcctgttcttgtaaatagagtctccctgggctgcagttccgtctgctgttttcatgctacagcggcagagtggggtcgagtgcgtggtgtcgcctgcacagcgggcagtgcctactcttggccctttacagggagtctggagggaggagggagacaggtgagaggagggagggaggacaggtcttgagggagggaggagggagggaggtggcaggagcttttgcgtctgtccccagtgagttgccttgattccatcttgaggcctgtactgtgatcttgcccatccagagctgtaaatcccagcaaaaaccgacggagccctgagtccgacctaagccttagtgtgagtcggacacggccttcttggctgttgggttgataatgttggcttcttcctggcctcccactcacctctgggacgacgtgccgcacgtcacattgtgtaggaatgagatcctcacaggcctttcagaataagctccttttaccctgtctcttaggtttgcgactttgctattttcagaatttaacttagaaatctttgcttgtcttggtctttcacacaccagtctgctttttaaacccattatatgggaaattttctgaactgtccttaagatcctgtgaactccggacatgtaataggattcttcagtgcttcagggccttctcattgagtgaatgtttgttgaacacctactatgtgcccgacattattttggctctggggaggcagtggggaacatgctcagtgttgacccctccctgccttgtggagctggtcctggatgggctgcatggggcaccgttgcgtggggcgtgctcgaggtggagacggctgtgagcagctgcaggccaggcagtggtgggacctcatctggggggtgctggcctgggcagcaccatgacccacccgagaagggcaatggggaaggaaggcaggcaggcaggacagccagactgttaggggttaggggttaggcacagggctggggcgggtgctgggcagactgcaaagggtcagactggcatatggcggccagctgtctagttggttatgcggggtcaggggtggagggcaggaggatgggagagcccagctgggggagatttgagggccctgcccatagaggagccacacctgggcctttggcttggcgaccagaggcctccagggttaagagcagggagagaatcagggcctgtgctcatatctgtgagctctgcagatgtctcccgggcacagtcagcagaggcgctcctccagttcccgcctctctgcctcgcacgccctcctagctgagagtgaggtggtccggccccgtgaaggaggcagcagggcttgcggccgggatccaccagggccgtcccggttcctgggtgttccgcgcccgtctcctttctgctgttgagaaaccttcaggagagagtgcttctgttccctccaggtcgagctgtgcgccaggcatggccggaaagctcaggaggccctggttaggctggggcatcacgggatgtgtcctctagcagagactggtgtgggtgggcgcaggaactggtgagagaggcctgggagacaggtgagtctgtaaggaggcccagagtcaaggaggagctctttggcaggtcctggagaccctgggtcacccacaggcccctttgccttcactggaactttccagttagccaggcctctcctggccccaggacatagcccacgtgggtcctcacctctgcccggctcagctcctccccgcccagaatgccctctgccccgccacccccatcatccctgctgccctggctggacccagagctcccatctgcgaactcctccaatctagccctgcccccctgctcaccctgggtttccagctcaggacagacccctggggaggtgaggggctccctctgggtactcaggaagcatgtcctgttgtccagctgggcggtgatatgcaggcctgagtccccgctgcaccacagctgcctccaggctcacatgcccacttgccgagctcaccacacgggggcttcgccttctctgggatccgcggtgggcctgcgttggagggctgagaacggctcgccctttccgagctagcactctgcccactttctcttcacgccccgtcctggtgaggcggtgcctgtgcagcgcatgatcgggtgctcccgccttgcggtgctttcttcctgtgcccagactggccatgcatgtgttggtgaagggctgtgctgggcttcccgggcccggggtctgaacccgactcccaccaggcactgagtaaacacatccatccaaacaagggaggtggagcacgaagcaggggcaatgggctggggcccagaatcttctggggatgtggctgtcagcagctcctggacctctgaccatgtggcagggggctcatccccgtctccccagggcacttgctgctggggccctcaggcggtcacaggagttctcccaggcgtgttctggccctgccccatccctttcctcacccatctgcagaggggagttactggctaggcaggggaggtcagcagctgcagaaaaggacaggctcccacaaaagaggagatggggggagcctagagagagacaggagaacccggaggccctgttgttggaggccctgttgttagtgaccggacagcaacaggcggacccctagcagcctgggctgctttgtgggctttgcgaataaaccacgtagacaatgtgaaattgtgtttcttcctttccgtcctcgatggaacacaatgggatgaagatgtttctgtctgaaagaactgaggtgaaatcagtttagcacttaggtgataacccctcagcagaaggccccacgcatgcccaggctgccttcggttctcaggcgctggtggctgttcccagggtctgggggccctggggggccaggatgctgttgtcctctgctcccgcctggagaccactgtctcctccaaagctctgtaaactgtcagtagtgcaggcccctcagaagccaatgaggttaacgggcaggtcagcgtcaggggctcacccagccaccccagaaccccttgctgttgttccagaaccttcagattgctttctctgaaagtgtgcctgtgtgtgtgcctgtgtgtgtgtgcacctgtgtgtgtgcgtgcctgtgtgtgggtgcctgtgtgtgtggggtgcctgtgtgtgtgtgagtgcctgtgtgtgtgtgggtgcctgtgtgtgtgtggggtgcctttgtgtgtgggggtgcctgtgtgtgaggtgcctgtgtgtgtgtgggtgcctgtgtgtgtgtggggtacgtgtgtgtgtggggtacgtgtgtggggtgcatgtgtgtgtgtgtggggtgcctgtgtgtgtgcctgtgtgtgtgtgggtacctgtgtgtgggggggtacatgtgtgtgtgtggtacgtgtgtggggtgcatgtgtgtgtagggggggtgcctgtgtgtgtgggggtgcctgtgtgtgttgggggtgcctgtgtgtgttggggggtgcctgtgtgtgttggggggtgcctgtgtgtgtgtggtggggtggatgctgacgggaaggcaggggacgaggatgctggttttgtctgagagatgtggcttagcccaggaatggtgatgtggtctggtctatacgtgctccgccttctgtcatactgcctgccatgcctgtcgtacctaatgtagaccctctggcccagagcccaggggaagtgggtggggccatggtaggtagaggcggggccctgtcgaggaacagggcttctgaggccactccagacctatggggctgaccgggggtcccggtagcttgggcgggagccccttcctgggctggtgacagaagtggaggtggcacccctttcagcgaggagcagctgtgcagagggaggtgtggctgccttggggtgattcctctgcttgctgggggtgtggctgggcgcctgccccccgcccctgcagactcccccacacttttgttacgtgcacagctcctgagaaaagccttctaaggaagcttgagctgctgcgcattctgcaagcagccattgtgcatttctgaaacgaagtgtgtgtccagtgctgtgggttctgctcactgaacactctcgtgcggggaatgctcatgttcctccacagaaaggcagaagcagagctggcacagttccttcccagctggcagcccaaccccagaccccagagccatggacctagcctggtggccctgtgggcattgagtttgcagttcctggcaagaagcttccccaggtctaatggcgaagcttccctcaacctaacgtttcagggttaggactcctagagcccattaggacgagactctaggtggcccatgctgcatgattttgacagcagggaagcactttgggatgagcagtttacccctaaatctctagaaaattaacagatgattttgcagtgatccctaggctttacaaatagttttctttttctttcctccttcctttttagagccaggatccatcatggttcactcgctttctggttgtttcatatatttggagggtgggcagagcagatcacggaatacagatagcactgagagggctttaggcgtgtgccagatcccgctggctgccacccagtaagctggtgcatgtggaggcttagaatagattcattggcagctgtaattaaggttgtgaactgcaccacgatgctaaaaaaaacaaattctctgcagctgttttactgactgagaaattacccctgtcggccgaagttttattcttctgatttggtagaggaaatagtttaaaaatgatctcacagcgtgatttatgtaaacggcgcttctttctttggatgagacaattgagatagagtctgaaaccctggcaagccacagcttcctgcagtgtcctgttgccatgggttacgaagggagcgagagggaacttcatcggaaatgcctttaaacttttctcacacgcacaagctgcggtgttgaatggtgtgtcttagacccgggtgcctagtgtggctcggtgccttacaatgaatttggggaaagagttgtcaaacgaaacccatgtttctaatgaccagcaggtaagtagttccggctttttcttttcatttaatcagtggtaggaaagcgtggcaccctggctatcctgttttagcgagtggcagctgtgggacctgcaaatgcttgtaaggataagctttggaaatggttttcatgtgtctgcaccacagctcaaagcgagtgctgcgggggctcagcccaggctctgggaccgcagcacgtcccgggcccgacacacccggccgccggcctcaacccctcgggagcccaagctgccaggttttaagtcagaacttacggaaagcgtcagatgtttttcctttaccgtggtaattctcatagatttgaaagatgtgagtgaattgattttgttgaaatattaattttaggctagataaatacattaaaatcttaggctctttaaatgatggtagcttaacatttctaaatatgatgagttgatttggctattgtgcatatagatagctactatagatcatattggtgattactatataagcttatgaagttgaagttactctaaaatggctttttaaaagatttgagatgaaataaaaataatttctattttcctcttaaggctgtgttggtgcaaagataaaaataaatttaaattatgtacagaagtcttagtaattactgggcactgatttcgaattcattcttttctgggaattgtataatcttaatgtttttctaatatctaattaaagtcttctgtagagaagcgaaggacaaactactagtttagagatgaggggcatggaggggttgggaacaggaaaatgagccgcgtccttccttttaagtgggaaatagacatgggtctgctgggcagggccagcatgagcctgatgaaatcaaccggctttctgt

SEQ ID NO: 10058 - DNA, 6000 bp, Homo sapiens
atgttcatagcagtattatttgcaatagctgaaaggcagaagccacccagatgtccatcatcaggtgacggataaacacagtgtggtccatccataccgcggaatattattcagccttgaagaggaaggctacaacatggatgacccttgaggacaccatgctcagcaaaatcagccagtcacagaaggacacacactatctaattccacttatgtgggattcctagagcagtcaaattcataaagacagaaagcgggagagggggcctgggggaggggaatggagagtgcgtgttaaatgggggcagagcttcgttctgggaagatgaaaaattctggaggacggtggtgatgcttgcataacagtacgaacacacctaatgctactgagccagctaacttggtaaattttgtgttatctggattttaaaatcagattgaataaatattttgaaagtttaataaaaaacggcagtgcagtagtacagcaggagctgggtgttgtctcaggtcagccatgagctgtgtgaccttgcacggacttgcttccctgacttcccagttctcatctgtggattgaggcgttggaatggttcttacgccaaaatgattctttgctccgaactgatggtcgcatgggatgattcactgttttgttttagacagagttttgctcttgttgctcaggctggagtgcagtggtgtgaactcagctcacggcaacctctgcctcccaggttcaagcgattctcctgcctcagccttctgagtagctgggattacaggcatgtgccaccatgcctggctaattttgtatttttagtagagacagggtttctccatgttggtcaggctggtctcaaactcccaacctcaggtggtccacccgcctcggcctcccaaagagttgggattacaggcgtgagccactgtgcccagcaattcattgttggcactgagagtggccaagaaatttggtacctgagcaggggttaaggttctacccttcccctcccctcatttctagcggttttactttggagggaacccgatgcttttctgggcctgtgtgtggtagtaatgccggttgaccggccgtcccttgggaccctgtagccaggcaggttgattggcctgaggcccttggttctccctgaagccggctggctcaggctggctcactgcatcctggatgcctgggggccagggtgaccggcctctgtggttggcgggcgggcggtgtctgctccactcagtgcccttgagtgctgggtgtggtggccgaaggctgggaggtggagatggtgccctgggggccacctgtcttctcagacagtcgtgaggagtcttctcaacttaaaagctggagtttgaaccaagtggtcttttaggccatttttattgttgttttccctgtttagtactctttggggaagagtcaagattatgtcacaccagcaggggtgctaaatcggcggtgatgatctgaatttattaatttacaaaactttgtcaatttgagaaacacgagtaaacgctggtctctccctgctgtggaagttgtcacatctgttactggccctcgttccatgagttgatttagtgctttgcaagaattgttttctgtctgcttgttagacttttcctttctcctttacatctccaaagtgcacagtgcatccacgtgtgggcaggcgtcagacatcctttcttttgcctgtgctgggaacaagttgcaaggctgactgtggaagggccgctcacctggggcgtggtcagggctgccaggtgtggtggctcacacctgtaatctcagcactttgggatgctgaggtaagtgattgcttgagcccaggagtttcagctcagcctgggcaacatagcaagacccagtctctacaaaaaatacaaacattagccgggcctgttggcacatgcctgtggtcccagctactcaggaggctgaggtgggaggatcacttgagcctgggaggtcgcggctgctgtgagccatgatcatacctctccctccggcctgggcgacagagtgagatcctgtctcaaaagaaaaaaaaaattaaactctcttatcactgtccatctaaataacagagagaggctctctgaaagaaatgatgtttatctgggagcagggcattggagtaggcagatacttgccatggtctacagtgcatagctggggaggccaaagaagacaaaggcttttaaaggaaaaatgaggatcacatgattgttttgagataattatccttgccacaaggatcagcaccaaggatgataccaggctggaggtgggcgggcggttgctgggcagatgtcctcacagtgtgttttgagtgaggctgtgatggcctgtgtgcatggctgtgatttgcacatctttgtgatggatttgtttttcgcaggcacactaatgtgtgagccctcccttcatggccctccccagctctgtttgttagggtttttaacacaagtgattcattttgattctgacagccttaatctcacaaagccatgggttcattccccacccttctcaagagcagaaaatacagaatagcaaatctataatgagaacaaagtcactcattgctttagcagtggactgaacatttcccgttattgctgttgccgcaacacacgtctgcatgccgtacaggtgccctgcgctccccattgttgggcagtcagtcccccgtgttgtggcctccgtgtcgtgtgtctcatgagcactgcccagcgccttctcaggcctcccctctgccggggccgcacacctgccaggagccgggcgctgtgctgggcagcaagttttcagacagcatcagacgaagcgaagggcgctgctgctgtcgtcccatggcagtcccctgggggagattcctcatggctgacagcggtgtcactggtgggaaggaaaagacccaaagactgggagagaggacgctggggagtcttaacttagacgggggcttaaaggtctcttacaagaggggttgtttgggttgaggggtcaggggagggaagaacatgcacaaaggccatgaggcgggcgcccggggtgtggacccagagcgtggacacggacgccagcctaagcaggagggagcgggggtggcaatttatcagtcaccacagaagagcacgctggcaggacactcaaggtgcctgccatcaggagcagagacaccaggaagccacatctgtgtcctaatgggaccacaggttccctccaaagagtgtcttacaggctgatttacagaaggcaggagctggcgggagcctgagctgagccccatgggagcagcaggcaggtgcaggcaggtgcaggccggtgcaggccagtgcagtccgttctccagcctcggaggcacggcgtgcacgggggcctgctccttagtttgaaaacaagcagttgtgccactagtgccttggagtgagctggcaactgtggcgcctcagcttggagtgtgcttgacacctgtgttggccggtccatctggcacctggccgctgtgcttctaggcctctgcctgccggctgccctctgctgggcatcgccactttcaggatgacagccttagagccttctctcggcctggtgggggcccagtggtggcgtccctccccgagcatcctctcgtgttcccggcagccacagcccctgggtgctggacctctcacctgccaagaggatagtgacacccctctgcccgtctttaggggctgtgggcggaggggagggtggagagatgggggtgtgggcagggacaagggtcgagagatgggggtgtgtgcggtggggaggggacaagggtggagagatgggggtatggggggaggggacaagggtagagagatggggtatggggggagggagggtggagagatgggggtatgggggaggaggggacaagggtggagagatgggggtacggggggagggagggtggagagatggtgtgggcggaggggagggtggagagatgggggtatgtggggaggggacaagggtgtagagatgggggtgcggggggagggagggtggagagatgggggtatggcggggaggggacaagggtggagagatgggggtgtggggggagggagggtggagagatgggggtgtgggcggaggggagggtggagagatgagggtgtggggaggggacaagggtggagagatggtgtggggggagggagggtggagagatgggggtgtggggggaggggagatgggggtgtggggagggagggtggagagatgggggtgtgggcggaggggagggtggagagatgagggtgtggggaggggacaagggtggagagatggtgtggggggagggagggtggagagatgggggtgtggacagaagggagggtggaggatggaggtgtgggcggagggtaggggctgcagaggccccggggtgtggggtggtgtggggctgggccgtgacaatgggtggggtaggaaggacttttcagttgaggaggagcagcgcagtgcagggagacccaggcgggaatgggtctgaggacatgatggggtgtgtcagcgtggtggtcaaggagaggggagaggcgggagggtggcctgctccatctgcttccagaaaggtgcaggcatgctgtaggtttccctagggactctcaaggaattgtggcaaggttttctacaagactcttatgcaggtggagagacaaaagtagctgcagagcctcaaaatcttgacataaacaggttcccttccttcaagcctgaaattggtcacttaggattccaagtcctcaggaaagcagagctcccaactgtgatgctttttgtttttaagaggtggcgactgatttgctggagccagcttctcatctggggaagtgtctagcataatgatgggcacaacatagatgtttgtcgaattgaattaattctggtcatttcctggaggaggagagacaggatgttttaatagccagttatttcctgcgccggagttggttgggtcttcagacaccagctgaatgcttagggattctttcatttcctaaagtgcttacaaaattatgaaaaagcacgactttgctgaaaacctgccttcatctttactaatcatcatactagtcatctttactctcagtgtactgtgtccactttccaagcacccttgcacgtgatttcatttgatctgggtaacagccttgtgggtgggctgccgtcatcctgttctgtgtttacagaggtggaggctttgtcagaggcacacagttggcagagcaaatacttgacgatcctgggatgactgtttttttttcaattttgcatgtttttcttgtataaaatatacctaagatttaccctgggatgacttttaaatctctctttttaaaaagtctttgttccacagtattccttgattttctgctatgccatgcattggacaagactaaacatctctttgcaaaagaataacctgatgccttttttcttcgtgtttagggctcaaaatttgggcggggaactggactcactcagccttctcaacgcacgtctgctcggagatcatttgggagatccaagagattcagtatcactcgctcccttgatgatcttgaggtaatttaattttcatttttcttcttttctccttcaagttttaaaaaatgcaagtccaccttgcagatacgtctggctgttttttgagtccctgtggtcccctcccctcctcctctgtagtggtaacccctgttttctgggggacagcgtcccatgcacatttgggaacctttctaccctgcaatgtgtctgagctgtcacagggctttctggggtgctcttctgtgtgccagactccagtgaacacttctagaaatgagctggtttaatccccacaaatactctacgaggtagggcctgtcattgcccccttaaagacggggcgtgatccacagacatgggtaagtgtcattttgtgtggctcg

SEQ ID NO: 10059 - DNA, 6000 bp, Homo sapiens
gtcacatcgtcaggctgcaaatttttcaaacttttatgttctgcttcctcttgaatgctttgctgcttagaaatttcttctgcatgacaccctaaatcatctctcttacgttcaaagttccgcagatatctagggcagggacaaagtgccatcagtctctttgctaaagcatagcaggagtgaccattactctacttcccaacaagttcctcatctctgtctgagaccatctcagcctggacttcgttgtccatatcactgtcagcattttggtcaaagccattcaacagatctctaggaagttcaaactttcacacatatttctgtcttcttctgagccctccaaacagttccaacctctgcctgttacccagttccaaagtcacttgcacattttcagatatctttacggcagcaccctacttctggtagcaatttactatattagtccgttatcatgctgctgtgaagaaatacctgggactgggtaatttataaaggaaatgggtttaattgactcacagttccacatggctagggaggcctccgggaacttacaatcatggcagaagggaaagcaaacacgtccttcttcacatggtggcagtagagagaagtgctgagcaaaagagggactaaccccttataaaaccgtcagatcttgtgagaactcactatcacaacagcatgagggtaactgttcccatgattcagttacctcccaactgggtgcctcccacaacacgggattattggaactacaagatgagatttcggtggggacacaacaaaaccatatcacctggacatcaaactgctgtcctccaagttttcatactttcagagaaattggtcatgacttttcctgacaagattacttaatttgcaaagagatcatttataattaccatgaatcttactgcttttgtttaatgaatatacctgggagtgagagagctgtgcactgtgtaaactggggtccagccacctgtatgtgaaggccagaggcttccctgccagcacccagcaccactttgtacaccacaaagttttatttgtcaaaaaatagtcgtaacgtcaccgttcaagggcggttgactgctgttagctttggatattgttcctttgtggctagttacgtcttttcagtatttaagagtgtattttcacagatcttacattttaaagaaaattttacatatttgtgattataccatgatatcattttgcattattttttccacttgcattgatgacataacttctaaaagttcttgtcagagatataatgtccctttttgaaatgaagaaaggaaccgcaaggtgccctctccttccctgcccttcctgatgctgagacaagccctcagtccctctgcctcctcctcagctccactcctgagcacagacaagcccagccgtggcctggaagcgacactgatgattagtatatctgtgctgagtgccgactggatgctgtgctgagccactgtggtgggtgtcttgattcctgtgaccaccttgggagatcaacatcatgggatccactgaaaagtcttgctggcttgcattagtcctgctcacagcaccatttgtaggtgacggtcttcaggagttctccacagtcgtttttgaatctcagatcctgaggagaccacctcagttctctgctgctctctctctctcctccttattttctctgcccatccctctgtactgtggtcagtgtaattgttttcagttccatcttccagttcccaaatcctctcttcaactgcctaatctctgtttagccttcctattgaatctttaacttcacttactgtattttcactgtcggacattccatatggttctgtttccgacctgcactgtgctcgtgttctgcttcagcctttgtttctcgacagcttcacagatggttactcaacgctctgcattagattgttcccatgtctgagactctgctcattgttgtctctgctgatacccactcatgctgggcttctccttgggtttttcatagtgaactcatattcgagtgggctcactatctggaactcctgagggcccctgttgggctgttttctttctggaaggatttgcattaatatatgtggcttccaggagtgttgcacctaggacaacactactccccgagggccatggctgagctggatggaggatctcaggttgaggggacaaccgtgctgtggctgaggctcactgcgggctacccggccctagtggcattggcattttctaactgcttccccctctgttccttcctcgtctcttttcagggatttccctttactctttttggagtagcggtatattaaaaagcatgtttgggtggggcatggaggctcacacctgtaatcctagcactttgagaggtcaaggtgggaggattgcttgaggccaggaattcaagaccagcctgggcaacagaatgagaccccatctctacaaaaaatacacaaagtagctgagcatgttggtgaactcctggatcccagctacttaggaggctgacatgggaggattgctcaaacccaggaggattgaggctgcaatgagccatcattatgccactgtactctatcctggtgacagagcgagactgtcaaaaaaaaaaagtatgtgtatctctctactgtctttaaaataattttttccataaatttaaagctgtttgaaaaggtaaagtttacttttaaaacagctctacactttacctgcatccgtgcactgtcttagagcctcccagaggctctggtctagccctacgtgcccgcagcctgtgcccatcacaggagcagcgatggcccatgcccatattctttggcctctcagtgggcatcacacactccctggccaccttctccttcagtctgtttggcctctgggacactcctctctcctggttctcaagtttcagctaatttgggggatgtaaatgctgcgtgtatagaggttttctagagcactttgttcggcctgccagattctgagaattgaattttactcatgagcgtgacatgaagtgaaacacctccttcatatttatgaagtttacattttatgatttatctttcagatcttattgacagcatttctgattttgtgtatggccttgtggattttcttctcataatctcaaaggtatagattgcctgtgatattatttatttattttaagacggagtctcactctctcacccaggctggagtgtagtggcacgatctcggctcattgcaacctctacctcccgggttcaagcgattctcctgcctcagcctcccgagtagctgggattataggcatctgcttccacgctcggctaatttttatattttagtagagacgaggtctcttcatgttgaccaggctggtctcgaactcctgacctcaggtgatccactcacctcggcttcccaaagtgctgggattacaggtgtgagccactgcgcccagccttcctgtgatattatttagattgcgacatgattgtggatgatttattgcgggcatggaaggaatgacagccttccaaaatgtgtatgtcagcatctgtgacgtggctgccccagagcctctgataaaaaccagttcctgcggctgagggccaagggccacatggtggcttcaggggtgtgtgctctttccccttcctggccaatgagaggacagtgaagagatggatgcaggctgctgtgtgttttcactactgggaagtgggttggggggcaggaccctccgaagctggccccaggtggtctcacacagtgcctgtcagggggcttactttgggtgccagaggacagactctgcgggggaggaggatgcgcatagctggtgtaggtcgcagggccagggctggcagtggaccccggatggccaggctgcgtcggggcatggttgcccttgccggcaggctgggaggcagggctggggccctgtgccgaggttggggtggtcagacaggatgtgcagaattccagtgggtgtaccgctcgtgttaaaacccatacagtgtgtgtcccggagggccacacggtaggggcagcagctggaagccctggctccttttccttggtcccctcccccttgggaggttcctctgggcctcacttgtttggactttggcgtgggggggtcttaaagccccagtgacctccacttctcgggagtggccaggaggtaccaggttgcccatcacggcagcaccttctcgttcgctcccctggccctggcagccctcgccttggcagagaggaggacagaagtgggtccttgccaggccgtctgggaggtccccgcaggaaggggttcctgcctagatagcagcagagtgcctgcccagggatcagatcaaacacgggtttgtccagcctctggagctccattctgctcaccccctctcacttcctggcatccgtgtcccctggtgagccagcctcttctgattcctctccttcctgggctgagtcctgggcttgtcccgtacctgcctgacggctctgcgccctgggcccttcctgccagtgcagtgccaggtcgccctgatcagggctcccgttggggccgccgtggcttcctgttcttttcggcttcctcctggctcagctgactgtctcgagttctcggcctcctcctggtcacgctggccttccggtaccgcctgccacccctccttcataacttgacttgtctgttcttgtccctggtgcctttaagccagccaccctgctctcctccagccccttccactgttccaagccccttcctcggaggcgtctccccaaccctcctgctggtggccgctcttgcactgcttgggtgggcgggcaccagatccggggcttggctctgggcttgactcctctgctgccaccctgagtggtcattgcgcctctctaggccccgttccactcctgtgggagggcagtgatgctggagagcgtgaggggcggcgagtatggccctgggtggcgtcatggcacacaggcactgagtggactgttggtggctgcccccgagtgtggtcctgggtggcgtcacggcacgtgggcactgagtgggctgttggtggctgcccccagtgtgtgtgtcacttacagggcatgatgctactgaagtttgtgaagttggtttcattgacgctgttactaagactgtaatgtcagacatgttgggatctgttcttttcacatgaaaaggatgacttcctcttgttgggtgtcacctagtttgggcggagtgggagccgtgactcttgactcattgggccgtctggctttcccgggacacctccacctggagagtgcctctgagaacctcccagagtctgccccttgtgttcctcagatggacttttcgtttcctggagttttgtcatgaggcttaattaactcatgtctctctctcttttctttcagtctgcaactgtgtctgatggcggtaagtcacaatttctgatgtatatattttttatttttcataaagttttcaaattgtgaaagtgtatttgccatttgatgccctcaggaaggacgggttgtttgcctttccctgtctccttgtgggcgggttctaggtgagttaattctgggggcgctttctgtgacacccaggtggcctcggcgtgtgttttggaagctgtttgttaagagaactgccatggccctgaacaccagtgtgatagagcgctgtgtgtctgaggagtgcacccacccgcctgcctgtgtctgacaagttaaaacgtgtttttgctcttcccttgttgtataaccagcttttaaaccagcaagttaagatttcaaagtgctttctgaatttgagcaattcaggaaatttgggtgagacccagaattttctcaagaaaagtataatagacgaattgagagtgtgggatgaagaggaatcaaaaacttactttctgtgtttaaagaattttgtgcacagggattcttttcatggactgattgaaaagg

SEQ ID NO: 10060 - DNA, 6000 bp, Homo sapiens
cagacctgggtcctatccaaacatatctcattacgtatatacagatgttccgaatcagaaaaaatccacagcccttctggtcccaaaaatctcttctaagggacactcagcctgtgtgacgtggtcggtgactcctgatgggaggtggcagtgctgtgcggcgagtggggaccttcgtgtcacatcccatctgtgcctcagggcttggatgaattacttctggctggaccttgttcccttttccacacagtgaagaggctgggttaaatgatctccagtcaaggtgattcagagttagctggaaggtgtgtagggggaagttggagcttcctggccttgccccagacttactaagtcagagtccctgggaggtgcaggggcttgggagcaggcgttcttactggtagccccgatggtgtaatggaagttcagctggaatccagtaccccatggtcttctaaatttcactgtctgttctgctagctttactattaattgatacagttttaaaaaaaattaaactataagctgaacttatgtgattattttgggaggccaaggtgggaggattgcttgaggtcagaagtttgagactagtctgggcaacatagtgagacctcgtctacagaaaaattaaaacattagccaaggttcactgggtgtcttctccttggcccctttgcccacgtggtgaacactgtggacctgtgagggtgtgagggttgcgttcctgcgttctggactctttacccactactgagaagcagccgtttgaaatatgagttggcaaggaagatcagcatgtaggcttagaccaagacggtatgtgcagcctcctgagctaactgggcctgtgcttgagcccagtgatgagcagcctcagcaagaggaaccaccacctgaaagtcggggtcttacctggccaggagagagaggaagatcacggtgctgctgagattcttgtgcttgaccaggaagctgatctccgggagctgtctcaaagactgggatgaatgtggagatggtcctgatgtccggggaatattctgccgaaatcagagcaatttaaattgccagaaggaggtgaagggcaaccacaggttccaaggaagacaagctgaaacaatgcaaactggttttatattagatacgtgacttaaaatatctcaatacagttttctccaaaaaaaaaaaaatagttagccgagtatgggggtgtgcttggtatggcttgagcccaggagtgagtttgaggctgcaccgagcaatgactgtgccactgcactccagtctgggcaatggagtgagaccctgtctctaaaaaataaaaacaaagaaacgtgattatagataataagatattacttacatgagttacaaaccatttctttttaataagcagaggcccatgacagtaagagtctagtagaaaaattgggtggactgcatagaagacattgtccatcattatgtcacacagtgtgaggcggatggtgcgaataaactgggaagtcatgtctttcattgaggcagcatctattcctgtttggaagagaaagccgagaggtgttctgttccccgaggaagccatcaaggcttcatgacctgctgtcctggggctgttcacagtgatagctggcacttgccgggaacagcagcacctttgttgtgtgacagatgcttttctgagcgtgctttagtgagaccgtttcacgcatgtcctgctttccctctcccctcacccgtgacaaagtgattcccccttgtatttgtttcctggggttgctgaaagaaattactgcaaactggggggcttaagacaacacacattcattctcctgcgttttcgggggcctcgtgtctgcagtcagtgtgacctggctgatggcaggtgtggcagagctggttcctctggtgactttaagtctgcttccttcacctttccggcttctggaggtgaccgcctgcccgtctgcctgggctcgagacccatccttgaatccctgcagtctccgcatccttcctcatgtggccgtcccctctggctctgaccccaggctcacacaggcgcaccccacactctccccatctctagagccttcacgtggtcacgtggatgggaggagccatccaaaagcttgggagtgaggatgtgggtgtatcaggggccatcagccagcctgtcacacctcttaagaagatcgatccccagacgtgtttcttggccaacttttacatttatttatttattttttaatgatgatttttaataatttttaattattaaaaaattataaaataattttaattattttattttttaaattcattttttaatgattttaaatagttaaatgcccagtcctaatatttaaattattaatacagtactacttagatattgagtaatgtaatttatattcattttttactcttttccatcaaaacataattttactaagtacgcatgttctgtgtccgtgttttgtcatcactgaagccacttttggagtcacctagtaatagcctttccactctatctagttctgtagcttttatgtgtgtaaattacttcaaatctgtttatgatcctattgctggaaactttatcccaagacacaaaaatcttttctattagaagttattaactttaaaacaattatttattttattttattttattttttgagacagagtctcgctttgtcacccaggctggagtgcagtggcacgatctcggctcactgcaagctccacctcccgagttcatgccattctcctgcctcagcctcccgagtagctgggactacgggcgtccgccaccatgcccagctaattttttttgtatttttggtagagacaaggtttcaccgtgttagccaggatggtcttgatctcctgacctcgtggtccacctgcctcggcctcccaaagcgctgggattataggcgtgagccaccgcacctggcctaaaacaattatttctttaaaaaaacataccctctattctattttgtgtcttcacaacacaatcacttactgtattgctttttaaagtgatctttaaagagtcttgcagaagagactacacagcaggcccgagaccatcctgagaggcctgtgtgcaaggctggccccccgctggtgtcaggacggtgcccaccaccctcaatgaagaggggctccctgtgcttagctgcttgtgtggggaacaaggtttgtgctgagaaccttcctttcttctgggagtccagagtctgggcacgaagcaggcagagggtgcccatgtgcccagcccccagtaaaaaccctggcaccgagtctctagtgggcttccctggtgacgacactgcacatgcgttgtcacggctcactgtgtagggagttaagtgcgtcctgcgtgaccccgctgggagaggattctggaagctcaagcctggtttctttgggacatcgccccatggacctctgcccttgctgattttgtgtggaatcctttcgctgtaatgaatctcagctgtgagagcacctttgtgccaagtcctgggaatcctagggaatcactggcctgggggtgatccgcggaccactgacaagtttgttctcaatgacaaccaatacttttataccccctggaagaattgagttaatatgacatttctgcttttttaggtggtggtttttatctagcctgttgagtggcctctgcagtattgatcgaggttgtttcaggctaatacgttttcccccacacagtatattcaaaataaattaatgtgggagggtcatggaatattaggtgacccctctcctgagggaaaactctatgtcaggggatttatgatcaactaaggggttagactcagtgttctgcaggtgcctttgaacctgaagcctgtagcaggccttgcttctcacgcttggactctgccatcctgtgaaacgtgggtttgggtgtgtttcttctgtgtggagcccgagagtctgcctttcagacgggctgccagtccacggaccacactttgagtagcaaggggctctttccatccaaacagggtgtggaagcagtgctgggaagcagtcctgcatcctcacacccgtggcaggtgggcctggcaggaacttgtgtggtaacaaggtagcagttgtgggagacattttctactccgaaaggaagtttcttagcctgacttgaagatttattatctatagacacttagaggctctttctgtggtggtttttattatgaattatctttttgtgtttagctaataccagtgagtggtggagaaagatgggctctttaataatgagctgttcgtttttctttcttagggcactgtttgaagaagcaaacatggtagcatcaagcattccttgaaatatggctccaagggaacaatgagacgtgctcttggtcttggaagctcatcagaatgtttagagctggggaggcctccaaacgcccattgcctgggccgtcgcccccaagggtgcggagtgtggaggttgcccgggggagggccggctacggattcacgctttcgggacaggcaccctgtgtgctcagctgcgtcatgagagggagccctgcggatttcgtgggcctccgagctggagaccagatacttgctgtcaatgaaatcaacgtgaaaaaagcatctcatgaagatgtagtgaaattaattgggaagtgctctggtgtccttcacatggtgattgctgaaggcgtcggccgcttcgaatcctgttccagtgatgaagaagggggactctatgaaggaaaaggctggctgaagcccaagctggattctaaagcactaggtataaacagagcagagcgagtcgtggaggaaatgcagtctggtggaattttcaatatgatttttgaaaacccgagcctttgtgcgagcaattcagagcccttgaaattgaaacaaagatccctttcagagtcggccgcaactcgatttgatgttggacatgaaagtataaataatccaaatcccaacatgctttctaaggaggaaatatcaaaagttattcatgatgattcggttttcagcattggactagaaagtcatgacgattttgcattggatgcaagtattttaaacgtggcgatgatcgtgggctacttaggctccattgagcttccttccacgagctccaacctggagtccgacagcttgcaagccatccgcggctgcatgcggcgcctgcgggcagagcagaaaatccactcgctggtgaccatgaagatcatgcacgactgtgtgcagctgagcactgacaaggctggagtcgtggccgagtacccggccgagaagctggccttcagcgccgtgtgcccggacgaccggcgatttttcgggttggttaccatgcagacgaatgacgacgggagcctggcccaggaggaggagggcgccctgcggacttcctgccacgtgttcatggtggacccagacttgtttaatcacaagatccaccaaggcattgctcggcggtttgggtttgagtgcacggccgacccagacaccaatggctgtctggaattcccggcgtcctccctccccgtcctgcagttcatctctgtcctgtaccgagacatgggtgagctgattgagggcatgcgggcccgcgcctttctggacggggacgccgatgcccaccagaacaacagcaccagcagcaacagtgacagcggcattgggaacttccaccaggaggagaagagcaaccgggtccttgtggtggacctgggtgggagctcgagcagacacggccccggaggcagcgcgtgggacggtgtgggtgggaggggtgcccagccctggggtgctccctggactgggcccttctgtccggaccccgaagggagccccccatttgaggccgctcatcagactgacaggttctgggacctaaacaagcacctagggccagcctctcctgtggaggtgcccccagcttccttgaggagctcagtcccccct

SEQ ID NO: 10061 - DNA, 6000 bp, Homo sapiens
ttactatattagtccgttatcatgctgctgtgaagaaatacctgggactgggtaatttataaaggaaatgggtttaattgactcacagttccacatggctagggaggcctccgggaacttacaatcatggcagaagggaaagcaaacacgtccttcttcacatggtggcagtagagagaagtgctgagcaaaagagggactaaccccttataaaaccgtcagatcttgtgagaactcactatcacaacagcatgagggtaactgttcccatgattcagttacctcccaactgggtgcctcccacaacacgggattattggaactacaagatgagatttcggtggggacacaacaaaaccatatcacctggacatcaaactgctgtcctccaagttttcatactttcagagaaattggtcatgacttttcctgacaagattacttaatttgcaaagagatcatttataattaccatgaatcttactgcttttgtttaatgaatatacctgggagtgagagagctgtgcactgtgtaaactggggtccagccacctgtatgtgaaggccagaggcttccctgccagcacccagcaccactttgtacaccacaaagttttatttgtcaaaaaatagtcgtaacgtcaccgttcaagggcggttgactgctgttagctttggatattgttcctttgtggctagttacgtcttttcagtatttaagagtgtattttcacagatcttacattttaaagaaaattttacatatttgtgattataccatgatatcattttgcattattttttccacttgcattgatgacataacttctaaaagttcttgtcagagatataatgtccctttttgaaatgaagaaaggaaccgcaaggtgccctctccttccctgcccttcctgatgctgagacaagccctcagtccctctgcctcctcctcagctccactcctgagcacagacaagcccagccgtggcctggaagcgacactgatgattagtatatctgtgctgagtgccgactggatgctgtgctgagccactgtggtgggtgtcttgattcctgtgaccaccttgggagatcaacatcatgggatccactgaaaagtcttgctggcttgcattagtcctgctcacagcaccatttgtaggtgacggtcttcaggagttctccacagtcgtttttgaatctcagatcctgaggagaccacctcagttctctgctgctctctctctctcctccttattttctctgcccatccctctgtactgtggtcagtgtaattgttttcagttccatcttccagttcccaaatcctctcttcaactgcctaatctctgtttagccttcctattgaatctttaacttcacttactgtattttcactgtcggacattccatatggttctgtttccgacctgcactgtgctcgtgttctgcttcagcctttgtttctcgacagcttcacagatggttactcaacgctctgcattagattgttcccatgtctgagactctgctcattgttgtctctgctgatacccactcatgctgggcttctccttgggtttttcatagtgaactcatattcgagtgggctcactatctggaactcctgagggcccctgttgggctgttttctttctggaaggatttgcattaatatatgtggcttccaggagtgttgcacctaggacaacactactccccgagggccatggctgagctggatggaggatctcaggttgaggggacaaccgtgctgtggctgaggctcactgcgggctacccggccctagtggcattggcattttctaactgcttccccctctgttccttcctcgtctcttttcagggatttccctttactctttttggagtagcggtatattaaaaagcatgtttgggtggggcatggaggctcacacctgtaatcctagcactttgagaggtcaaggtgggaggattgcttgaggccaggaattcaagaccagcctgggcaacagaatgagaccccatctctacaaaaaatacacaaagtagctgagcatgttggtgaactcctggatcccagctacttaggaggctgacatgggaggattgctcaaacccaggaggattgaggctgcaatgagccatcattatgccactgtactctatcctggtgacagagcgagactgtcaaaaaaaaaaagtatgtgtatctctctactgtctttaaaataattttttccataaatttaaagctgtttgaaaaggtaaagtttacttttaaaacagctctacactttacctgcatccgtgcactgtcttagagcctcccagaggctctggtctagccctacgtgcccgcagcctgtgcccatcacaggagcagcgatggcccatgcccatattctttggcctctcagtgggcatcacacactccctggccaccttctccttcagtctgtttggcctctgggacactcctctctcctggttctcaagtttcagctaatttgggggatgtaaatgctgcgtgtatagaggttttctagagcactttgttcggcctgccagattctgagaattgaattttactcatgagcgtgacatgaagtgaaacacctccttcatatttatgaagtttacattttatgatttatctttcagatcttattgacagcatttctgattttgtgtatggccttgtggattttcttctcataatctcaaaggtatagattgcctgtgatattatttatttattttaagacggagtctcactctctcacccaggctggagtgtagtggcacgatctcggctcattgcaacctctacctcccgggttcaagcgattctcctgcctcagcctcccgagtagctgggattataggcatctgcttccacgctcggctaatttttatattttagtagagacgaggtctcttcatgttgaccaggctggtctcgaactcctgacctcaggtgatccactcacctcggcttcccaaagtgctgggattacaggtgtgagccactgcgcccagccttcctgtgatattatttagattgcgacatgattgtggatgatttattgcgggcatggaaggaatgacagccttccaaaatgtgtatgtcagcatctgtgacgtggctgccccagagcctctgataaaaaccagttcctgcggctgagggccaagggccacatggtggcttcaggggtgtgtgctctttccccttcctggccaatgagaggacagtgaagagatggatgcaggctgctgtgtgttttcactactgggaagtgggttggggggcaggaccctccgaagctggccccaggtggtctcacacagtgcctgtcagggggcttactttgggtgccagaggacagactctgcgggggaggaggatgcgcatagctggtgtaggtcgcagggccagggctggcagtggaccccggatggccaggctgcgtcggggcatggttgcccttgccggcaggctgggaggcagggctggggccctgtgccgaggttggggtggtcagacaggatgtgcagaattccagtgggtgtaccgctcgtgttaaaacccatacagtgtgtgtcccggagggccacacggtaggggcagcagctggaagccctggctccttttccttggtcccctcccccttgggaggttcctctgggcctcacttgtttggactttggcgtgggggggtcttaaagccccagtgacctccacttctcgggagtggccaggaggtaccaggttgcccatcacggcagcaccttctcgttcgctcccctggccctggcagccctcgccttggcagagaggaggacagaagtgggtccttgccaggccgtctgggaggtccccgcaggaaggggttcctgcctagatagcagcagagtgcctgcccagggatcagatcaaacacgggtttgtccagcctctggagctccattctgctcaccccctctcacttcctggcatccgtgtcccctggtgagccagcctcttctgattcctctccttcctgggctgagtcctgggcttgtcccgtacctgcctgacggctctgcgccctgggcccttcctgccagtgcagtgccaggtcgccctgatcagggctcccgttggggccgccgtggcttcctgttcttttcggcttcctcctggctcagctgactgtctcgagttctcggcctcctcctggtcacgctggccttccggtaccgcctgccacccctccttcataacttgacttgtctgttcttgtccctggtgcctttaagccagccaccctgctctcctccagccccttccactgttccaagccccttcctcggaggcgtctccccaaccctcctgctggtggccgctcttgcactgcttgggtgggcgggcaccagatccggggcttggctctgggcttgactcctctgctgccaccctgagtggtcattgcgcctctctaggccccgttccactcctgtgggagggcagtgatgctggagagcgtgaggggcggcgagtatggccctgggtggcgtcatggcacacaggcactgagtggactgttggtggctgcccccgagtgtggtcctgggtggcgtcacggcacgtgggcactgagtgggctgttggtggctgcccccagtgtgtgtgtcacttacagggcatgatgctactgaagtttgtgaagttggtttcattgacgctgttactaagactgtaatgtcagacatgttgggatctgttcttttcacatgaaaaggatgacttcctcttgttgggtgtcacctagtttgggcggagtgggagccgtgactcttgactcattgggccgtctggctttcccgggacacctccacctggagagtgcctctgagaacctcccagagtctgccccttgtgttcctcagatggacttttcgtttcctggagttttgtcatgaggcttaattaactcatgtctctctctcttttctttcagtctgcaactgtgtctgatggcggtaagtcacaatttctgatgtatatattttttatttttcataaagttttcaaattgtgaaagtgtatttgccatttgatgccctcaggaaggacgggttgtttgcctttccctgtctccttgtgggcgggttctaggtgagttaattctgggggcgctttctgtgacacccaggtggcctcggcgtgtgttttggaagctgtttgttaagagaactgccatggccctgaacaccagtgtgatagagcgctgtgtgtctgaggagtgcacccacccgcctgcctgtgtctgacaagttaaaacgtgtttttgctcttcccttgttgtataaccagcttttaaaccagcaagttaagatttcaaagtgctttctgaatttgagcaattcaggaaatttgggtgagacccagaattttctcaagaaaagtataatagacgaattgagagtgtgggatgaagaggaatcaaaaacttactttctgtgtttaaagaattttgtgcacagggattcttttcatggactgattgaaaaggaagtaggcaggaatgtcttatttcactgaagatttctctgatgtcatccttatcattttggttcaatgatttaaaaaaacctctccaaagtaaggagagttcctccgaaatattcctcttttcttctaacactcctgacagtccgcaggctctcgggtttcatcgtcacctcacgcttttgtccccacttctgtccctgagagctggaataggtgcacctggcatcgctgtgggccagggatgggctgaggcacaggctgtgctgcagaagctgcccaggggccggtgggtttgaggtgccactgtatttgtgcgttaaagagaaaccaaatgtcgttctctcactttctgtggtcctgcagctgctggcctcagtcctcggcctcggaaagggctgctgtccccaggtaggcagacagagctcagagccctcgca

SEQ ID NO: 10062 - DNA, 6000 bp, Homo sapiens
cccacaacaataccgtaaactggaccgtgttctctaaggtggtgttgggatgtgggctgtgttttgtggatctcttttcttctttggcttagatcacaagtgtgggtttgactcacgtgttcagcaccagagaatcaggcaagccactgcaagcaggccagtgagttacagacgtggtggcatccctcccgcgttctggccttggagctggggtcggaatggtggcttgtgcaaggaattttattttaggtgagtgctgctcagggttcaaggtcaggccttctgtgactgtgcactattttccacgtgacgagaacaactccagagcacatgaaagtgctgtgaattgtgaaatccataattgaaagtgagtgttagagaggagacgactttccgtgtgtgttgagccacgtagcaaagaaaaatggtgctcagggggctctgcctcgcacctggctctgctgtgttcctctgcaagtcacctgcatgaattttgtccagatggaatcgtaaaaattcaccaggagagcttatgattgcaagaattccgggtggacgttttccggtagccagtttttgaaaaacgtgtgtgttgctggagattccactgtcctttgcgaatcgctggactcagtgcctggactcaggagggtccacgtgcccagcaggtcccgtctgtgccctcgggaagctgaggagctgggtcatgagttttctgtcctgatccttaggcaggggtggcatgggcagccggggctgtggcccagaggcttctctttccggctcctccaggtaatgtgtctgcttcctctactctccaggctcctgtgcttgagttgaggcccccgcttgctgtggcctcacactgggaggaattactggagcacaattcctatgtcagcagaaagctacaaaatgagattgtgtgaagggggcgtggctctcacccccagcagtgctgggagcaattggcaaggtgacgcctcctgtctttgcaataccagagaagagcatggactgcaacctctttcccttccttggaaatggtttatttgcagctaaagcaactctcacttgagtgggtcctggagcctgggcaggcccaggagagggtctggcacccacaccgcccccaagccatgcctgcatctgctctctgccgtgctcctctgtacccgaggctgtgctctctcaggagggtctgccatgtggtttcctgtacacagcatctgcctctgcaggaccccaagggcaggagcaggagcacactggggagggaatacagattccctgggcgggcacaccaggcacaggggagccgagcacaccagacaggtcatcatttactgtttaaaatacaatcatgtttctttcttgattagacttttaaagggtcagttattgatttgtgagtcttagaaaataattagtatctgccaaaacttttgaacatgatgttagtcaatacaccagtcatctttcactcagaatttatatcagtcaccattcattcattccacaaatacaccagtgtgggaatggggagagcagccctgtgggtagctggtcccattgctgagggaggcggcaaggcctagggagtggccagggaacaggggaggtgggcccgggggctggtgtgggacttccacatggtaccagggagaggcccatctcccctccaccggcagcaagggaggcagacggttcacgtcaccgtgcttgtgtgttggaattgaaacaccttttgtttgaggagcaaaagcgtcagcaaccgtggggggttgagctgtgccagccacagcgtgcagtggggcagcctcctttctgcctcccctgtcttcccgtcctggttcttcccagggcccctcagctgggcctcgcctaggcagcctccaggccaccctccaggcagccagagggaccctgcagtctcttgctcatcactgtcccccagggtgaacttcgtgctgctccgtgctggctccctgctctgcccagctcagcgtggcttgtcctgtcatggaagttctcccttgctccctggaggccagttaacgtctatttctccctcagttctcagctagcctttattgtctcaggaaaaaaagctggaggaaaaatgtcatggtgctcataatgcagaaacttcattcatgaggattgcctcatttgtcagcataaaatatagcaaggttagcaacactgctgcctcgaattctgggctcaagccatcctctggaatagctgggaccacaggtgcctgctaccctgcccagctaattttttaatttattttcattttctgtagagatagggtctcactgtgttgcccaggctggtcttaaactcttggcctcaagtgatcatccagcctgcatgatcttattttttaaataggtagtatgtgcccatgcactggaatgtacacagaacaggatcggcccccgaggctgtttctggtgcagggcgtgccattgtgtattctgtgcctttgggggggctgtccagccagctctggtcttccgtctcccagcactgggcgggaggtcctacagcttcaccgtggctgatgaacgaagtgcaccccggcagcagtagccggctctgggcatttatacttcatgtttgatcaatataatcagaggggttgatctgcgtttgctcctcccagcagtgcagaaggtgcctcttggctcagacttcactgccatcgtgatcttggccaggaggatggctacaaacagcctgaggcttaggctcatggctggcgttctgtgatgaggccagtgaacctacgagtgtccgggggcctcctcctacctggtggctgcctgtacccttctgttttccttttggcttgttgatggttttcttcttggcgtttaggtgctctgatgtagaaaagggagccagcccgccacctgtgtgatgtgtggccggtgccccacagtttcctgtccagggacttggctgatggtgcttttccctactgagatttgcgcctctgtgccgtgcactgtatcagtgttgccttcgtggctctgggcttcgtgtcttccttccggaggctttcctcactccaatgttttaaaagatcatcccacattttcttctggtatttctctaatttacacttaaatctttgattcattgggatttgtttcagtgtgtgctggaaggaagagatccgactagatagtttttcagaggtcatcttccccgtgcaccccactcactaccctgaccgtgacttagacactcagggtttgtttctgtactctgttgtgtcctgcaggtgacaccgatgctgtcccctgcgtgttcgggattgtggtctgtgtgtgttctcgtgttaggcctgtctggctctgcgtgttcgggattgtggtctgtgtgtgttctcgtgttaggcctgtctggctctgcgtgttcgggattgtggtctgtgtgtgttctcgtgttaggctggcctgctctggcgtcttgctcatcttgtttgttcccctcatttctgcttagctttccacgggagctttcacgctccacttgtgtggttctaacaagacacccataggcaagtatcggcgtgatatgtccatttagggagaattcctgtctgtgatgttttgctcctcacttccctggtgacaggatattaggcaagcacaaagagtcagcccactccaaggacccctgccccagagagagtgagtgtgcaagttgagtgtgtgtgagagtttcacacctggcttacatgcagaacggggcacttgccacatgggggggagtcttggatgttgggattctttgagggagcctcacatggcccctgtccttctgtccttggccccagccctcctggcttggccgccctgtcctgcgtgtgagcgctggtgcgcgtcttcttgcagtgcgtgccgccccttccaccgcagctcggagtcagggcttccgtgtgagccccagccgcaggcctctgaaacttcagtgcgtgctggcggccaccgcggtcacacatttgatctataacagatcaacagcatggtggattcaaggaaacattaccaccgtgtttctgatcctatcccagaacttcctttcggtcttcttttaatttttttctatagcagtttacattatttgattattctttaacattttcttttttaatctaaatgctcttcgcactttgaatgactcctgccgagcgtagcctctggctgccatgctgaccatgagggacactgttggatcaaagccctggtttggtctcctgggctctagggctccacttttctctggattagcggggcccacgctgtggcctccttggaagcctcctgccaggcctctgcctgtcgcctacagcacgtctgcagactgggctgaatccataaggtttagtgtcgcttctgcccctgagaggagttgatgctgcctcactgaccccctcctggtctctttctacccctggccccttgctgataataagatgtgttctatttgctggcctggagctggagcccatcagctcgtccgctgggatcagtcctgtggccttgactttacagcagtgccagcctgggcggcttatcctgcgcaccgtgccacaggaggctggtgaaggggcaggaggggaacatagcgtattttattatgctgctgagaacattctgtgaggctgctctgtcagtcagctgcattccataaagctgcagcagaaaaccaagcccaaagcccagggcttcttaacaacacaggtttagtggccaccttgtcacacgtcatctgtggtcagcagggcatggctcagctgcaggctaaggacagcccgtgtgggacaccctatgctcacagaggagacatacgtgctctggcacggtgggcagcggtccctgaagctgggctcacactggcccacatcccttcttgggctcaggccaggccggccactctgggacaggggcgcccccacactgctcacgtcaggagggacgggggcgcccccacactgctcgcgtcaggagggacgggggcgcccccacactgctcgcgtcaggagggacgggggcgcccccacactgctcacgtcaggagggacgggggcgcccccacactgctcgcgtcaggagggacgggggcgcccccacactgctcgcgtcaggagggacgggggcgcccccacactgctcgcgtcaggagggacgggggcgcccccacactgctcgcatccagtggacaagggtgatgaacggggatttcctggggacctcccttctctttattcgagagctcaggagatactgggaaccaaaggctactgagggccgttttgcagacacgtcaggcaggatccggtgtcctgggagcgcgctgtgccatatcccacatcgggtctcctgtaaatgagccgccgagccgacatgcgtggctgagggcttagctctggacactgtgcctgagagtttcgtgttgagaaggagcccacatgcagagcagtgtgcagtcacgggtgtgtgggcttcgcatccggaaggtgagcctcgtgcccccttcgactgagcacgctcccgagggcaccgtgggtcaggacgtaactcacgtggcatacgcggcgccccgcgcccagctgctttcgctctagcaagcctgtttgggaaacatcttgttgccatgatggtcttagtgctctgtgtgcacatgctcctgtgtaaggttagttgcttttcctgttcaaccctgtggctgtagtttgttgttgcttgggcgagtgtgcacgtgtgagcatatgagtgtgcgtgcaagggtgctgtgtgggcctgcacatgtgaacatgtgtgtgtgctcgtgcacacacatgtgcagccgctcaaggttggggtctgtgttttgttccctgctccatccctgtgtgtagaatgcactggcaggtggtaggtgtgctgtgcatagttgttgactgaatgggtgttggaggggacagagcttgctgcgtgt

SEQ ID NO: 10063 - DNA, 6000 bp, Homo sapiens
caaaggcatagattttctcttccttatgactttcttttctctctctcgctctttttttttttttttttttttgtgtgtgtgtgtgtgacgaggtatcactctgtcacccaggctggagtgtggtggtgcaatcttggttcactgcagcctccgcctcccaggctcaaacgatcctcccacctcagcctcctcagtagccaggactgcaggcacatgccaccacaaccagccaatttttgtatttttagtagagatggcgtttcaccatgttgcccagagtggtctcaaactcctgagctcaagccatccacctgcctcggcctcccaaagtgctgggattacaggtgtgagccactgtgcctggcctttttgattttcttaacattttctcttctccagcttactttattgtaagaacacagaatataatacatgtaacagacaaaatatgtgttcatcaactgtgcatgttaacggtgaggcttccggtctgctggtggctattagtggttatgtctgaagggagtccagagttacatgcagacttcttactgcttagaaggtgggtccccctaacacatacacacatggacacacacacacctggttttgtttcactggagaacctgacatacatagaaaataagcaaatgagagatgggcaattcgctccaggaaaacaagatcaggaaagaaagggacggagcatcgcacagtagaacagctgagtcttctctgagccaggcaggtctaagcagcccatgctccttggggagcccttggccagcctcctcgtccccacggacggctttgtccctgggggagccacgtgtgggtgactcaggaacagcagctgagtcaccgtcacggtcccagaccgccccctctctgcccctctctgctgtttccagggcctcttccctcccattcctccacatgacgttctcagcgttggccgccctagcgtctgccccaggctaactgatttgaccccatggctttgagactcccggctcgtccctggtccaccctctttccatcttgtctctctcctgtgccttcttcccgtccaccctccttccagagctgaatctcccgggggtcctccacctggagccccgtgcccacaaacctcagctttcctgatcccgcctgagcccctcttccctcccaggcccttttgctcctccacagcctgctctcctggggcctggcctcctccttctccctcccactcaacttcttagccacatcttgccagcccctccctcctcccaccccatgccatcagtcgcaagcccccaggtgccccctaagccactcctcacccgctgtcttccagcctcttccctgagcactggcacccttcggaaggagctgagctcttgcttccggcccctcctgtactcctcatcccccacagtcctaggctttgagtctaaccacatcagcatctgctctagaaccttactgagctccccgtgacccgccaaccaccacccagaggcctgcattccaggcctcccacgataaactccgtttgctaccaaagcctatacccgactctgcacttagcaaagctgcatcacctatggaaaacgttctgaaaataccccagatgttcttacctctgactcggtcactcaccttccctggctcacctgtgccatccatcctagaccaaggcgaggcttcccatgggcttcccgaggagccctagatcctcgtggactaactgcacagccagcagtagccggagcggtgctgctggtcagacagacctggctggaatcctggctccactgctttctggctgcatgtcaaggtgcaagtcactgtgcctctctctggacctgtttcttcatctttaaagtcagggaaaaatttcacagcacctcgaggtggttgtgaaaattcaataaaataaataatatatgccccccacctattgcagaggccgggatggggccagtgtttatatcccaacctcacaatttggcactgaacatggacatcccaggcagctgggccccgtgtgagcatcctgactccccaggcaggctgcagactcagagcaaacactgtgccttcctttgatctgttcaccccttgggccttcatacagcccgacgcccggcagaaccaccagagactgagtaagggaacagttgggaagtgtttgttcctctttaattttctggaagagtatctctggaattggcattctttcttccttcgatgtttgctatgatgcactattgcagccctctggacccagaagttgccttatggaaaagtgtttaactaagaatgcaatgtctctaataccagcatggctattcagggtctctgtttcttccaacgtgagctttggtagtctgtgtctttcagcgtatttgtccatttcatctaagctgtcaaatgtactggcctaaggttattgacagtattcccttgttatcacggaagcacctgtggagtctgtggtggtatcatgtctcttgttcctgatagtgaagctttacatcttctttctttttttcctgaccactacagctagaggtttatgaattttattgatattccaaagaaccatctttgggtttcattcattttctctgttgtttttgttttccatttcactgatttccactcttatctttattattccgtttcttctagttatattgggttcaatttgcccttctttcttccggttttgtgatgtgggagttgagttcattgatgtgagacctgccttctttcctaatacaagcatttgaatgctatacaactcccaccaaatactgcttcagctgcatcccataaatgttgatatattgttcagttagaaacacattctaattttccctttgatttcgtctttgactcaagagttctgtggaaatgtgttagctgttttccaaatatctggggattttccagatgtctttctgctgctgctattgatttgtaagttagttccactgtggtcagagaagatatttcaaatgattcaagtccttttaaattattaagtcttgttttatgactcaaaatatgacctgtcatggcaaatgttctgtgtgtgcttgaaacgaagtgttctgctgatgtcagggtagggtttccataaacgtcacttaggtcaagatggtggatggagttcaagtcttctatatccttgccagttttatgtctacttgagtcaacttttgaaagatgagtgttgaaatctccaattataattgtaaacttccatcttgctttgtagttgtttcgacttggaaggtctgctagaaggtgcataaactttgaggatgttatgtccctcaatgaactgacctccatggcgtcatgaagtgaccccttcatccctgcggccattcttactctgaagtctacttagggagtaacatctccactccagctttcttttgatgagtgattgcatgtatgtctttttccattctttcaggtttatcctattttgcctgcatatttaaagttttttatgcctatcatattttggttctttctttttctttatctggcaaactctgcctttaaattgaagtgtttagaacatttatatttaattattaatgatcacttttaaaactgtcgtcttgctgttttttcccccttttttgggttcctgtttcctctttttccaccttcttctgaattcattgggaatgtattacgggtctatttcatgtcctttgctggcctggccacggcatcccgcattgaagcctggacattctctgcaggcagtgagctggggaggcgctggctcgcagaacgggtttcctgtctcttagcaattgcgctccttggctgaactgcagccaatgtcatgaacgccatgtttcatttgttctctctggagctttggctgttttttattgctccctgttataccattttggctggaattggaaatctctgaaaatctctttaaaattgagtccattggagccagcgtctctttgcttgcaaccaaagacttggaactgagcctccccctgctgtccgaatcctgtccaccccgccgcggcctggcatctccgcctctccttcaggtctcccttcagacaccagctcctccagagcctcctggccccaacgcctgccttagatgcctcacccatcccggcccctccccaccgtgcctccgttgtctgcctcctgttgacctcccccaccagacttgggattccttgagcatggggactgccccattgcctcacactgtgcctggcacatagtgagtgcccagctggcttgtgttcaccaaataatcagtgattttcacttctcctacccatgagatcccaagcctttcctgtctggaaagaacaaggcacactggggagagcttacctgctgaaccctggcccccacctcaccagcttcagaggcaggagtgcagagtgggtaagaccgaagaccagggtcagcgcctgggtttgaagcctgtcctgaacaggtctcagccttgtggcctggggcgaggtcctcgcctctctcatctgatgttcctccgtgactggtaacagtggtcatcgccttagtcctctggaagaccaaccagtgcctgcccagggttggcaagtgctggacggatacatgctgtcactgctgtccttccatcaccaccccatgatgcagggtactgtgctgggcacaccagggaagaacacagacaaaagtctctgccccacggagacagcccacacacaggaaaccaggcaagtgagtcacacagcacatcaggaggtggtcatgctatggggggagatatcaacatggagcagggggcaggagcaagaggaagaggtgcagcaggggcaacattgagcccggtgggtggcgtgggcctcctttgagatgggacttggagcacgaactccaaggaggtggccattatcagacttgcatttcagagcaattgcccagctgctcgtggagaaggtgttgagatggatggggttgggggactgtccccagtgagatgcagatcaaggggtggtactgaccacattgtcaggacagaggcagccatcgggaggactgtgagactgtgtagtatatatgtggccctgtccctgtttcccagcatacaactcctaaagcccttgactctctggagtggtgagagtgtcttctgtgtgctcatgagctggctgggggctggggtctcctagacagcttcaggatggagctggtcacccagaaagaccaggcatgattagaggattaggacttccagccccaccccttgacctctaggaaggggagatgggaggggctgaaggttgagttgattgccaatggccaatgatgcaatcaatcaggctaggaaggggagataggaggggctgaaggttgagttgattgccaacggccaatgatgcaatcaatcaggctaggaaggggagatgggaggggctgaaggttgagttgattgccaacggccaataatgcaatcaatcaggctaggaaggggagatgggaggggctgaaggttgagttgattgccaatggccaatgatgcaatcaatcaggctgagtaatggagcctccataaaacccaaaggactggctcagggagctcctggaaagctgaacacacagaagtgcctggagggagtgcccaggacggcatggaagctccatgcccctccccaacacttcaccctacgcatctcttcatctctatccttcacagtgttctttagaataaaccagtaaacatgcataaagtgtttccctgagttctgtgagctgttctagcaaattaaacccaaggcgggggtcgtgggaaccctgacttagaaccagctggtcagaagcacaggctatgccgggacttgccatcagcctctaacgtgggggccatcttgcaggactcagccctcattgtgggctctcacgtcactccaggtgggaccagcatctgaagggcggggccatcttgcgggactgagtcct

SEQ ID NO: 10064 - DNA, 6000 bp, Homo sapiens
cccacccgccgcagtctcccaaagcgctgcgattacaggcgtgagccaccatgcccggcctctattttacatatttattgaatacagtaggttcaggtaaagaaagaaaggctgaaagcataacaagaaagaaagaaaaaaagaaaccctatttaatatatttagcctatctgtttattcataaaaatccctatcaatgtcaaatttataatatattattcaactaatgctaatatggctaatttctgcccttaaaaataatatattgtgacaaaaacgtaactgcaatttttcaagaggaagaaatcaacagcttttatttcagctttgattttttaaaatttccctctgattctcttgacctcttttaactatgataaattcattcactgatgattaatttaaaagaagagacccgtgatctctctgcattaatatttcttaagcatgctttcactctgcttctttgtgagctagaaaatcttaaaagtggctcttgcttagatttaccttaaaaaacaaaaataaaactgtcaatgtcattatagcacagtgaaacatgatgaagtataattaaattcttaagtattcttaataattgaagctctcaaaaataagtattatgacaaattggactataaattaaatgcttgcattccattcatttatgtaaaacaataagctctatagaagatgggttacatggaagaatacattttatcgttctaaagagttcaataggtctacagtaatgtagaatccactttaattatgaaaaagactaatgcaatatagacaattttgtgtcaattacataaaagtaaaattcatgaaccaagagcactaccaaagttctttttagaataaagcgtagtacaaataaaaaaaagacaatgaataaaccaattaacttaaaatactaattctactgaatagtgcctaatgccaggtccagagcatatactgaaggcagaaagatgatatgttttatctctacaactccattgaggcatgaggttgtctttggcaaactgtccattcaaattttaaactcagtttataacctaattctttcaagattgtgaaaggcagtagagtcttcacccaatttttaatttattgtgctgtcttctcacctgacaatgtctgatactgttgcttggaagcccaggctctcccagatgtacatgttagagtcacatccattcctcagtgtttggcttaaaaatgttcttcctttgtgatgttttcattaatgttccctagcatcatcattacatcctctctatttcataacgcattttactaagtacttaattttaaattatatccaagtttgtttatttccaaaatattgataggaagactattctgggcaagtgagtagacaagtttcttaatacaaagatgaattcagatccacacaaattcatactctaggaccaagtgtgtatatatgtaaagcctattgctataataaagttgcatacatgtgtgtggcacaggggagaaaatagctgacttctgggaataaagtcataggttgtttaagattatgtccacaaaggaatggccacaaatgaatgaacaacttaaataggtataagagcattatatgaagttaattgcaaattgtgaaaagcagcaatgaagagtctttaaacgaaggaaataaaatgtataaaaatgttgcctgtttacatatcttagcactatttataattcttctacactattttctgttttcaaggcctaaaagcatgaaaaatacatttcccagactctatggcaaatggggttcattttgataacttcaataggagacatgtaggaaaatttgactaatctgactagaattattactccttaaaaaataaaggcatttggccagtctgcataacattatgagaccttgtctttacaaataaattaaaaaaaaaaaaaaatcagccgggcgtggtggcatgtgcctgtagtcctagctacttgggaggctaaggcaggaagatggcttgagcccaggaggttgagggtgcagtgagccgtaatcatgccactaaattccagcttgggtgagagagccagagcttgtctcaaaaaataaaataataaaataaaataaacaatacaaaataaataaatatgaaggcatgtgggctgtggcagaaggcagatgtaaaattttgcagtgaccttcagacattctcacaagaatcccttagattattgcttagagtgactgaagtaattggtagcagtttcatgcaatccctgcactttataattataggaaaggctgctgttatcccaaaacattcattagtttatatatatctaactccctgtattacgtagcttcttaaagtatgtattacatatcttcttaaaatatgtcatttttgtttttaatgaaccaaaaacagagagacatatacaaaataatgtgttcatgaaactgtacgttctttcttttggagaagccataggctgttcatggaaaatgacaaataagtaagttctggattaaatgtagttagagtctagatggtaaagatttatataacatattgatgaccttccactttagcctgaaatctgtgggaaaccactaaaactcttcaactataacaggtcaagattgatcgaggttgaggaagttggctttgacaagagtgtggaggctgtattacttgctcacttatattctaatactactaaatttgttaagtatagtgactacttcttaattgcatacataccaacatctagtgtctaatacactgctgtaatgtcaagaacagttaatgaatttttttattattgagtttgctttttgcttattatattatttacccttaataaaatattttggattttttagaaatgcttagtgttttcgtttctggcgccttccaaatacgttttagttcacagagcataataaatatttgctgggttttaaaatgattaaaatcttccccaaaagtagacatttgactttgtaatcagtctagtttatggagaacagatgttgaatcccaaagaatcctttgctcaaggacagactgaactactacacattaaaaaagggcaagctaaagtttgagagtgagaaaaagtatagacagatagatagatagatagatagatagatagatagatagatagatagatagatagattagatagataaatagatatagatgatagatacatgcatgcatacatacatatatgtataatttatgaaattgtataaaactgatgtagtgctgatttgtattttttttttccaccagagtctagatttccagggaataaaagtttataactaaaggcttagaatatgttatatattgttgttgcttttctggattcctttaaattagaattcaaattataagggagaaattcaaagaatcagctacttttacagcattgaaatgttaacgttttctgaaattttttaaccagccaggggtcaaattgttccacatatttgcagcctagaaaatatttactaaaccacaaagcagggaaaaaagcaccattctactcatacttcttattaaaatatattataaatacctaaataaacaattttaagacaaaacatagtctgacaattgagtaaaatgttataaaagaagacagttttcctttacttaattttaatactaagacatggaaattactgtttctggataatattagagaaagaatgagcatagcttgcggattcccaacgtctcactatcttacagctgtctcagaagtaaaagaaaagctgatattgtgcaaaacctaacattaaaaaaatgagggcctggaagagacagaaagattggataaaatatctaaacttttttaatgtcttgagaatattggcttgttaaaaaatgatctttccctttacagaatacacatgtaaattgctttcccaaattaaaaatatttattagagataaatctatacagtcaatagaagaaaagcaaatacatatctctttggtctcaggtaagatgagtatatttgtattttttgttaacaaagccccccactcccaaaccaaaaagcaaaaaaattataatgggaaaatgttctatattttgctttagccaaaatataaataatattaaaatattagatattttaacttgtgttcaggatcagatattgaaaatgacaaactacattttcaatatctgaacctgaacagaattcatgtaactaaaacagactagattcactttcagtccaaataaatcatctgggaattttagtagatctatagtcaaagtatataaataggcaattattaagaaaagacacaattccaacaacaaatttaaaaattatgcaacctttttataaataacaacacaaagtaaaacaacttgacctatagacatatcattttaatgcatgaatttgtgtttacacattcatgttatcataaaatattactttgaattaattctgaacttattttaatggtaaataatttattatttttaaacacccccttttaagaaatattgatctatactttcagttggagcaagatatgcaatttggtaagatgtttgtatttatgtcaaggtaaattgagcgtacatcagaatggcatgtttgcatataattggatatttatgttttgctttcagtctttgcatctcaattcaagttgcctgtgtttaaaaaagaaaaaaaagttaacaactgatgctgagcataaattcgaaataaattttttaaaatatttagagaatttggctgttaagaatgatgaaaaaatgggtgtcaatactgcatgtatgaaatgtgaacataaagcagaaagtttttacaaccctgactaaagagattttgcatgctatggaaaaggaataaataaatgtggaaataatagtacatctgacctgtgaacaatacaggtttgaacaatgcagattttcttctgtctctgccactcctgagacagcaagaccagcctctgctctttctcctcctcctcagcctactatacacgatgacaatgagaatgaagacctttatgatgattcacttccacttactgaatagtaaatacactttctcttctttcttattttcttaatataagaaagtaaaatattaattttactctggctaaaataattccttcctgacatgttttaaaataataagagctatcaatgacaagcccacagccaacatcataacaaataggcaaaagctggaaacattccccttggaaatgaaacaagacaaggatgcccactctcactgctcttattcaatgcagtacaggaagtcctcgccagattaatcaggcaagataacaaaagctgataaatgacttcagtaaagtttcaggataaaaaaaaaatgtacaaaaatcagtagatttctatacaaaataatgttcaatctgagagtcaaatcaagaatgaaatcccatttacaattgccacaaaaggaataacatatctaagaatacatctaatcaaggatttgaaaggtctcaacaaggagaactataaaatgctgctgaaagaaatcatacaaacacaaacaaataaaaaaacattccatgctcacagcttggaagaatcaatgtcattaaaatggccatacttcccaaagtgatagacagattcaaccccattcatatctaactatcaatgtcatttttaacagaattagaaaaaaaagtattctaaaatttaatatggaaccaaaaaagcccaagtagctaaaggaactctaagcaaaaagaatgaagctggagacatcacattacctgactttaaactataaagctataccaaaacatcatggtatgggtgaaaaaacagacacataaaccaatagaacagaatagattaccagataaaaagttgcacaccggaagtcatctgaccttcaacaaagttgacaaaaataaccctgggaaaaagactccttattcaataaatggtgctgtgatagctagc

SEQ ID NO: 10065 - DNA, 6000 bp, Homo sapiens
atttcttatataaacagacaaaatgtctcctaattctctatgcctctttttatcagtgtttcttctgtttctaaaaatggtacccctacatatattgtaacttaaagatagaaattactaggcatgataaacctgtgaaaactcaaatcctaaatttaagattctgactgagcttagtctatcaactatgtattcaaatataaagaaaaagaatcacattcaagaccatgtgtgaaatggtaaaatgataacatagtttgcattaaaaatccaaaatataattaggaattttatatcacttttcactttattgtgaatgaaaactgttttgtaataaataagcctgacttttttaacttctgtgccttccacttttatgtgtatatgtgtgtgtgcatgcatgtgcatgtatgcttatttgcaattgtgtaactgtaaaagtccaatcgaataatatatttacttgatttatatatatattacatataatttttattctgtgtagctaatcgtatttgagagtgaatacaattgtgatctcatctgctcttaattttctatcatcatttctccaatgtttataaattcttcaaggagtaatttttgttctccagataacctgatataagcttactaaacacaacaaaatcgtgttcctcagtcattgctgggtacataatttattctggataattttgttattcctgaataaagcaaggcagtgcattttctctataatgtggtcaagatatgtagattcctaatatcaaataaaaaagtaaaaagaagcactactttttttttttttttttttttaaccaggccaacatattcaggacataaaaactgcaatcagcacaaaagttccttaagccatttattaaatctgtgactttcaaatccctatccacttttttgaaaagtacttctagccaaacagctttattactgtttttgggttttgtttttgtttttgcttttccagtgctaaaatcatgatccattttatttcttaacttgtggggagaaaagtttatgcgtttttccttcttacttggttccatgtctatcgtttaataagaccaaaagtgaaggcacctcgttcatcttactcccctcaggtatattctgattcacaaggctgaaagtctgcttgtctgattttcctttggggactttactgtactaatgagcactcaggtgtaattcattggaagaagttttgcaggtggaggctgtttgttacttagggtgaaaatgagcatactataccagtgcaaaatgatttattacaactttttgcaataccagcaaaatgattcatacttgccaagttttgctttatgcgcaaaactttatattttaacagaagtcaccatattcttgatattaattgtggtagtatttccaaataatataacttccagacaatgtttgggtgctactcagaaaacttttctcgaggcaacatgccagaagtataaatcttttggtagaagtcttgttaaaaaaataaaaatttacaatcatatttttaaatatcccataatgccacattataatcctatctactagaaaagatcaatctccttaaaaatatgagtatatattcaagggctttctattaatgcaaaattactcaaactgcctttacttccatagaaatgatgtgatctcatgtgacatgacatagtctgttcaccattgagttttacatacacataatattttgaactaagtattcctatatttaatagggttttaattttagttcctttgattttggattggtcttcatgtattttatgtttaaaatatttatcttgacatttgtagaggcctctcttatatatgatagcatatatcatctcgtttctgtaaaacatataataaataagtcagtggtaaaaagaacccaggataccattttttttttgagacaagtctcactttgttgcccaggctggagtacagtggtgcgatctcagctcactgcaacctctgccccccggggttcaagcaattctcctgcctcagcctcctgagtagctgggattacagggaggtgctaccttgcccagctaatttttgtatttctagtagagacagggtttcaccatgttggccaggctggtcttgaactcttgacctcaggtgatccacccgcctcggcctcccaaagtgctgggattacaggcgtgagccactgtgcctggtccccagaataccattttaaagaaagctggatattattctttcctcaatagcttagcagggccagtgttattgttttctacctttatttctgtcatcataatttgtcagaaggaaacttccaagaaacattactaacattctgtcttctgcattggatgaaattctatcagctgatgggttattagagtctactctctttcagtacctaaaatgtatagttcagccatgaggaagattctcctcataataagatctttgactggcatgagctttcgtactcaggataattctgaagctttttctggagtggtttgcaaacatggctttatagactcactgaattagaatcaaagttttcacatcaccttctctggggtgatgactgcagcctgtctagtatcagactaaagacctacatttggcaattttagtctggcaagacaaagaaggcattggagtggctgcctcactgctatcaacaatggtggtgatggtattgtctgtgttagggaccagagtctcagtttgacatcagtaaagcctggtgatagtcccagttttgacactgactagctttgagaccatggcacttgctctatgtcacagggcttcagcttctgacatgtataattaggaaactggactagatgattttcagtaccctgacaggaaattttatgactcttcaatatcctttgctttatgaaaagatatcatggtatgaatgtttttgcatctacttacaggttgtaatgaaccatttgttttggttgccttcttggccccacgtagatttttaatcacaagaaaaccaacatcattgacgcaatacttaggttggatgaataaatgtaattcttatgaaggttctgggggagaatcagttccatttctctcccgtatcttttggtggcaaccagcaatccttggcattccttgaatgtagatttaacactccaatctctgtctctgtcttcatgtgttgttcctcctatatctctgtgttcaaatttccctgttataagggcaccagtcatgtaccattagggcccatgctaaggacttaatttaacttagttaaatctgcaaagatcctactttcaggtcacagtcagaggtactagggcttaggaatattatatatatttttaggggttacaattcaacccataatgctcttttcataagttgaacattttcttccacaaaaatagtaaaaactaatttgacctctattttcaaactttcagcatttaaattaatattcttatcactgatatgtgccatacatttttctaaacaattaacccctactagctcatttaaatttccatcacaagtttaagcagcagagattttaatcttttcctttctctcctttcttctcactctgccacatcagtgtgtttccaatctgtcctccagatcttcctctgtgttgcctctatatacattctagacatccttcctcattgctcaaaaggcatacaagtgatattattttctacttgtcatgatttcaaaaataaaacttccagactgggcgtggtgtctcgcgcctgtaatcccagcactttaggaggccgaggcgggcggatcacttgaggacaagagtttgagacgaacctggccaacatggcgaaaccctgattctactaaaactacaaaaattagcctggcgtggaggctcatgcctgcagtctcagctactcgggtggctaaggcaagagaataacttaacttgagcctggaaggcggagggtgcagtgagccgagatcacaccgctgccttccagtctgtgcaacagagcaagattctgtctcaaaaataaataaataaatgaaataaagcttccaaattagcctgctcaaatacatatgaatggttatgggtgtatgagttgtcctttctaggcctgattttttaaagttgaggctttagaaagaaaaatatatgtatcatctaactagaaggtctagtaattattttaatggaaatttataggcttgaattcaaaagagtttgatgatgaatctgtgctctgccacaaagtagctggcacactgaatttcttttaatttctgtaaagtagggatatacagacagtaggttaacattatcatttcacagatgagaaacccgaggtaaatgaaggttgagtaactcactccaggccacacatttataaatagaagcagtcccaagcctgtactggaatagactattctacctttatgaggctatttgtaataattaaatgagataatatgttctcccatagaacttcttcacattttctgcttctttaaaacatgactgcttggcaatgaaaaggctcatttcagttattagtcacgttacaattttcctaaagaccccttgttactgcgaatcaaagaccaacattatgtgctcttacctttgattaattctcataaccccaggccagaactaaacccaaattaataatgaaacaataaatgaatgaatgaatcattaaaaaatatgtttactaatgtaacaaacgtgtctgtaatatgcttatatttctttttctgtgttacatacatttgaaaatatttatgactgtcttagctcatgcttccataacaaaatatgataggctgggtgacttaaacaacagtcatatttctcatagttttggagcctgggaagtcctggggtgctcaccagttccatgtctggtgagggttctctttctgacttgtaggtggttgcctcattgctgcgtcctcacacacattttcttggtacatgtatgtgaacagagagagaccttgtgttcttctgataaggcctccaattctataggtttagtactctaccctcttgaccttatttaattacctcccaaaagatacatctctaaaaacagttatattgagaattagggcttcaacatatgaattttggggttacagaattccatcctttgagttactcttacctatttcacttaaaattatttatatttagataatatgagactgaaagcagaaaaaacatgacacagaatttaaaatgtatcataatgaatgagttccatctttaaattttacagtaagtcttaattattctataatgattaaagcatcagactatttttagcttgcctatggatatcggtactcagatttgaattttcttgtaacattaggtagagactgtttttcctatagacacaaaaactataaaaactgttggcataatcttattgtaattaaattcccatttatagaaagtctagtgtttgaactgaaattgttctatttccataaaacttaataggcagaatcttatcatcagtgttagtactcaaatgttaaaaagctcagactgtgaaaacatggttatatagtcaatttccatttaaacatagagctttaatagaggcatcaaatatgctatttactacattaatacttttgcaagttttcttgaaagaaggattttaccttcctttttacaactgtattaaagacaattatagaagagctccctcaatttttagatcaaaactcattgccagtaagtcgattatcctgctcaagttatgctttgaaagggaggcactgtgcttagggtgtttcgaggaggaacgttatatcagttttgaaagcatcagggcatccctcacagtatgagttggttatatattccaggcatcagtgggtcacgggatacatatactttctcccattttctatacctgtacctcgtcacttacagcgtcttcagtaagatggaaaataccaattttt

SEQ ID NO: 10066 - DNA, 6000 bp, Homo sapiens
acagccctcctgtgctcctggctccaagatcacggcctaccccacgtccatgtgacagggccctagtactggggaaaagagcagcagcagcattacatgtgcaattgggaaaattatgaaaattattgatatttataaaaagaccattttttccaatcctatgtctacaaagagccacgggtcactttttcctgtgcctggagtctcctctgcaatggaaggtggcaaggatccttggagggccgccgactccacattctagggaggagatagccggaaccacctagaacatcctgttttgccagaaagcaaggatgctttccagacaccaggggttcttccggaaggacaaagcatcctgcttgaaggctctccctcctgccaagttataataatctgagcacaaaaacaataataattacaacactgattaattaaatcagttgagtttcagaaggtctctcggtccgtaaggctcctcacaggaggaaagttaacacacagcgtgccacccctcatggtgcgggctgcagactttcttcctagggagggaactaggccagggctgccctgccggacccacctcaggcccagccatgaaggtgctccaggagtctgttctggcctgtgccacatccaggcttggatggggctggagatactggccttgcatccttctcactcctctccacttcccgtaggctggacctgcacctgccaggtgaccatggcctcggtgtgggagcaacatggggagacctgggtccctgagtggccatgaccatcgacctggagcaatcagctcaggactgttaggtgggagcagcaatcatccagctccttcaagctgcagcatccaggggtctcttcattccattatggatatagcctaagaaatggtgacagtaaagggtctcatacaacacgtcccatttttattaattttaataaataggagaaattgaatatacatgggtagtccatttgttgaactaagcttctgtctgcttataaaggttggatacacatttgcttttctgtctaagaggagaagagtgtttgcaggaaactgagacagcagtgtctgtgttaagagtaggaaggcagggcctgctccagaacctgcctccaaatcccagagaccacggtgcccccagagtggcctgcccgagcccacatcccaaaaggcacagcttgttcacaggctccgtccttcagcacccaagacaggacaccatgccagtgctaatgaccagtccacatataacagtctgggccagggaaccccagggaggaaaaccacaaggcattgctgtgaactgaaggtttgcatcgcccccagatcccctgtgggatggtgtattggtctgttctcacactgccaataaagacatacctgagactgggtaagttattcaaaaaaaaaaggcttaattgactcatacttccacatggctggggaggcctcaggaaacttacaatcatggcggaaggggaagcaaacacgtccttcttcacatgacagcagtaaggagaagtgcagagcaaaagaggggaaagccccttataaaaccatcagatctcctgagagctcagtcactatcacgagaacagcatgaaggtaaccgcccccatgattcaattacctcccactgggtccctcccacgagacacagggattatgggaactacaattgaaggtgagatttgggtggggacacagccaaaccatatcacatgtattgagaggtgaggactttgggaggtggttagggtcagacgaggtcctgagggtgggacctcacagtggtcccttatgagaagagactccagggagatggcctctctccaccatgtgagacacagcaagaaggcgccgtctgcaaatcaggaagggagccctcaccacacaccatatctgccagccccttgctcttggacttcccagcctccagaactatgagaaataaagagctattatttaaggtccccatctgtggtattcttacagcagcccaaagtgactcagacagacacacatcctaaagaaaacaccagggtgcaaaacagagaaagatgagagcccaaagagtctatcagcataagccgtgaacttgaacaatgaaaggaagctcagctgcacaggggctgcagatctgggagacactccaggtccatgtcatgttctccagactccacggacaccctgcgggaccagaggaggtgtcagtgaaggcaggtgttactgtaacaccagaatgtcacccaggagtggcggctccaggagacaggaggacagggaggcagagggggagggaggcaggagaaggggaaggagggaacaaagaacagataagacaatgaaaggaatattaacaggccactatgtcgccggatttttaggcttgaaatccaaaaccgtatgttctgctttttgaagtgttgaaagcaataaggagatagatagattacttccatgattttaactgaatgtttagaagagtttcattataatcaatgtttacatatctggggaaatgtaatctgttgaattcctgttttgatgtatgagtcatgtaagccctgtgtaaatatttagagaaatgttggctgtttgatgtcttcaaggagtatttgtcatttatagattcagagaagtgaggcagaggaaaggcccctcctggacacccaggtcccttggcttgaagatctcctggctgagtgaacccacactgcccaccccgtcccactgttctcctgcttgcagcacccccagaaagctcttccttggcactggcccccactcagccaggtagagaccctgccggagccttggaccctgccctcaccctcactgccccccacgcagggctgggctccttgatggcagtgacagtgctgggcactgaagccctatagcgaaaagtgatgtctgagtggatgaatgagtgattgacagaaccctagaaggtggacttcgtaaagcaaagaagtggcctggcgatgcccccacgctggtctacaccttccacaccatccccatcagaatcccagctgactttgttgtagatagatggggacggaattattctagaatacatgtggaaacacatgggcccagaagagccaagggaatctcgagaaagaacaaccaagtaggaggactccagcttccaagccgagcacacagcgacagcagcaaggcggtgtggcgtggcgtggcgcagggagagacagccagacccgtgcagcagacctgagggccacaaacaggcccgttgtctctgtccactgactttcaacatggtggccaaggccagtctgatggggaaagaatcatctcttccaggaggagcctggaccagggtgcatggctcggcggctcaccaggtgcctaatagacatcaacccaggccagttctacagccgcccagggagcccctgccccgggccgggccccagaggtacagggtggagccaggaggcctcagtctagcctaggggtatcactggaatagagtgaagcaaccccagctggtgtgaacagcagagagggcacatccgagacacgcgggaggaaggggaggcagcgatgttctctgccgggggcacaggagcagtgggggctccccaagcctgccgctcccgggacagggctcctgccacagcagacatggaagcagggatggtccagggatcttggtcaccagagccccctgcccatgcgagtgggaaattgcgggagacgtgggctgggccagtccctgcacgctccggacacactgccaaggtgctggacctcaggtgggcagcaaggagcctttggaaggtgagtaagggggtcagggctgcgcgttcaaaggtggcctgagacctacagcatgagggagggaagtccagcctgccgcaagccctcctcacctccacgcctccactttcctgcccccgcctgcaagagcgcaccagggtcctggcctccccggacctcacaggggatgcacagcctggcggcaacacgcccaggctctgaggagggccgctggactcggacacaatggtgtcgcttaatagatgtgtgacggggcaagcttgttccttgcctcctgtggggtcacagcagcctctgtctcacaggctgatggtgcctggttgaaactaaacactcaataaatgtcagtcattttccttacataaaatctgtgctttgaagaggctgctgaataattggaaactctggttcctgcttcagctaaatttgaatacttagatggaaaaccgggccttttatttttactggggaagggatttaactcagtcttttggaagtacttaagaaagcagagaatgtctcttttctcagagaatattgtaccctgaatcaaaacagagagtcaaattatcttaatggttgttatataaagtgatgcttagtcattttcttaaactatttgtctgaaatgggaaatttctctaaatcacatataagactgaaaccaactaaaattcatttttctctccaacaaaatcaacggtaagtgtcccgcagctgagagtcttcaaatcacagtcattgcaaggacaatattaatcacggcacacgcggccccgcccgcatgtcaataccctcacctactgtcacattcaaggtgtcaccatctccagcaggcaggccagctgtggcagggatggacacaccacagggccggacgccagccacacactcacaccggctcagcacccaaccagagaggatcttccggagccagcacccccgccggcgtgggccgcctccttggttgccagcaactcggctttgaagatggaaagttttgccatgggccggggctctgcagtttggcttctgaattcagtccacggggacagacagcgttcgctaagatgaaaccacgtctcgatgacgctgtgtcgtggaaggtgccccgactgctggtggcgtggcccagccagtgtttgggccagcagcacaaatagccaatttcggtccccgccgctgcagcagctgccaggaagctgggcgataaagtggcccccattttaaaccgatggagctgcagttggggggcggccgcgcagacagctgcagaatgaaccgtgagcctcccggagcaacgatgaagtttaaggattcgagttcttgactcagggcatctggggtcttccaagccctggagcagcgccctctccctggctgcccttcgctcgttcggcaggcaccattcaaagacccccaagtacctcccagagggggcgtgtcgagggctcccacttggccaggaggtgctccaccccaggcccccttgtgccgctgggcctccccagccttggtccctgtggacctgagccagcagcgatgcctgctgtgtggggctgctgtggggacggagctggtgacccacagaaggctctccgcagggccagtgcacagacgggctctgccatcggaagccaccatgtgcacacaggccagccactagggcctcacagtcccgccaggggtcaggcaggaaaggatgagggcccagagtgagggctccggtggacttcctgcaaggcaaagtgagacacagagagaggttgaggtcgcctccatctgggcaccaggtgaacggacagcccccaaggagaaggtgccccagggccgaggtctggagaagtcggtttttgtgtggtgggctttggggatatgggcattccaggctaaaagctcaatctaagcaagggcctgaaggcttgaaatcccccgagccccatttgggggctgcagtagactgtgtgcaagcaagactagcggggaacaaatggcgggggtgggggggcaagggacagaacgtgccagaccttgcatgtcaggcaccggctttggcctgcagcccaagggcaatggggagccatggaagaggtttgggcacgggagttaagccagaagagtgcttagggaggctgtctcaggtgtatcttcagatgcaggggcagggcagc

SEQ ID NO: 10067 - DNA, 6000 bp, Homo sapiens
cataaactagtgtataatctacaagtttttaacgtgtacttgctatctgaattttaaaagtaactacacatttgcatcaaaaaattagtataggtgattacaagaatgttatacaggatataaaactaaaaactgctttataaatattcaaatatcaaagttgctgcatcagctcagagacgctgaggctgtgctggaggcagcagaattaatggcggcaagtccctgtggagggaccttcactaacccacattcctccttcctgccctccatccttcccgatctcccgctcctcttggtgtcatttcttactgcaatagagttttgcgtccacatacctacctagggctattattaacaaatatattacatatatataaattaaatattcagcatgacaactatatatatatatatgctttatatatttgcttcttaaatttgttaagaaagtggaataaatatgaatttatattatctgttaaaattacataattatttattcaggtgcacttttatattaagttcgcactgctttctgtgtttatttacttttagcctggaacactttcttcagaatttattgtgagacagattagttagcaatagttttctgtttttgtttgtttagaaatgtctttatttcaccattttttttaaagatgattttgtagtataaataatttttgattggcagttttttctttcagtgctttgaatatgacataccactgccttaggggcagcattgtttctgatgagtagtcagctattaatgttatctgagttcccttatatgtggttacttgtttttgtctttgtgccttataattttctttctttagctttcaacttattgtgtctctgtttggatctttttgtgtttaccctaaactaagaatttatagaacctctgaaatgcataaattagtgtttttaaaatagttaatggggtgtttggggcattatttatgaatatttttcactgaatctttcccttcttcacgtggtactcttattttgcatatgttgctgtgcttaagtgtgtcccaaaagtctacaaggttctgtgtatttctcttcattctttgtttctctgttctttggattatataatctctattgatctctcttcggcatttttttggctcttattcatctgcctcaaacatgaagcagaatcctgcttatgcaatctctatgtctgttattatattttcattccagtatgttcacttggttctttgaaaaacatataacttctatttcttgtgacttataatgacaatgtgacattgtcattatagcttaattttcagctttatgtgtggtttccttgaggtctttgagtatatttataatgtctaatttaaagttttgcctactaaatctacaactcattttttttttttttttgagagagagtctcactctattgcccaggctggagtgcagtggcaccatcttggctcactgcaacctccacctcccttgttcaagcaattcctgtcccagcctcccaagtagctgggattatagacatgcaccaccaggcccgtataattttgtatttttagtagatgggatttcaccatgttggccaggctggtcttgaactcctgacctcaagcgatccacccaccacgacctcccaaagtgctgggattacaggtgtgacccactccacccgacccaactcattcctttcacaggcatgttttattgcccgttttccccatatagcagtcccactttcctatttctttgtacacttgtttaaatttgttaatcctcaatattttaaataatataattactctggaaattatatccccattttcttttaattttcattgttaatttgtttggtgaatagatggactattttaatgaagtctctttacattgcagtgttatttccatggaatttctactcagaaagtgaacccttgggcattttcacaagccctagagtaacagcggttttaataggaacactctttgactcttttctgtttttttgttcgttaattttacaagctcggtctagctcttaaccttcacaaattattggctgattgatattttgcttttggcattgtccttggggaatatatcacttcatattctgatccaataacatttaggcacttttgcagtgatcgtttctgaggcatttcagggtggtatgaacacaggaaatgctgttctttcctatctttctttttttttctgattaactttcttatgatcaagcatttacttcaagataattttgtcacaaaacatctagcttttattattattttttcatttctctggtatatcaactttggaaaaatatcattctatttgtagcattctatttgtagtggtgctatttccatttacaaaatatagaaattttcaatcgttgaaaatgtcaaatcctagaaaatacacgatgatgttaacattattatcaagcagttgttggctgaaggttaatttgataaattctatttttctaaattagatgattcagatgattctgatattagctctgtttagaaataactccaagaagagtttatagaatgtatgttcacactgaaaatgagtcagatttgcttcagcctcaaagagtgtatttatgtaaaattaaatgagtgctggctgtgagctgcactatttttttcctaaactggaaaacggtaaagaggtgtagtttcacaaagttgcccaggctggccttgaactcctgggctcaagtaatccaccttcctcagcctcctgagtagctggaactataggtgcatgccactgcagtcaacttctcctaatatgtttgcatagttgtctctaaaaacaattttcactattcttgttacatttagaagctgattcatggtactttttatactaccaatccagaagcggctaggtcacatttcttctaaaatgtctgtctaccttctcgtcgtaagtttgttttgcctcagcattgatttttaggcttaacatgagttgcttaagacctagtcataggttgtcactattgcctttgttaaaacttcccttctttgagatagagtctacatgtttctcatcctaatgacccagaaacgcaacacatcacagaggtgatgaccatgatataacctaatgatcaataccagagtcatatgataattttccccttcatgtgtgttcccttaagctagccattcctcaactcctgcggagaagcctaggaaataatacctaaggtccttaataaaagccttcctacaagggttccccctcgcacttctaggcagctggttgagctctctaccacctctggactttctgtcagtttcctatcatcatccctaacatcacttaggaactgtgagtaataaatttcttctacctttgcattttgttctttctttctcatttcgttatattttaccggactcatatatctgaaactcacttccccaccttattcagagctttccaggatcttggtttatggccattctcaagaaaatacttcaatataaaattggagagaactcacaacaatgtaaatcagaacacctctgaatatatttaataacagagaaatcagaacatagaagtttaattttatgcatcataaaattgctgtttagaaacaaataggacatgttagaagtaagaaaaaataaaacactttgttgaagttatatacccaataagctatacaatgatgccaacacataatgccaggttgcaaggcacggataatgggagaatgcgagatgactctctaatgggtgtaaagcttccttttgaagtgaaaaaaataatttggatctagatagtggtggtagtggcagaacatttcaaatgtgttaaatgccagtgaatcataaagattaaatgcttaaagtgtataattttgtggtgtgaaattattataccaattatttttttaaaaaacaagtagctgacaagatttgaccagccaagaggccatagtttgtcagcccttggtttatgctacaaatttaattcccacatgcttgaaatagtaaatactgtcatttttatcatttgcattagaaacatagcatgttttgaaactataatatattatgcaattatatgaacactaaaattattattgtggaaattttttgacttgtttaatgataatagtacaattttattttgctgtacacacaattgttagtgctttgcaatattaatgaattcgttctttcagcaacccatgatattgataatgtgatgacaactattgccatttcattggtgaggaagctgagtcaaatgaagttcaagtaacttgtccagtcccacatcattatacagtggtttctaagacttgaatcaaggccatctggatccagagtgccagctcttaaccaccaggttatattgactctcctatttggggtacagatattttccaagtgtagtatcacagtttcccattatgtagatatatattaattgtaattttattacatatataatttaaaatatgtagaattattattccaggtgtgtatcactgcataacaaatagttttcaaatgtagggccttaaaacaactgtaatcattttattatcatctctcagaatctgtgtgttaggtggggtcagttatgtgttccttcacagagtttcttaggtagctacttttctatggtgcctgggtctgtaattatatgaagatcattcacttacatacttagagattcgtgttgaaaggctcaaagtgctagtgggctaccaggattccttaggcatatatttgtatctctctacaaattgtcatttattatggggactacaggttgagttatttagtaatagtgagcgaaaaaaaagacatgaagagaagaaacagacggtggccatggaagtcagaatccgctaaggagtgtgtaacaactcacctgccgaatcaactagccctgaaaatggatggcgctggagcgttgggaggctaccaggctgttgccggcagtcgagagtggacggcagcagcctgggcagtgcgggcgtgcgagtgcagtggggggtcctcccccctctcttcctcccccatcccccggagctctccttaagctgataagcaacttcagcaaagtctcaggatacaaaatcaatgtacaaaaatcacaagcattcttatacaccaataacagacaaacagagagccaaatcatgagtgaactcccattcacaattgcttcaaagagaataaaatacttaggaatccagcttacaagggacacgcaggacctcttcaaggagaactacaaaccacggctcaatgaaataaaagaggatacaaacaaatggaagaacattccatgctcatgggtaggaagaatcaatatcgtgaaaatggccatactgcccaaggtaatttacagattcaatgccatccccatcaagctaccaacgactttcttcacagaattggaaaaaactactttaaagttcatatgaaaccaaaaaagagcccgcatcgccaagtcaatcctaagccaaagaccaaagctggaggtatcacgctacctgacttgaaactatactacaaggctacagtaaccaaaacagcatggtactggtaccaaaacagagatatagatcaatggaacagaacagagccctcagaaatagctccgcatatctacaactatctgatctttgacaaacctgacaaaaacaagaaatggggaaaggattccctatttaataaatggtgctgggaaaactggctagccatatgtagaaagctgaaactggatcccttccttacaccttatacaaaaatcaattcaagatggattaaagacttaaacgttagacctaaaaccataaaaaccctagaagaaaacctaggcattaccattcaggacacatgcatgggctaggacttcatgtctaaaacaccaaaagcaatggcaacaaaagccaaaaattgacaaatgggatctaattaaactaaagag

SEQ ID NO: 10068 - DNA, 6000 bp, Homo sapiens
cagtctccccatgccacagcacccccagctccacagcaaaggtctggacacctcaacgcctcccttctggtcctcccatggtgtacaagatcaaggcagagccttggcaggagtctacagcctttgggtgtgggctcctgctccgccccgcctctgctggtccccacctgctcctgtaccccgggctgggtgtccagcaggagcagcaggagtccctggggtccaccccacccggcccctaccacctctcctcccctccatccaaaggacacactggtagcaaagaagtataacttaagaggcacttggataagaattaaatgcccagaaggtgcattccaaagtcccacggagttggagtagcggggcacggtgacctggaggaaagtgaagacccagctgggcttcaggttttctctgcagaaccccaaggcgatagcccggcagcccctgaccctagcggggggagccccagcatcagagatgtccctggcctgacacccaaggcgcctctgagtgtcatctggcagggccagcctcgcagcgaggggagcccgggacagggatccccgcccccaggcccaggaaccccggggtcagtccacaggcccgagggcccaccctccgcctggcccccattgggaggggccttgagagaccgacgctggggaggggactgggccggcgagatggagcgcgcagcccacccccagggccggagacgcagacgagccaccgcccagcccgggaacggaagccgcgggggcgcgtcagcccttgtagaccccgcgcggggtgtcgctggggccgcggcggccgcacaacgggctcattcaccgcgcggccgcggctgagcggccgcccgggtccccacgtccccgcccctgggcccgagcgcgtgagccgctaagaccgcgcggctgccgggcctggtgagtgcgcggggcggggccgcgcgtgcatgggggttcgcaggcggtggggggagaccgcgcggggtggggagcagggccgcgctctcctgagggtgggggtgggagtgcggggcaggggcggaggccgggcccgctgggctgggggcgcggggcgggtacagacccgcctcttgggagaacctgcatctgtggccgggacgaaggggacacaggtgctagagggtgcgggccggggcctcctcttctccagacctcggagctcgcccacccgcgggagggtctctgggaataaactcgggtccggtctcaaagccctgtcggccgggcttcttcccacgggtgggaggcaaggatgcaaggtctcctttcccagtaaatggactccaatgtaaaacggctgatttaaagacaaaactaaggaagtaagcgtgtgacacaagactggccaggggttcaggcgggaggggggttcaggagggaggcggattcaggcaggtcccagttgctggggcccccacgccccctgtcctgcgtgggccaagcggggaaggaaggaggtgttggcagccctgcgcgtgcacaggctcggggtagaatgggctacccactctctctggccagcaaggcccctggaccccctgggcactcagcctctgggcctggccacaggacagcaccagccactgcctcaatgctcagagaaactgaggcagagacacgtgggagggggcaggtcaggccccaaggatcctgcagtgatgacctcacctactttagacacccagcctaggtggggactaaaagggcataaggcccaatgcctgcagaagacctgaggccaggcccctgcagtgcggctgaggctgttcctgaactacgctcacctgcctaaaacctcaccacaggtccccataagccagcctctggaaacctccaccacctttcctgaggggggaagggccacctcccactccaggtttttctgtggccccaggtggcactgcccaccccaccctgcatgcaggcgtctgcaccaggtgccccacccctgctgtagcacccaggtcctccctgcctcctttagggagaccttgagggaacaaccccagccccctgggtctccccagttctccaacaaccctgctggtggctgcacccagaggggcccttatctgtcccagggagggacctgaggccctgcgtgactgccttaccccacccactggccaaccgcttcttacagcacagctcccaactgctgagcaaacagctgcttcccagggaccactggggcccaggttgggctggggtggaagcaagggctcagactctggaggacagggcaggggcttcgaggagaaatcagacttggagagggcatcccaggtggaggctatgggggtatgagaccctggagcctgttcagctctgcccgaatctcacactcaggggtacgagaccccagagcgttcagccctgcccgcatctcacactctggggtacgagaccctggagcattcagccctgtccacatctcacacttaggatgtctcctactctctggccatcccaactacattccactcccatttcacctccaaatgggggcactgcagcccagtcttccctgggctcacccagggctgtggggaactagcagcgcttggcagacggcttccacaaggaggtacctttggtggggtgagtgtccagggtctcctccctccggggctgtgccccatcaatgtcagtgtcctcgtcttggggaaatggagccccggcacatcagctggttctgcgagaccctcggcttcaatcccacatggacaggagaagtagagcctgtggcttctgttccccggacagagtcaggctgcccaaggtgccagggccgggttggccttccagccccacccgagggacccaccgcagcctcctggcctcccttgggatgggagagcactgagggctgcagcccctcgttacactcaccctccggccacaggtgccccgtgcaggctcccacccagtactcactgtcaaagtcggggggacctgaggctcccaaggaattttttttttttttttgagacagaactggccgggcacggtggctcacgcctgtaatcccagcactttgggaggccgaggcgggtggatcacaaggtcaggagttcaagactagcctgaccaacatagtgaaaccctgtctctactaaaaatacaaaaattagccgggcgtggtggcacacgcctgtagtcccaactactcaggcggctgaggcaggagaatcgcttgaacccgggaggcagaggctgcagtgagccgagattgtgccactgcactccagcctgggcaacagagcgagactccatctcaaaaaaaaaaaaaaaagacttgtaggctggagtgaagcgctacaaacatacctcactgcagcctggacctccagggctcaagcaatcctcctaccttagcttcccaaagtgctgggccaatgacagcgtttgtttttgagacgggctcttgctctgtggcctaggatagggtgcagtggcctaatcatacctcatggcagcctcaaactcctgggctcaagccatgctcccacctgagccgcttgagtagctgggatacaggcacacaccaccacacccagctaattttttacttttaattttttaaaggttggggggcagggggcggccgggtgcagtggctcaagcctgtaatcccagcactttgggaggccgaggtgggtggatcacgaggtcaggagatcaagaccatcctggctaacatggtgaaaccccgtctctactaaaaatacaaaaaattagccgggcgtggtggcgggtgcctgtagtcccagctactcgggaggctgaggcaggagaatcacttgaacccgggagacagagcttgcagtgagccgagatcatgccactgtactccagcctgggcaacagagcgaaactccgtctcaaaaaaaaaaaaattagccgggcgcggtggcgggcgcctgtagtcccagctactcaggaggctgaggcaggagaatggcgtgaacccaggaggcagagcttccagtgagccgagatcacaccactgcattccggcctgggtgacagagcaagactccgcctcaaaaaaaaaaaaagaaaaggtggggggcgtctcactatgttgaccaggctggtcttgaactgctggccttaagcgatcctcctgtctaggcctcccaaagtgttggaattacaggagtgaaccatcgtgcctggctaataattccttttaaaaagcagcttacccttattttcacgtgtgggcctaatttagttcacttaaaaaaatcatttatcttcaccccagccctatgaggcaggcactgccggtcctggtctgtggtagaggggagggcagaggagccgtgagggtgaccaggcgctgtgggtcggtgctgggtccagtcagaccaggactcctggccagtcacggcaccttgaccccggcagtcctcgccctgggcggtgagcaccacacacagggcttacgcgagcacacacgcatatgcacgcaccggcagccttgggctgagccggctgtcagcctctgccctgctccagcttggaccaggctggctccttgcaggaccaggagggtgtccggcgactggacacggagaccaagcctccctcagccccgcctgggtttgaaggctgctgcactcgaccccagaccccagagctgaaggtttacctgtgctcagcccctgagcccccgcctcccgctggtccctaagcccccccggcagggccgcagagccacagctgcagcggctcctgggaggctgggagctcctcagaggcccacacagctctaactcctacaagcccctgattacagttcaactcccggatcagccgatcaggtaacatggctggagaaacccatgactcagcaatctgtaggtaaataattgaactacagagtccagggcacagaccactgcctgcaggttggcgccaccacccccactctccccgctgctcgcgggagccagagggccctgcggtcctcggtggtcttgccagcccctcgtcatcccagggccctccgcgcctgtgaggactccctcaggtaagaaccatcctgggcccagatctcagctgcagcagaggggggcgtgggagccgaggccagaaatgccctggactcgtggtttcttaggggcaccctcaggctcaaggcaggtggccctactgtccccattccacacacctggaccccaggggcttggggtgggcttcagggcatccagggacccagtgtggtggggtcttccagggaaggggacacaactcttgcaatgttgcctgagggccaggacccccgctctgtgccccaggggtgctgtgcccagcctgcatgtgtcaacctaccaggctgggctcactgccccaacacacccgccaggagactggagctcgcacaccctgggccagcgtgcaaacagcaggctcagcccaggctccagggtgtcctgggcacctggtgtcctgggagcaaagtctttgcctaacgtcgctgagaagaatgtttaaagtgaaagtacattggagtctgcaaacaggacagacccgaggcctcacgtgggaccagtcaggcctctaagcaccgcctccctaacgccacggtgttttccgagatcaagggaaaggtcaggtgcccttccggctctgccggcccagggtgactgtgtgcagcgggctgggccctctcggtgctgcctcgggacagtgtgtcatggccgttccacagtgagctggtgcagcctgggaaaaagggcgcctcacgtcccagaactgtctgggcaggggagacagacgccagtcaccctcctcccctcccagctggccctgatggggcccccgtccaggcatattctcagaattctgtcccaagtccaggcggatgggctaggctagtgtctgagtgctgctcccccagcagacttggggtcccagtacccacaaagcttggcagggacataggaggcctctt

SEQ ID NO: 10069 - DNA, 6000 bp, Homo sapiens
agttatctattgctgcataatggactaccctcagttcttccccatgtgggtctctacaggctatctgagtgtcctcatgacctggcagctggctgttcccagagtggaaatccaaaagggagcagggagcctgtaatcccagcattttgggaggccgaggtaggtggattgcttgagcccaagagttcaagaccagcctggacaatgtggcgagaccccatctctacaaaaaaatacataaattagccaggcatggtggcgtgtgcttatagtcctaggtactctagaggctaaggtgggaggatcccttgagcccgggaggtggaggctgcagtgagctatgattttgcaccactgcacttcagcctgggcaacagagcgagaccctgtctaaaaaaaaaatatatatatatatatatatatatatatatacacacatatatatacatatacatatatatacatatatatatacacacacatatatatacacacatacacatatatatagtgggttccattgattcaaataaaaaaattttttaaaaattaaataaaacaacaacaacaaataacaaatttaggtcaagcatggtggctcttgcctataatcccagcactttgggaagctgaggcaggaggctcacttgaggccaggaattcaagaacaccctgggcaacatagtgagaccctgtctctacaaaaaattaaataattagccaggcatggtggcacatgcttgtggtcccagctactcaaggaggctgaggcaggaagatcgcttgagcccagaggtcaaggctgtagtgagccgtgatcataccactgcaccccagactgggcaacagagtgaggccctatttcaattaaaaaaaaaatccaaatgcatagccctcccatgtcccagcccaaagccaccacttttttttttttttttttgagacgtagtctagctatgtctcaaaaaatgcaatgtagtgtagtgtacactggagtgtagtggcgtgatctcggctcactgcaacgtccatctccagggttcaagtgattctcctgcctcagcctgtcaagcagctgggattaccggcatgtgccaccacgcccagctaatttttgtatttttagtagagacggggtttcaccatgttggccgggatggtctcgatctcctgacctcgtgatctgcccacctcagccttccaaaatgctgggattacaggtgcgagccactgtgcttggcccaaaaccaccacttttatctgcaggtggttcctcagtggggtgagaggaggctggaggctggaggctgacctccacttctcctgctgcatgtacctggctaaagcttctcccagctgcaaggtgacctggtatccaaggtttttctcctgggctgtcaccctagcccctgccatcaccagtaagtgcaagcaccctgtgtggagcatcccactttcgtcagcttacttgttctggtacctggctccaaacccctctcagcccacaggccagtgatcctgctatcttctgctgtctcccactgccccctcctgttcttccctttccttctccccagtttcaattcctgggacaagcctcatagtctcttgcaaacatccttgtctctcttccttcatcatacttcccagcaaatccccaatctgggcaaatgcaactctggctgcttttcaccagagcatgggtcaagtgcagcacacaacccttctaagtcttcctctagttcgctaactggttccctaagctccctaactagatccctaacttcctccctaactagatccctagccccccttccctaactagatccctaaaccccccaactaggtcccaaccccaactaggtccctaagctgcctgactagtccctagccccctccctaactagatccctaaccgccctccctaacgggatccctaacctccctaactggggcccgtgtgctgcctgggcttcctgccctgtttctctactgtcacttgtatatacaccgagtgactatggaaggttatatgtgatttgtgaggaacatagggagaaggaaaaggaagtttccccaaccaaaaaaaaaaaaagaagagaaaaaggctaaaaacagtgcttgctattaaaccactgcgccatggttctgtgcccttgttctgctgcatatggagatgtgggactggaaggcctcattccagccttaagggtgcacagtcagctggctggatgccagatttctacttatttcttttgacctattttttttttttttttttgcgacagtctcgctctgtcaccaggctgaagtgcagtggcacaatcttggctcactgtaacctctgactccctggttcaagcagttctcctgcctcagcctcccgagtagctgggattacaggcatgcaccataatgcccagctaatttttgtatttttagtagacagggtttcaccatgttggccaagctggtctcgatctcctgaccccgtgatcagcccgcctcggcctcccaaagtgctgggattacaggtgtgagttactgcgcctgatcacagctattttaattgttgaaaatttatctaagatcccaccctgcctgggctgcacgagcatcgcagacagcacctgcctgtgtcagtcctgctgttggctctccgctgccaggctttccttgttctggtccagggatggtgggtcatcccaactgcaggcgagggtatgttccacatttcctcacacccagcactttgggcagggtggagactgcggggagggcttccctcctctttcagtgtcattcaaagtcctgtaaacaggcactagcacagatggggcagtcaccacctcctgcctggccttgccgggacacctgggaccccacagcattaacgagaggagcactgtttcttgcaccctctccggggtcaccctccctagccagcatcgggcagggtcatctggtgctcagaaccaatgtccagaccaggactaggacatacagtcctacagctgggccataaaaagtcctacagctgagccataaaaagtcctacagctgggccataaaaagtccagttctttctgaccctgaccaactgtccactccagctcaggtccaaccctgggtggggaggcaaggactatccttctgtatccccctcttgcctcctgggggatgggtggaaaaggggccccttcatgtctgttggcagcacaggcctaggttcaggcctagttgtgcttaaactctgtctgcatttgatgtctgcagtgcccactgaccggtgtggacacagggacttacagacggcttcaaagtgccctgcactaaacaatgcccccttctcccactgagatggggaattcaagcccatccaggcccagtacctggcagttcctgatggggaaaaccacccaggcaagcaggctacgttttcctgacgggtgaggaccgactgcatggacagcaggggcagaggggaccctggggagggagcctcctagggagatgtgccattcaaccagcctctcaagactggggagctggctggcatcaggcgtttcacaccccatgcgctccagggaacagagatgctgagtgtgcactacaagaccctccccaggcggtgccctgaggtgccgcggagaagcaggaggaggcaggttacatccctgaacaagacagagggcagggcaagtgctgtgctggggatctcctagctggagatctccaccagctgggcccccagcgccgcaggtccccatttttctccctgcctgctttctctgccccaactcagggatcctcatcttagggaaggaaggggaaggtggagctcagaggtcacggtctgctgggaggctgcacggtctctctcccctggactggtcagggccggctattaaactgggctggggggaggctcctgggagacggcgcatgagcggtccgcgagcccagcccagctctggcgggaattctggagacttcgagccaggtccttggcgtcctgggcttcggctgttccttcttggactgggaagtggagcggacagggtatggcccaggttaggaagtctggcgctcttgcggcgcgcgggaccccaggggctgcttaggccagagcgaaacgaggggtccccccgcgccaacgcaggacccatatctacccctcccgctcagacgggaggacgcggtgtgccgggatggggggccgctatgctggctgcgccgccacccggcctagtgccctcgcctccaggggccggcatggccctgtccttcggggcgggaccctgcgctcccgtccccccagtggtgacggggactcccgacgccgagcagcgccgtatctggggagcgccgcccggtacgcagggaagaggcactcagagctgcgcgcgccagagtgcagaccgccgagggcagagccacagagcaggggggccggcgagggaccgcggccgagggcgtcgagggcgcccctccatccccagcgtcccctgacttgcccttggagccccaagctcccaggagccgttttctactcgtgggtgcaggacttagtcccagaaaagttccggacacacgcgctgctgccgccgcccggagacgaaaagacactccccgcgcaagcgcggccgactccctcagctcctgcggccgccacgctgcgagccccggcgtccacggtacgacgggaaccaggatgcagcgagccccaggagccagccgccccggtgcacgccgggaccggtagtccgcgcctcagggtagtccgccgctccggtgcacgccgggatcggtagtccgcaccccagcgtgcaggccgtcccggtgcacgccggaaccggtagtccgcggtggcgcggtccgcccctcacctggccagcggcgggcgctgaggggcccaatgggagccgcggcctggccgccccgccccgcgcctccggacgtctgtgccgggacaaggccgccgctggtgccgggtccttgaggagagcgcctcccgtccgaggccagccgcctctgtcagccgtccgcgcgggccgggtctgaagcgccgccgggacggcgaagagccgcggccgccgcggagaaggaggcagcgcaggaggccggagcggccgccgcgcccgagcacatggcgtccatcttactgaggagctgccgcggccgggcgcccgcccgcctcccgccgccgcctcggtacaccgtcccgcggggtaagcggcgggcaccccagggcggggccggctcccggctggtgggtcgggagcgcggacgacccgcgggttcgggctggttgtcacggcgatgcggggagcccggtggtcccggcctccggagcccctgcgggaccgtggggccccgggtctcgtcgcgggctgggccgccagcgccgggcggagccgctgggcctctgccgtgtgttgtgaccttaggcggccgggtcccccgggtcactgcctcagagacagtgggaaaattctgaagggctgggcagccctggcgcgccctgcgcgagtaagcttggtggaacgtgtccacgcacgaggacggccgtgccctttggtcacgtttggggtcccggagacgagactgggtgggcagggcagacaccggcgagcaggacctgctgggctgcaggagccttcctggtccgtcactgatgaggtgatgccagcacctacaaacccctgtggtgtgattaggccgcgaccggcacccggggaacacggggactccggagccgctgagggtcctcagggtgcgtggctttagcccccctagcctcaggtgctgtctggagtgaatgctgtcccagggtgtgcccacctcctctctctctctaattaaccaacttatttgagtctatgtccttatttgtaaaattggaataaacataaaacttgctaagagggactcaagtaaaataattagtgcagtggtgcgatcatactcactgcacctcaaactcctgggctcaagcta

SEQ ID NO: 10070 - DNA, 6000 bp, Homo sapiens
tggctgagaggtggggacagactcttgcttccttaacagtggctttctggttgtagcctcgagtttggaagaaaacaaggcagtagtaaggaggaacaggaaaggaagaggctgatccacaaacacaagcgtgaatttaaaggggccgttcgagaaatccgcaaggacaatcagttcctggcgaggatgcaactctcagaaatcatggaacggtgagggggacgtgtgtgtgcgacacgattgtggtgtcactcagctttggtgctgtgtggccctgggcagagcaccgggcacctggcatcccacagccttggctctggctgggggttggagccaggcaggttcacttccccctgtttgaactgaacgtggccacggtggctaatgtggttctgatgtgggagagagagggcaagatgctctccaagaactaatccaaaaatgggcatttgccttttgtttcttttagggatgcggaaagaaagcggaaagtaaagcagctttttaacagcctggctacacaggaaggcgaatggaaggctctgaagaggaaaaagttcaaaaaataaattacattttataaataaggcaaggaactggacattacctcacatctgcaattccaaccctctgggaggccaaggcaggaagattgcttcagcccaggagttcgagaccagcctgggcaacacaggaagaccccgtctctaccaaaaaaacataaaaattagccaagtgtggtggcacgcacctgtagtcccaactactcgggaggctgaagcaggaggactgcttgagctgagtccaaggttacagtgagccgtgattgagccactgcactccagcctcggccacagtgcaagactgtgtcgcttaaaaaaaaatttttttttttgagacggagttttgctcttgttgcccaggctggagtgcaatggcacaacctccacctcctgggttcaagcgattctcctgcctcagcctcccgagtagctgggattacagacatgtgccaccacgcccagctaattttgtatttttagtagagacggggtttctccatgttggtcaggctggtctcgaattcccgacctcaggtaatccacctgccttggccccccaattataggtgtgagccacagcacccagccaaaaaagtaattttttttagagtaataatgctataatgttggtgtgattccaacctccagctccccccacccgctgcctgcggttttgtttctgttaaaacgtcacctgatgaaatagaatgaatcctgaaatgcacctctgggatcgggaatggtctgtgtgttatcagctgcgactggttcactgcgtctggacaagcctcatggggactggggattctggccagtgtaatttctgtcaaccacggacgtttgccttcatgtgtagaatttactgttgttatgcaaattatattttcaattataaatgaaacaagtttgcagatattttagaaatcagagaagggaaacatcacccacagtccctctgctggaacagccacagttggccttgtcctacttacgtccttcagtggatgcttctgggtgctggggttctccattcaggacactgcactctcggaggtgggaggagactgggttgcgtctgtgccgacctgggatgcagtttcaggtcagaatcagaagatgtgcaagttacgcatgacacagctttttaaagtgcttttcccctgcactaatcaagagggaggtcagccctcaggtgtgctggacccgggagggactgtgagctgtaagaagtaacgagccccttgaacttcacaagctggccagggagccatatcccgaatgccactgccacttcctcgtggtgcaaggcttgttgggacctgccaccttgctgagggaggtgctgaagtaggtggtttccctgttccaatgcggtatgcggtcttgcaggccgaggcattccccaggggatgacggagcccccgctgggctacaagccagggcaaacactgaacttgtgtccttagccggcatcccaggaaagaaggccggggtcaagttcacacctcatgagatcacagtgaccagccctgcccaggctgccctggtacgtgcctgaagcatcgcggaggtcacatctagccacggtgaccgtggtgagatgtaaggattaaccagactacgactggggaggtgaggaaggtgacaaggacccagttccagcttctaacggggtgtgggatctttgagcaaggaagaagatgctagggagaatgagtctggctttgttcttgttgggaggtgttcaagccatggctggaccagagcatgagccatcctcagtgtgagaggcagttactgccgcggttgggctgcctggtaggcctggagctcaaaatgagtcagtctctctctggaaagcgcaagacagagacagcgctggtggcagctgggctgaagccagcagcttggagatgaggctcaggccctgacgggggaaatcttacccagcctccccagatggctcagagacaggtctggcaggtgcacggatccacaaatctagaagagtctggggttgtcacatccaccaactaggctggctgtctatatacactttgtcactgtgtaggcccaggatttcacccatctacaaattttctctgccacacggctactgccactttaattcaccaagccaagcctttgcactcaggaccctggcccaaccctctttggccaagcaaagaggaaacgagaacaggacagaaaaaaaagtgggaccggaccaggcacctggctgtccattgaggccttgctatgcgatccaggacggaaggtgccggcagcaagctcatacactctagctgcgtgtcatgtcattgaagagggcgcgtgatccagctggaagggtggataaaagtgtaactgcccagtgggttcaccttccctgttacctagacagccaatttatcaagaaagggcatttgcaacagagaaaaggtaattcacgcagagctagctgtgtgggagactggagttttattattactcggtctccctgagcatctggggtttggagtttttaaagataagctggtgggtggggggcagccagtgagtcagaagtacccattggtcaggtcagagatgaaatcacagggagtcgaagctgttttcgcactgagtcagttcctgggtgccacaacatcagatgagcctgggtggtgccaggtgacccaccaagtgctgatcttaggctttacgatggtgatgttatcgccaggagcagtttggggagggtcagaatcctgtagcctcccgctgcgtgactcttcaaccgtagtttctaatcttgtggctaatctgttggtcccacaaaagcaggctaatccccaggaaaggtttcctttgggaaagggctgttatcatctttgttttaaactaagttcctcccacagttcaacctgcgtgcagcagtaaacaaggagggcatggaggttagaagcaaaatggagctggttatctcactgtcggcaaattttgcaatggcagtttcatagagatgcctgtcctctgggaaaaaagctaataacaggttgtctttttggctgcaggtggaaaactgcatctattaggaagaggtggggctttgttcttacccacaattggaagttctctatggagtaaaggcggtatgtgtgccacctgattcctttccccatgtgtatctggttagggtcggccacgtgagatccgcaagcattttagaaggtgggaggggaggtgggagctggctacaggccaggcgttggcgtggttccgtgagtgtgctccagccaggcccaaagcttctcctgcccagagggaccgtttcctccagcgtgggtcgggtgcttctgcgcccggaaagagcgccagctcctccttcgggtgacccagggagcggggctgcaggcaaaggcgcaggcggccaaaaaggtgccaaccgggtcctgtggctttcagttgtctctgcccacccaattcacaccatctttccccctcagccgcctgtcctgggacttcaggctcagcaccaaacgcagcaaaagtaggtgcacagagagcggggtcagctcacgcagcccgagcagaatggctgtgctgccgccccaggcccgcggccaccgctgtgtgtgtggcaggagtcagccccccagcgtggggccccgaagcccgcggtccttccacggggagggccaggcccgcagggcgcagacgatgggggacaggctgcgccagcgctcgcctgaggccccgcacacaaacctcaggcccatgggtccgctccgcggggcaggcgtcgtgggcccaaggaggccaggccaggagtctcggcctcggggttacgcggcggcgggcagctcttccgctccgctcagggtgctgctaacccacagccaagcagcgacccgcaggaccggcgagaaccccgccactgactccggccggaagagaacgtgcagagatgtacgtcacttccggggcgtggcgtggccgggcgtggccgtcccgcccctggcggcgtgcctggtgccctgttccgcgtctgtgcgaccgtccgtcccgagcgcgcagccgcggcaggtgcggggcgggaccgggggcgcccggggtggggggcgtagggggcgctcgggttgggggtgggacaggggacgcgcggggtgggggaggagacgggacccggggtacgcgggggtggggcgggtgagaggtgcgcagggtaggggagtagggggcgcgcggggtgtggggctggaccaggggcgcgcggggtgggggcggtgggaggcgcgcggcgtgggggttagagggcgcgcagggtgggggacgggaccggggacgcgcagggtggggggcgggaccgggggcgcgcggggtgggggcgggaccgggacgcacgcgggatggcggagtgggaggcgcgcggggttgggggtgctcctgcgtccggtgtgcaccccatggcccccgccagggagaccgagtccgggccaggggccggaatcgcggggcgcgggccggggctggggttggggttgggatcgggatcgggatcgggatcgggatccgggttccccgcggcttcaagttttctctcgctgttacgagggcgtgggaggcgcggccgtggggtggggtggggccaggtccgcgatgtgctcaccctggtctctcaggaccgttgcctttgcggctattttttgtgcaatccccgaagcctgcgtttcctgctgcctgggttcggggcgggggcatcgcgcaggccagaacggcccctgcgtccgtaggccagagcccctgccatcagcccctttagggtgctcgccggctgtcgggtgtgggggtatgccaggccccggaggactcggcttccccgctaacccgacccgccgcaccccacccaggccaggtcagagcagcccaccatgggatggggagggggtggaggctgcaccccgcgcccacccatccaccagcagccgccggagcgccgcgtggtcaccgttgtctttctcggcctcctgctggacctcctggccttcacgctgctgctgcccctgctgcccgggctgttggagagccacggccgtgcccacgtgagtccttgccctgcggcccacagtgccccctgccccccaggcccatcagacctccccagcccttatcgtgattcctcatcccctaggaccccctctatggctcctggcagggcggggtggactggtttgccaccgccatcgggatgccagtggagaagaggtacaacagtgtcctgttcggaggtatggctggctctgtgcccttggcgggctctctacggtcctatgtttggtggacgtggtccagcccaggcccctccccaattctcggtccttgccttcccactccctgggctggcatgtctggtgcccttgcccacatgtcctggcttctgggcatgatcccttgc

SEQ ID NO: 10071 - DNA, 6000 bp, Homo sapiens
cataaaactgctacttctggaatatttcttaaacttgcttgatttgtctaaattgagctaaagctgtaaggtctggctgctgggctccctgaaaccttgcacatatcttactgtatgactgtatttcgttttgagtctctggattctggggtttggacagatgaccatagtgaggcctgcagaaatatgcatgtcctcagtgattggactgccagctgcaaggcagagccaaacccaatatggccccatcatccctggctcagctgtgctacctggccatgctggaaggggtttgatcttccaggaatttgcttcacagctctttcctgtcccaagatctatgcctgatgtgtaaattcaggacccaaaagggcacaaaaaagcaataactactaaatataaggaaaacaactctgtatacagcatgtataaagaaaagcaagatatatttggggagataaaagttgtaaaggcattaagatgtgtgtttgttgagaaaaaataaatttgtgcatttaagaagttaaaaaaaaaaaaaaaaaaaaaaaagagtgccctggcagaggaggaagtccattcagatggctggggggccctcagaattttatttttggtttacaaaaagtttaggatatgggggacgttgctcatggctggtcaggagctcgagagtggaagggtttgagggaactggggatgggggaaggggtctgagaaggggatttacagagctgtctggggcaaggggtggcctggggggactcgaactttccatacagagggagaagcagcataatgagcttcatcctggggtctacagtggcagacagtggggaaagcagtgacagggagtttgccagcagaggaggcagctgagggtgtcttactcaaagaccctccctgaatgctgggagctgggaaggggttggttttgcccaagcacatggggtctcacttgtcttcaggcaatggtggctgcctgaggatagcggaggctcattgccctaggccaagtgggaaaactgcctcacccagaaggtcacaccctcccccacaacccagtgcctgattgatgaggggagggagaggagacacaaaatggtcctggcctcaaggcagggacagccgtgaggtgcagtgctcccgagctccccttcatccaaccaggctgaagcagtcacagccttgctcagctctctgcaccggctctctacccccactctcctttcctaggagcacccctccataatcacctccacaggaattccatctcagctctgcttccaggaaacctgacccaagacagaggttgttgcaagggcagaggccacaggcatctacaccagcctctgtgcgttcagtctgtgagcggcccaacgctgcccatgtgctcctccttaaagcctactcaaccctggggtctacaggcaaattcctcgcgggcaccttcccttgtcctggctgccgctctgcttcctttgcaagctccttctcgcacccttgcgctggctccctccagagggctccatcccctgcccactgtgccttcgtgggtggtgcccagatctctgtctcctctgccctggacccctctgcccctgactggcagatctatagagttcagtgcccctggagggctccacgtccatcccacagggacccggactctcatcttcctcctgagcgtgctctccctggagacctggcattggaattcgccctgccaccttctggtctccccaagtggaaacctgggcgtcagtctggacgcttgtcaccaaattctgtcccttccaccttcacatggcctctccatcttcactgcctccgtgtctctatctcatcccgatcaccttcgcctctcctctggcggagagcaccagcattcccactggtctctgcttttcctcaaacgcatctctgtgtaactctcccctcaggatcactctgtggcccccattgctctgggtggaatcttccttccagtggcgtttcagtcccctgggtctgcctcactcttcaccaccgtcttgtgcttctgcactgagctccagccagaccacctgcctgcagccacctggcgctacctgttcccgtgtgcttcctgcctttgcctggagagaataacaatctatagtccaaactcaaggacaaaaacaaactgctttttggccgtggtggcatgaaaccccaataagtcaatgacaatgctgcatgcttctgaaagccggccagtcagggacagccccacactacagaacaggcccaggcagcaagaaccttgtgcccctgaagtcaggctgaacactctcacttctgaaagctggacaatcctcaatgccaggcttcccaagagactcaatttgttttgctctgagagatggtcctataagcacagttccccttttctctcgtaagcaagatactcagcttcagcactgaccagcctcacaatccgtcctcaccaagtggagggccctccctccgggttcctccacggccgtatctgtctctgttcatacaccttcccctcagcacttagagacacgggctggcatggcgggtgctggcggcaggggtgagaaataaactttcagccctagaggaggagcccaagaggagagcatgccgtcacctggagtctctggtatgtgcctggcacctgtactgattgcattaaccactgtgattttttagaagatgtactagtttgaaatgtataatacatacggagaagtgtatgaaatatgtacaatttaaagataaggaaaaatgcatgcctgtgtgcccaccacctagtgaagaactacaacctggacaccactttggaagcctgtctgtgttcacccgtcgcattctccctcctcccccagcccaggtatcctccatcctttagccatcccctgactttctttagtttcattgcctgtgtatgcagccacgaataaaatattgcttagttatctgggaaaccgggctgtataggaaaagggctcttagaaccccacaccactgtcagatgcaggatcccagaagactctgctcccagtccagcttccaattcctgtgggtttataacgggcctttctagagacactgggggcaggattcacagagctggaacatttgcagttaggaccacattccagatgaccaacagggacatgcttgggggggataggccaatttggactatccccttctaagcccaccaagacctacctgtagctctcaggagtggggtcagggcaaaacatgtatgtggggtaaaacaggtgacctctgattctaggcaccaggagatggagagaagagcaggaacgagggaacacaaggggaaggcaggcacaggtgagaatctaggccaggctcacctggccattctgtcctgaggcttaaaaacatgcaatgatggcaatgacagcatttgatctgtctctggagtcacttcgcatgaggtcattctccctccaccaccctcctgggggattcctttacctcctctcccccatacatcccatattgggaacttgtgcttccagctaagatgcagtaacagactgaatttaccctcttgcctgaaacaactcaacagctggaaaaaaagaaatgaaacgatggctctgaaaatactagaaaagcagcacaggacagaagcagatcaccttgattccagggacctgaaatcttctctggaacaacacaagatacaatttaaatgtaaattagggtaggcccagtggcccacgcctgtaatcccagcactttgggggaccaagacgggagggttgcttgagcccaggagttggagaacagcctggacaacatagggagacctaatttctaccaaaaaatttcaaaaattagctgggcgtggtgacacgcacctatagttccagctacttgggaggctgaggcaggaggatcgctttagcccaggaggtcgaggctgcagtgagccatgatcatgccactgcactccagcctcgatgacagagaccctatccccccacgcaaaaaaaggaaatgaattaacattaattcctctcaagatgcccaggctctattcaccccctttgtcattgtccctccagttggaaattcctccctccccccgcaaaatcccgcccacccttggaggccttttcagatcattcttgccagatgagctccccttgtcccttctctgagcccaaaggggcccagctgctgtctgtctccctccttccccttgtttcccgcgctacctccagggcacttcccaactcactggccaagcccccaacgagcggtctatgctaactttggctctgtgaatttcctagagtgtcatgggttggggaaaagcgcgcgaagtcctgccttgcagcaggcgcgagagcaggcgcttgggacgcgggttggggcaggggccccgggacgtagggggacgtctgcgcggccctgcgtccccgggacaacctggcctgggcttacccacggccaggcgctccgcggagggcagaagcgggctgggccaggctcctcagcgccaggcccgggccgcagtgccaaccccgcaacggcactggacatgcaagagtcggcgtcagtgcgcgtgaagccggagcattatcaggctcagccaaacgcggcccggttcttgggctttccgctctttctgtggggcagagagggaaagaggcctcgagtcgtgcgggctccaggctccgggctctgggtgaggcctgatccctgctcccacccggccaccctcattctccagttgtatcccctgccagagtctgcagcctcgggccgcggcgtggttgcctgggaaacgcttgcgcctgcgcagggcttcctaggcgctggagtccgccggcggcctcgccgctgccggccgctcacggaggaactacaattcccaggagaccgcgcggtgggtgggggcggggtagtgggcggggcatcggcaggctaggttttctccgcgcagcgccagtcgcagaggaagatggcgccgcggagggtcaggtcgtttctgcgcgggctcccggcgctgctactgctgctgctcttcctcgggccctggcccgctgcgagccacggcggcaagtactcgcgggagaagaaccagcccaagccgtccccgaaacgcgagtccggagaggagttccgcatggagaagttgaaccagctgtgggagaaggcccagcgagtgagcgcggcccgcggtcggtggagcggggcctgggggcgggggccgtggttggggtcgttggagcggggcccaggggtcggaggcggaggggggcgcagccggggcacctgtgccctacgcgccctgtccttggcacagcctcccccaagtgtcaggtggggcgccccgaccccttctgcagcaggaaaggtacccgtgccggcgacgacgccgtgtgaagcaggtggcggccggcaccccgagggtcagtgtcgccctccccagcctgggcggcctgctgacccgagcgtagggacagaaccaggctagatcacaggtctcctgcctcccgagcctttgcctgttccctcaaccttatctccctatgtggggaaacaagaaaaacaaaatgttgggtagaaagacgtgtccagggacagaaggaatcccagtagcaagcccgtgcttgttcatttgagcgagaaatgaggaggtgaggagatgggatcggtttagagcacataaaacgcgaccttgggaatgctgaaagtcagtcttaacagggcgctcacctgacctctccttcatttgagagatgagggtacggaggccccgaggggaaagggcacccccaaggtggctcggccggtggggccccccgggacaacagcttcctaattggtgcgtgaccctgggccagctgctctcttcattaagatacggttgcttcatttgttaggtgttcctgaaaacacctgaaatgggtgttttcgaactatgccgaccatctgggcctcattatctcatctcaaatgcag

SEQ ID NO: 10072 - DNA, 6000 bp, Homo sapiens
atcacctcccaccaggtccctctcctgacacatggggatacaattctgatcacaatttgagatgagatttgggtggagtcacagccaaaccatattacttcaatgggcggtggggggacaaaggccacacctcaaagggctggaccacaacaacctcctgtttgcttcctgcctttccctcgcttttttttgcacatctgtttcaaagctaaacttctgggggagctgccggaagaaacccaccttgggccgagttcagtggctcatgcctgtaattccagcactttgggaggccgaggtgggtggatcacctgaggtcaggagttcgaggccagcctggccaacacggtgaaaccccatctctactaaaaatacacaccccccaaaaaattagctgggcatggtggaggacgtctgtaatcctagctacttgggaggctgaagaaggagaattgcttgaacccagaaggtggaggttgcagtgagctgagatcacgccattgcactctagcctgggcaacaagagcaaaactccatctcaaaaataaaaaaataaaaaaaaagaaagaaagaaaaaaaaaagaaaaaaaaaaacaagagaaatccaccctgaattctttatctaggttccctcttgggaacaaaagcttcttctttgagcttcccacccctagagtcagggtcctttccagagtccctgaggggggaaaaatggttttcaatgaatttcattgagtttacctcctaacgtgaaggtatatgtttttgaaggcctttcctcttgtgttataaattctaccctgccatggtcacagtcttccaaggtttctgccactctgtccctgccagcctggtcttttccattggttaggtttaggcacaactgttctttcctctccatgcttcattcactgaggaataatactgttacgatggtgagtggagaatacatctaatattcctgttttggtagatacctagatatgggttgtcatcaatcaggacaggctaattatgctgcagttaacaaacacccacaaatctgtggacaattctcaatcttagtacatgtctgtgatggttaatattgagtgtcaacttgactgaaggatgcaaagtattgttcctgggtgtgtctgtgagggtgttgccaaaggagattaacgtttgagtcagtgaactgggaaaggcagacccactctcaatctaggtgggtacaatctaatcagctgccagcatggccagaagaaaagcaggcagaagaacatggaaagactagactggcttagtcttctggcctacatctttctcccgtgctggatgcttcctgccctggaacatcagactccaagttcttcagctttgggacttggactgtctctccttgctcctcagcttgcagatggcctattgtgggacctcaccttgtgatcatgtgagtcaatactccttaataagctcccctttatatatacacctatcctattagttctgtccctctagagaactctgactaatacaatgtccttggttggctatgctccatgtcatctttacttaaggactcaggctgatggaacattggaacattaagggttgtcatagcagagggaaaagagcatcgtgaatcatacattagctcttaaatttgctgcccagaaattacacgttggttttcactggcagcctacatctagtctccttgcataggtgttgctgctgtagtgagctatatttaggggtgccaatacagttgatccttgatgactcctccacccctcacagttggaaatttgtgtataacttctgactccctaacatcttaactaataatagcctactgttgaccagaatccttatcaataacataaacagtccgttaacacatattttgcatgtcatatgtattagatactgtattctttcaataaagtaagctagagaaaagaaaatggtattaagaaaatcataggaagagaaaatatatttactatccattaaatggaagtggatcatcataaagtaaaggtcttcatactcaccatcatcacatcgagtaggctgaggagcaggaggggtgggtcttgctgtcttagggatggcagaggcagaaggaagtccgagtattagtggccgcatgcagttcaagcctgtgctgttcaaaagtcgactgcgtatttttcagaacagtgtctggcccactcaatgtttgctgaatgcataaagaaaacaaaatttgtatactacatccaactgggcagttgtgtgctacctccaacaggccaggcatggtggcacgcgcctatagtcccagatactcaggaggctgagccgggaggattgtttgagccctggagttgcagtagtatactctcacaacatttctgcacatccttttaacccacatcccctctcagctttatggggcttaatattagtcaactgtcaactgaagtcactttgctcttttaaattaaagagtaaacacaaaatgtaaaaagcacaaccccatatcccatggtctgtggaaagttcagcagcctcctcaagatctttgtgacttatttaggaattttatgtacttgtggtcacttgtggatttacagcctgatgttttgagctcacttgggtcttatatccaccacaatcttctctgctcttgcaaatccagacagaaaacttagatctttgtccctacccttctacccaaaatatccaactgcaccaaacacacggtttacacaaggcaccactcactgaaggcttggtgtagttcagcctccctcccactcaaagatccttcccagttacctactttgtactttcccggccccctccctgggttctggcttctcttttcttccccccaattcaatccccctcactttattatgcagggcaatctctctttccttctactctaccccaggcttaactttgcatggccaaaaactgattaatgtctggattaaacaaagggccatttatgcaagatagaatcattggcagagattttgtaatttctttctcttttcctcagtaggtggaagaaagctgtatggaaatttattttccttaaactgcaagaagtggctacagtttgggtttaaataatcttttcctggccgggcgcggtggctcacgcctgtaatcccagcattttgggaggctgaggcaggcggatcacgaggtcaggagatcgagaccatcctggctaacacggtgaaaccccatctctactaaaaatacaaaagaattagccaggcgtggcggtgggcgcctgtagtcccagctactcgggagactgaggcaggagaatggcgtgaacccgggaggcggagcttgctccagcctgggcgacagagcaagactccgcctcaaagaaaaaaaaaatcttttccttcctcctttctggtaaatatatactttcttgacatctatttctgataaactttatttttttaacacagtggttctcaaacttttggtctcaactcttttgcacacttaaaaattattaagggctctaaacaattttggtttatattgacattatcgacatttactatatgagaaatcaaaacaaaaacttgatgtttttgaaagtctttttttggagtctggcttaatagaaaacagctgttctgcatttactccgttgcaatatcacagtctccagcaaactcaactgtatgcaactcataagaaaatcagagcgaaaaggcaaataacatcttagtattgtgaaaattttatcttgatgaccattaaaactgctgttttaatacatattctacttgtgcttcctctttatgaaaaaagaaatcttgaagaaatcaatgagattttgaattaaaactgaaccataggccaggcacggttgcacgtgcctatagtcccagctactcaggaggctgagtccgggaggatcgtttgagccctggcgttccagctgtagtgagctaggatggcgcctctgactagccactgcaatccagcctgggcaacatagtagacccccgtctcaaaaaacaacacaaaacagaacatgaacctaaaatgcagaagaaactcattgattgagttgtcaattttaatagctatggctcaagacggtacaattaaaaactatgcatgaaggatgaagagaatccagcggcattagggccactctttcacctttgtctccatctaaacttcctattcatccttcaaatctctgcacaggtgacgccttttctctaaagcctcttcctttaccacaaataacagtgattataataataacattattaacgattactaccatttattggccacttactaggagccaagcaacatcaaaacacagcacgcgtcagctcacttaattttcacagtaaaccccgaggaggatgctggcttcactttaaaaagaggtgactgaaggttggagaagaaaggcctctggcctctagctctgtgccttgcacacctgatctgtctcagcatttattgcatcccgagggtcaccgtccacgtgcctctatcctgctcaaggtgagttcttgcagtcaaaggtcaagggtggctcgtctccacttcccccgcaaccaaaccgcccggtctcagtgagggagccgccagaagggaaggagcctcctagcttcccggtcctcacgctcccggagcccacacgccccaaacagacacagaagagctcgctgagctctccgcgcagctaaaccctccaagctttgctgggagaaaccgatgcccgagagcgcgtcgcgaggttcctcctccgccaggtgcgccggctgaggccggaacctttttcctcccgccgcggtagcagggcgcaggccggaacctttcttctcgcgtcgccgttgccggggggaggcgtgtggggcaggaccagtccttcagcggccgggttcgcgccgcggtcgccggctgcttacgtgggcgggcctagtgtggggctgagggtgcgggtcgctatggcggtggacatcacgctgctattccgggccagcgtcaagaccgtgaagacgcggaacaaggcgctgggagtggcggtgggcggcggggtcgatggcagccgggacgagctgttccgccggagcccccggcccaagggcgacttctccagccgggcccgcgaagtggtgagctggttgctatggaaacggcgggttgaggagggggcagtcctgcgacagggaccccgggccccaaaccagaccccgtcccgtaagcattgtgtgaagggggtggctctaagggggacagaagagttggcctcagagaccctacagctttttgggggaaggaacagccttattttgaggaagggggacgcatattggggaacagatttctcctgcggcgacagggattgggggacaagaaaggagatcctcagaaatctctatctggaaagtgcatgggcggctttgtgaggtcatgagttcgccgtcactacagacttgcactcaggggaaacctcctgacagtccttcgcttcctgttgcagcactgaccacaccatatttgcctgttctatttacttgtctgcctcccacccctagttgagattaaaaactgtattcagccgaactctttcttccctttgtctctgcaataagtaggactcagttcctcttgagacgggtttagggtaatctttcgcaaacacagtgttacagtcacctcaactactttctgttccctgatcagagcaggtgtcccttcatctccctgggaacaggaaccttttccttaagggcagggacagtgttgttttcatctcagaatgcatgactcatagcattgcttagtaaatgtttgttgaatgagtgaatgaacaaatggctgtctttcccattaaacagaaaactccataaggggagagctgtttgtcttgttcccttttgtgttcgtgacaccaaggaggtatctaggttttgtggggcctacagcttatatagttctgtctgccctcttcaagaaata

SEQ ID NO: 10073 - DNA, 6000 bp, Homo sapiens
ccacagtggagggtcaacggctattgcacgcagccaaaaaaaaaaaaaaaaaatgcaagcagcagcaatataggcacattatttagaaatgggaagtaaattcccaaaataatcagctgaaagagttaacaaggccactgttgagaagtagaaaatgggtggggctattgctccttttgaactaatactttaaattatgtgcatgaacaactttgatgtaaataaaacaggtttaatgatgaaataagttaaaataacaaaataaaacaaaaacagcaaaaggaaagcaatgcaagataaaattgtgacttggaacagaggaggagaacaaacagtgcctacaaagcagggaagtacctgatctagcgtggaaggttaaggcttccctagttaagaaggtgatctctctgggtcctgagggctgagcaggatagagtctaagaaaggaccgcgcaggcggagagaacagatgtgcagaagtgcagaggtgtacggggaacagcgaggtgtcttgagtggctggagagcaggatgaggcaagtggctgggcacctgtgcatcagggtaggtgctcaggggaaggtaagccactgtatgcaccatgctagaaaactgggcattatctttatttatttatttattttttagatggagtttcattcttgttgcccaggctggagtgcaatggcatgatcttggctcactgcaacctccacctcctgggttcaagcgattctcttgccttagcctccccagtagctgggattacaggcatgcaccaccacacctggctaattttgtatttttagtagagatagggtttctctatgttggtcaggctggtctctaattttttttttttttttttttttgagacggagccttgctctatcgcccaggctggagtgcaatggtgcgatcttggctcactgcaacctccgcctcccaggttccagcgattctcctgcctcagcctcctgagtagctgggattacaggctcctgccactatgccagctaatttttgtatttttagtagaggcagggtttcaccatattggccaggctggtctcgaactcctgacctcagttgaacagctcgccttggcctcccaaagtgctggggtgacaggcatgagccacagtgcccagcctgggcattatcttttgcaggcagccaggagtcactggaggtgtttaatcaggagaatcatattgtctgacatacattttataaataaaaactagagggaggagacaggaggaaaagaatctcattagaaagaaggttgtcgcaaggatcacatcaaactgtaacaaaatcctattagtcctactttgagccacagacccctccatggctgccaccctggtctgagccaccatcaccctcaactgactagctgtgcaaacccagatggcttggttaatcccggtaagcctcagctgactcagctagcaaatgggatactaaccaccacctcaccaggtagcagatacttaaggctctagctttggggttcaaaccaactagggttgaaattcagtcccactgtttactcatcgtggcaccctggacaaacacccttgcagagcatcccctgcctcactgtaaagtggggataatggcagttcctccacctcatgggctggaggataaagaaccagatgtctataaacattgcacaggacacccagccaagtctctgtgtgttacttccctttctctctccatgcaacaagccagcatctcttagtgtctcttaatcaccagcaggatctgacaacccccaactcacctacgagcatcttgcattatctcagtttcagccctcatcagctctttgcggtgtaatgctccccatgagtcaccaaattcccctatattctgaaagagcctgtgcctacatggaaaccgcacaagatctgtctcatcttcccacgggccagaaatgggggtagcaagaccacgccatcttgtttctgatcgcgcagactttactctcctcccaccccaaagaggcagaagttgcaaggacctaaaatagtggccataccactattcatggaatgcctgctatatgccaggtgttgccatgcacagccaattccatgagggccacttgcataggaagcatccactggtctccttcaggcagccaccccgaccctcatccatgaagaacacagtggctttggggttagacacttctgtcactttagtaagttgcttaacctctctgtgcctcagtttcctcatctgcaaagcagagacaaactgttgtggagattcattgagatcatttagggagagggtctagttcagtgcctggtacacagcacttaataaacgctagcattgccagcgtcccatcgcagactccccatgcggtgtcataaccgatagtttacttgcaaacttgcaattcgtccttctccttgaggttcacagcctcaaggcagggtctctcccgctcatgaatgtcgtccctaggccagtgactggctgtagaaggtgcctgaaaacttttactgtggggtgaatgaaaaaatgaatgccaatgtggcagctgggactcaggccaggcgacgtaacccacaccgcaaggatggaagaggcagaagcaggaataggcattcaggcgtgggagccccagccgtccttctgtccaccatggcgagcagggccagcgtcctgtccaaacccttggtgctgcagatgaggagaccgaggcgtggcgcagttgggctgctgtcaaggatcacccaacggagtgggatgtaacaggcaccgcaggggaccccaggccaatgccctttagtcacgccgccacctccctcctggagcagaaggggaacccgacgcctaagcggttgcgtgcgaagttcccaaccaggctcaaggagtcgcagagccggggctccgggcccgcaggacccagaagccacgcgccccgcgctccccgccccgccgctgtctgctcggccgacccacctggtgtcgcgtgcgctggcggcccgcgcggcagccaagccaaaggccgaggccgaggccgagcgcggcgcccagcagcacggcgggggccagcagggcgggcgccggccgcagcgcgtcccgccccagcagcagccgcgcgtcgctcttgcaggccgccccgccgcgggccatccggggcgctcaggctgccgccccgccgcatcccgccgcctgctgcaccgtccccgccagggcggcgacgcgggacttggagcccgggcgggccaggggcgcggcccgctccgcagactttctggcctgtgcagtctcccgactcctgcttctctccccttccctgcttcgccgagccggagggaggagcctggatcaccgctcaaaactttcagccacccccgccccagccctgcccctgcactgagcatgcccagagacagacgcgcctcccagccccggacccttccggaggggggcccggtttccacccctttaactttactgaggcttagaaggctcctttaagttttttgaggcttagaatatgctacgcatttagcttaatgatctcattaactttctcaataaccctctgcggtgggtgctccgcccatcctcctgatgaagacgctgggatcaatgcaattccaaccccctgcccttgcccctaacctctacccatcaaccttcccgggaacacaccgccctccacgcctctgaacttgctcacgcgaagactcctgttttaatcttattttgtcccagggaaggtcgagacaatgggtggagacaccgttacactcagtctccactaggaggatgggtaaagggatccttacacccagaccccactgagacgatgggtagagagacccttacacctagtccccactaggaccaagggtagagagacccttacacccactccccactgagacaatggataaagagacccttacacccgctccccactaggaccaggacactgcaccatccttcatttactcagcacttggagagaatctgttgtgtgtgtgttgcaggctgggggataggccagccacaaaccaggcagtgtccaggctagtgagtatctcacagttgtttagagtgataaaaaattaaaggagttcatcactgtgtttgctttaaacaaacatttatggggtagctactagatgtttgcttttgtcctgggtgcctgggtaaagcacacatgcacatgcacgactgcacacttgcactcaggggcacacacacacacacacctaccctgtggagcttaattccctgtgtgggccgggctaggggacaccatggggatctgcttcagcagaggagggctttgtcctttcagcctagatgtccagcttgtttctagtttgtttcatcatttcctcatggcaagatgggaactgttatccaaattcttcatctttttttaataaatgaagaaactgacagctggagaggagaggtgactcatttgcaattaaggagtggggcagaattcttgtctcatttacacctgtgtctggcttcagggcaaactctctgctatgtggagcttcttatatattaccttagaagcatctccaaggttcctggggacatgtatgggggcaataacttgacgctcttgttttacatttccatgaatgcttaggctttagtttttaaaatgtggtgtttgggccaggtgtggttgctcacgcctgtaatcccagcactttgggaggctcaagtggaggattgtctgagcccaggagtttaagaccagtcttggcaacatagtgagaccctgactccataaaaaatactaaggagattttttaaatgtagggttatttgctttttactttatcataaagttgttgactattaaattaacctttaaatgactgactgtcaaacaactccaacggtccagcaacatgcttggcatttagcctgtggtcttgtcacatgcctgacagctgccacgtaccccctggtgtggggaacttggcttataaattctcagcttctcgaaccccatggccttgtccatgttaggtcaggaaaggcctgtccttggatggtctgggttatggggagagaggctgccaggggccaggctcgctggcctgagactttatagacagcctaacagcctgccccgcaggaaggctggcgggagtggagccctcccccgtcaacaggtgtcagctgtcacccaggacctaggcagggatgaggaagcacacaaaaggctccaccagtccccctttttgtgtctttctcctcctcctcctcctgcgtcccttggcaaagcaaatccctgtcccctcggagagttcagggagagcttgcttagggctgcgacttcagacaccagctcccctctttctaggtccccagagaggtggcccagcggctggcctgtttcccactgggaatgcgaggggcacccgggccggcccagggctgacccacagcaggctcgggcagtgggtgctcagctggtctgcactgaacgcaaccggaagtgagggtccttttccttctctgcggccaccccctcctccccgagctttcctgaaccttctgggtgctccaggactcccggccccgcgctccaaatgcttctccgttttctaagcggggatggggaaactctggattcacatccgtgtgtcaggaaaccgttcccaggggaagtgcgtctgagctgaggcttacagacccaggtaggcggtagcggaggggcccttggggtcctggtaacctcggggagcaggggagtgacccgctctgattcggtttgggcgcaagcaaacccaggcctggccgccgggcgcctgggccgcgccaactcgctctccccctcccacgcccgtccggcacctcctggcccgccaagccccagatgcgggtgtttgttccagaaaactttcggcggcggctcgcactgagcatgctcggcggcggggcgggcctggggtccggaagctccagcgactcggcggc

SEQ ID NO: 10074 - DNA, 6000 bp, Homo sapiens
ttgggtgctcacagcttcccagagaggagcccctctgatgagaatgtttgtctttatagggagctgaaacctgcctctctaccacttccagggctcagggcacttcctccctaccacttgtgggctcagggcacacggggcggggaaagcagctttggcttcggaagactcgtggcttccatgctgcttgctgtgagtgagcccctgggccccaacctctcgtccctaatagggagatcttggtggtacctgaccccctgccccataggtcgtcctgagggttatgtagtgaccacgtggtggcagcgggggtgaattccttgtgaagctaagtacagacccttccaaggcctgggagagccagagctctgggttcatgtggccttgtgtttggaaatactttccaaaagcaagatattttagctgtaactggctaagctggctgccagggtttccaagacagggttccacagactgaagagctttaacaacagaaacttatttttcacagttcaggaggcttcaagtctgagaccaaggtgttggtttcctccaagtcccctctccttggcttgcagatggccatcttctcactgtgtctccacaggggcttccttctgtgtcttaatctcttcttataaggacaccaggcatattgcattaggtcccaccctaaagacctcatttaagctcagtgacctctttaaaggtcctatcaccaaatacagtcacattctgagctcctgggggttagggcttcagcactcaagttctggaggacacaatccaacccataataccctctgtctctttccctatgccgccctcatcatgcttcctcccacttcggagctgctgcggaggccaagggcattttggggatgtagctgaagggggattgagttggggatgccttggtttgggtttagtggggtgtgtttatgtaggtctgagccagtctgtgtgggtcgagttgttgctccctgaacaggctaatggctcccaggagtgccctccttgccatggcactggcaatgtgtgctatggtgcctggcaccaggagtctatgggcagaggaagagacataagggttgaaaatgtcattcttccaataggagaggtctggatttgcagaccctcagagtcacaaggcaactgggggtgtcgcatagcccaggactgctcagcaggagtcacctggggcatttagtaaaatgctgattcctagaccctgctactctgaggcttcaattcagtgggatgtggaggagcctgggcatctgcatttctcctatgcctctccaggtgatgggcgccagcactgaggtttaggaggtgttagtcgagtcatgttctggtttgcaattgttcagttgcttttcatcatgaaaattaataaaatcccagtaagaagcctggaagaaatagaattcttccaagtgttagcattcatttatgaaagaatgatagacctttctccaaatttgaaaacaatctcaaaaaactacctgagattaccaataatgagttatgaggctgacaaagttttccaaccaacattaaaatttgttcccatcattataggagtactctgaattatctattttctccacaggaaaaatattataaaatcattggcttccaaagaggtaatcaaaaatgacgaagaagcaaaaaatgtaaaaaaaagaagatattataaaggtggatatcaggtatccaattaatacaattttatattagttttataatgttttcgcaacgtttttgatatttgtcaacttaaaatattttaaaatttgttgtgatttgttattattctaaataagttttcatttttgtaccaagtcttgtactggggtttttaaattcttcttcctaagggggactgtagcggctccaggttttacaaaacctggatctactaaccaatagttgcctgttcaaaagtcattcttcttcttttcctcactaatggaaccctgactttgtttcaggcagcaatgtaccttcaattaaaaaaaaacatccttggccgggcgtggtggctcacacctgtaattccagcattttgggaggccaaggtgggtggatcacctgaggtctgcagtttgagaccagcttggccaacatggcaaaactccatctctactaaaaatacaaaaattagctgggtgtggtggtgtgggcctgtaatcccagctacttgagaggctgaggcaggagaatcacttgaacccgggaggcggaggttgcaatgagccaagatcacgccattgcactccaaactggacaacagagcaagacaccatcttaaaaaataataacaatactcccagcctcctctgaagccagggctggccatgagacaccgtcccagccaatgagataaaacagagctctctggggagagttttcaggaaagcggtgaagtggagctgacctagtgtgggtatgccttttgttcttccccttcttgactggaatagtgatgagatgtctgggaagaggcagccaacttgccacgtagaagacattttgaaaaagaaaattacatcctgagggtgaaggagtgagagaggataaagtgaggaacagcttgcctttgcatttcttgttaagagagaataaaaatctgtttaagccgctgtctagttgtgatcccgattactcacagccagacataacccttaatctacacacatgtatcgaagtaccaccagctgggctttttaaacaacagaaatgcactgtctcacttctgtaagctagaagtctgaaatcaggtgtcagctggtccacgctccctatgaagccctggggaaggatctgtcccaggccgctctcatggcttccgggggtttgctcccatctttggcatttccttggctagctgatgcctcgacctgatctctaccttcatgttcacacggcatgctcccgttgcttgtgtctctgtatccaatttcccccttttataaggatagaaggcagactggattaggaatccaacctactccattgtgacctcatcttagctaattacatctacaacgaccctatttccaagtaaggtcatattctgaggtcctgggagtgagcacttcaacatacgagtttttttttttgagggggtgggtggggggaacacaattcatcccaggatacctgggcattgtccctgattgtccctccctccctcctgtccacgtccaagccgtgagcatgtcctgccaattctgcacccagattgctctgatgcgctgatacttcactgtatcagcgtggaggaggcccccacactgcctccttgtccccactcttgactacttcagcccatgccccaagggcagccagggcatctgctaaagatagtctcacatctgctcacagatatcctagttcctcctgaccccctgaaccttagaggtctgcacttcctcctcttctgaagttaggcatggccatgtgacctgctctggccaatgaaacgtgagcagaagtgacgagagtcccttcggggaggaagccttcaaagccagcataattgtcacctttcattcacattgctgcaccatgtgggtgctcggctggcagacagccccagcagcttgggctcccaaccactctgatgaacagagccccattgaccgaggcaggatgtatgatgtgggcaagacacaccagggagatttgggtttggttgttactgtggctaacatagcttatcctgactgatgcactttaaaaaatatcaatctgacaatggtccatgggaccaccttccaggtgagacagtctccaaactctcgccagcctgcaagaccttgcaagtgctgcccctctgtgcccccgccccccatcttccacacactccctctcaccattctgtggcccagatacttttatcagattctcaaatatgtcccgttcacagcagtcagggtgttcccccatgctgctccctttggtgggtgctcttccctgccttctccttgctagaaagtaagctctggtgggcagccgcttcctctctgctgttcactgtggtgtccccacatcttagtgactacctggcacacagcaagtgctcaataaatatttgtctaatgacactgaatgaatgtttgcccagctgagtcctgcccctcccaagtctcagctcgacagcacatctttcatttggctatgacctgctgatgtggctttgctgggggcagcctgggctggtggggggaggctccctaggctggcatccgcccagctctgccgcttgctggctctgccgccgttagcgtgcgctttaacctctgaccttcagacctctcatgcgtacagagggggacatggatctccggggtcgctgcgtcttcctgaccactgacggccaggacggccccagccccgctttacctgcaagccccactccaggctcgagcccccgagggcagggatagcttcccgggtcccgaggcttgaccagagcctgaaagctcctgccgggggttgctccgactcagcgaggcgccaggctgcccggcgcggctgggggcgctcagcgccgggaccccagccctgccccggccgcccgctggcccagtgcgcacgctccggcagctcagctccccctcccacggcggcaggagagctcccggcatctgcccggggcgggggcgggggcggggcggggcgggcgccgcgccctcctgcctgactggcaggaagacagaccaatcggaggggctccccggggggaggggcggtgccgtgcctgagccgggcgcgggcgaccgagggagctgcagccacccgcgtgcggcacgcgccggccgcctgcccggatcgcggccaccagtgccgcggcctctcgactcccgccccgccgagccgcgcgcgcgactgccatcctcctcaattgctttttacgattttttttgtgcatgcattcattttctgttccgttttgtcctttttaaggcggtggcggcggcgacagcggcgtaagctcgcagcggggagggggcggccggaggatgcggcgcggggctgcgctcgctacgtccgctgctgctgcccggctcgggcctgagcgccgagcaggtgggtacaggtgcgccggggggcgggaggcgagcgctggccagagggaacccgtggacccggcgaccgaggggcggacctggcggcaagggacgcggcgaccggtgccgccccgccccatcgtccatctccccctcctccggccatcgcgccccctctgggtcccccttccactctcgcatcccacctcagtggtcccccacccttccatacccatcccccactcctcttcagacccccttgcaaaatctcccagccgctgcgtcgcttcccccaacaccccctcccggtcccgcccccagcccccagctctccttcacgccacccctatttccactcttctccggattccgccctcaagccaaggagcgggagggggacccacccggtgcctgccggagtggcgcggggggtgtggccggcccgtcccctccgtgtcttccgcagggtaggtcacagtcccccagatctccgcccaggtggcaaagaagatggagctgggggccgcgccccggcggcgcggggcccgaaggcgaggccgcccagcccgcaccccaccccacgcacggcacacgccgccgcggcccctgccacgcacaccctcgcgctgctccgcccacgtgggcgccggggaggaggctcgagagatgggaagaaaggctggcacccaccctcctgccgggccggcgcgccctgggcgcactggcctccggagatggcgcgcaaggattgactctcgtggtgccagacaccttgccgggcgccctgcgtcggggccagcggcctcgctggcctgcgtcagtgcgctgcggcctcgcctcccagcccctcggtccttcgctccatcccccctgctgtgggctcctgagcatccggcctgggcagcccagatagaggccg

SEQ ID NO: 10075 - DNA, 6000 bp, Homo sapiens
aagcaaactttttcccacagtagctaaaccatttcacatttccactagcaaagacaatcctatacaagggttccaatttctccacatccttgccaaaaacttttagttgatttttaaaaaaaaaatatgggtgacactaggacatttttgtacatagcccggggagatccaacacagagagataaattgatgatgcagaagaggaatgggatcattgcctgtatttaataatcaacaaggcaagtgtgggaagccctgcactcaaaaatagagaaactgaggacagaggagagcagggagatgcccaagcgaggatgctgctgtgtcctatcctggcatcccagccagagctcctcacagcaaacctttcgaagactgctccaggccacctcccctgacttgcacatctgagaaagcagctgtctaatggcttctttctttttctctttctcagaaacaataacaacaaaagttcaaaacctgaaaagtgaaccatgaagctcagtaaaaaggaccgaggagaagatgaagaaagtgattcagcgaaaaagaaattggtcagtccttttttttttctgtctcccttacatgattattccggtcacccagggggtagtacccctttcccctgggtcagtgggaggctgttaaggtgaagctgggcagagaaaagagtgagcagcagctgaaagccaagttctatgggaaggagccatggggattgtagagtgtctgggatgaggctcagaagagtgaaattgacagtcctgatctgctggtgactttctgggcttggggcaaaagtctccattacaaaggtcatttctcaacaaggggacattgatgttgacaatgattatgtcatcatcgttaaagatacactaaaacccaccccttaatccatcacaaagcttagtcgacctgccccttcctccaggaagtcctcagctcctattaatagaatgactttctttcttcttgggactcatcagatgctctttttaaacctgattcaagaaccaacagccagagagtgcctactctgtgctggacctttacatagggctctcatttaaagagagactctttacatggttctctctggatcaaaccatgctgaaggcatcactggccctattttacaggcgatgaactgaggctcagaaagggatgaagccacttgtccaaggctatgtggctagtacaggtttgagcccttcttaaaccttggattatctgtgcctcacctcctgtgatgggtgtggaagctactgtgactccagggaaaatttatttgtatttataataaacctgtatttggtaggacagagatcaacacaagtccatttaccaagttgtcaagaaggtgtgaaattggcaagctgaacatcattgtccccacagaggtgtgaaatggaggataagggtgcagtcacctgtttgaggttacccaagaccccacgcaagaataatgtcaaatagacagcagttccctctaagtggacgctatatcttttcttggtgcttacattaggtgagtcaaggatctactgtctaagtatttggtgtaatgaaggaagggatgtagtcatttcaaacattctgcttaaatgatactcaatagaaaaccccccttcttttccaactcttccctgctagaaaacttccaccttgtccaagacaactttttagccttaggaaatcatccggaggacagtttaaggtcagttccagaagtgatgcctatctactggaccctgtccctgagccaggctgaaggaagtctaggaatacaaagaggcttaggacactgtgggtttgctggggctgccaagacaaagtcccatagactgggcagcttaaacaacagaaatgtattgtctcacagtcttagaaaccagaagtccaagctcagagtgtcagcaggttagttccttctgaagcctcccttcttggcagaagtggctgccttctccctgcgtcctcacgtggtcatccctctgtgtgtgtctgtgtcctcatttcctcttcctataaggacaccaggcatactggaatacagccccatgcatatgacttcatttaaccttaattacctcttcaaaaaccctatctccaaatacagtcacattgtcaggtacttggggtgaggacttcaacatgtgaatctgaggggacacaatcagcccattgagacgcacaccatccctgcccacagtgagctcccgtgcagaggggaaggcacacgtgagcagcagcacacgtgcagaggggaaggcacacatggagcacagaggcagcgagaggttggggaggctgctgggaggaggtggcgagagagttaagtgctgaagggtgagcacagttcagggcagtcagaagtgagggcctgagcaaggtcaggagaacctgaatgagtaggagcttcataaagacaggcaagtaatgactgaatgaaggaaccagtgagtgtcagagcaggcagaacgtgccccagcccagaacatctggggatgtttgtcttatgacttcatctgtgataggagtcgcttccttagcagttgcctgcagtgcagggccgatggccctgtggaatggggaaccagccctcgctttggaggcaggctcctccatgctccccctgaacttcagttgccccgaaatgtaggtctgatagttcctctgaggactaaacgatatcatgaaggtgaacacacttgggaaagccctgtgcacatgtaacatgagctgtgcacatgtagtaggagctgaaggtgaggcaagtgctgtggctaccaggaaccctggttagctaccatctggatccgggagggacccatctccgctcttttactttctgtccagctgtagctgcacattcatgtccactgcctaatttctggttccttttgagttttcaaacccaacagaggactacgaagcaatttttaacgggatgaggggacacctgatccaatttgagctttagcaaaatctggtgaggtccccactgttacagatgaggaaacagggagggtatagagaggggagtcacagcaatgggatgaggaggggtaaatgagatgatgaaaatgcagtccctatcaggacagcataggggcagaggggccctccatgcacagggatgcagctgtccctgcccctcctctgcccatctcctgtacttcaggccccaaccatgcttcactgacaatttcacttcctcccacacactgcaggcatctgtgcctgcaggccttggctccttgtcctctcaccccgtatccttctctgtccgctcagaagccgcctcttccagcggggtctccaagatccagctgagattgatgtggtgcctcctccacactgtcctggggaatcctccgcctttttaggtcatgttataattaaggatttgcacatcagaatgctgctctaggcccaccactcaatgaggaaaccaggctgcatagctgaaatccagttcaagaaacagccacttctcccggggcatgcctgactgattaacacacagaaggacgattgcactgaatgactggcgtgctcaatacatccccaacctaactcctgagggtggttttcctctttggaagtcttgattccccacttgctttgagcagccacattcccaccaccgtgcatgtcagggccggacgtttccacgtgcgtttcacattccaggttcctggaatgtctgccgtactccacaccttttattttattgtgtgctttttactaaacgtactttgctaacttttcgatctctcttttgtggactgagccctaccttgcctcctggacgttctgcattcaccaagcctgtccctggctctggcccagactctgcactgctctctgcttctgggagcaaactgttctagccaaaattgaaggtgcttctctggcgtctgaggcaacatggccatgtgatgaactgattcccacaacctcctggtgtgcatgaggcccttgccttctcagtactgtccttgagccagcctggggctggaatacaggacatgtcccctcagccagtgctgaatgagcaggacagagtaacgactaagaggcaaattctttttcttccaaacccacagccctcgcctttgttctaggctacaggagagcccacactcatttacagcacgccacttggggctggctgttttctatttgagcttcagaataagtctgcaggacagtcagagtggggtcaatattccattttgcagtggtagaagttgcagctcagagaataaagtgacttgcctgaggacacacagttaaaaagtggaggagttggccagacatggtggcttacgcctctaattccagcactttgggaggctgaggtgggcagatcacctgaggtaaggaggtcaagaccagcctggccaacatggtgaaacacagtctctactaaaaatacaaaaatcagccaggcgtggtggcacacgcctatagttccagctacttgggaggctgaggcaggagaattgcttgaacccaggtgcggaggttgcagtgagcagagattgcatcagtgcactccagcccgggcaacagagcaagattcggtcaaaaaaaaaaaaaaaaagtggaagagtcaggggcagagctgtatgcaggcttctgagtcaaagtcagccacctctccattctgttccaagcattagggaggtatcctaggttaatggcagtcaccctgctccaggctttgttaccagagaaaaataaaaagatgctaagaaaaaaaaaaaaaattccaccccctgggtggcaatcctggagaggacagatttccctttttggactgtttcattgctgtaataacttaggagcagagaaaaaaatgttgccccgttgcctgttcaggcatgatcaaattgccacacttcctgtcaggaactcccgccctccttccagtggactctgcctcctcactcacggaaatgccttggcagagtctggggtccctggactgagccatcagctgggtcactgagacccatggcaaggaaacaaaataggaattccaaggaactgggcctagttcccctcacagatgacaccagccacgccgggcctccagggccagggagggcactgctggagtgtgaccacctgaggagtggggtgccaggtggaaggagaagaaaggtaactacggacagcttttctgcatggctggcgggctgtggggaaggcaggcctgggtggcagccgtgtgacagtgctcagccccagcctggcagcgtgtagctgggggatctggggctttgaggcagggaggcctcagtttgagttgcacttctccatctgtgtgactttggcatgctctctccaagccccagctgactgggccaacagcgtctctggtagactgggtgtgtacatggaatgaggctatggtggcaggctgccctgccccgcacttgcatggtggtgtccctcttctcaccctccccagggcatggcacgggcagcagcaccgtcggtcagtgggcaccctctgcccgtgcagtgagtggggagcgggtggagggcacaggcgggccacacaggcagggggctccggggagcacagctgaggcaggagaagatggcccccacctgcccttcaccagcctctggcaggggcacttcacaccaggtgctcccaatctgatggggtgcagaccagggaggagtttgtgtcctctaaggtcatcggggctgggagcaaagaaggcacagagcacagaaacgatgcccagcacagcccaggggctcagaagaagtggtatctgtgccgagactcagaggataggtttaaagagaaagagtgatagagaacaggcgtttcatctgaaatgtgattctgttccatcagggatccccattcagctcaagctcctctcactgcagaaaaatattctggtactacatttcaattggcagcacccatccccaaggcttataaatgttccctcttgcccc

SEQ ID NO: 10076 - DNA, 6000 bp, Homo sapiens
gaaaacttttttttttctgaagagtgtgaggttcccagtatccttgaataaggcctaaaagagcaaatcattaagaccgactcatcaaaagatcagccagctttggtcccaaaatctaaaatcaaagagagtgccacaattttccatcgccctgaaggtattccagcactcagcaggggccagtaatttgaacaaggggaccacttcaagcctgcaatactgcaatttttctaacactgatgtgtgtaattttggccacagtttaacacaggataacaaataaaagcaatattctatttgtctatagttgtttacataacaccatagactataagcttttttatgaaattgtatttactgtgcatactttacctaaattaactaagcattcctcctctgcaatatcatctgcacagggctaaattctccattagaagtcttaggcacactgcccagagcttatggtaccttgagggcttcccaaaaatgatttaatttcttctaaaaatcagaaaaagataaacttttagattaaagaagatatttaaataaagaagaaaatatactcacctttatactaatgtaatcataagatataattttaacttggcaaggcagggagcaggattcataaaggaaaacatcataaaagtcataactggacctcataaccacatatgccaagatgtgtcaaatttggtgtcataaagtagataatcttaaaaatcctgttttcagaaaagaatcactcaatttgtcatagatggatggattgttgttacatacacagagacaaaattgggcgttgggacgggatggttggggaggcatgagatgggtgagctgagttggaaggaacaacaatcctccatgttttatggctgtgaccctcatttcccctctcactagcggactgctctagctaattagcaaatcaaaagaaatagaaacaattctagacctcagcacaatcaaattagtggagttattcgaggatatcattttcacacagtgcaatcatgctctctttgttttggtcaaacgagtgaaaattatctttcaaacccaacgcccttccctctacccaactggctctgtggatagtggcatttcctatctgctctcataagttttacagatgatctttttctattaagacaggaatgtgcaatgcacaattaaacaatacccaacaagcttcccttttaaaaatacatttgacttttaaggtgattcagcagtaagagccattagtacctcatctaaatcaggacttggaaagtttattaaaattggatttttaacctgatcccaatttcctttgtggataaagagtcccactggagtctttaatattcatgctattaacctgaaagattcaaacagccatgatgggaagaaaggctatacagggctgcccactagactgggggttacaaataaaaccccattgagtctgagcaggtagactactgtggattctggacatcttcaaaagaagcaacttctctctttttctctctctccccttttcctgacctcccgtctcctattacatattttgtgggaaagagaaaaaccagaaaaatagcaaacataagcatattacttaattacatagagcactagactaggagtctagtttttactggaagggtagcttcctcctctagtgctctaatgaaatccctcaattataaaatagggaagtctgggctaataatctctaatattggttgagaagatgcactttggagtcaggtgagaactctttgaatatcagccctaccacttattagtatgtcaccttgaacgagtcactaaactctcctaaacctccgtttccccatttgtaaaatgaacaaaaggtgcagctcctatgattcattttgcatagtacctggcactataagccttagatacactttagctggtattattactgattattgcccaaactcataggtcagttgcttttgtttctatttcatgccttttcactccttgagcctttatcttctttagaacagtttacaactgtgttaactcatgtctgtgcgtgtctgtaaaggtaggctaggagtgtttgccttgtttttccttgagataagattttatgctctcttagggcaatggagatatcttattttttcatctctctcttagtaactggcatagtgttgtacacatactaggtgctcaataaagacttcgagatcttaaaatattagcagtacagagatcttccactaaaaccctctcatttttcagttgttggaactgataaaaagagtcttgggccacacaactgactgacagacacttttgcagtcaactactactgtgtctcctaacagcctctattctcatgcccacggctttgaaagggaaacatgtttgacttaaaccctgactccttgagggaagttccatttacaaagttttttttttttttttttaagagcatagtatgtttcagataccatgcaggattgtaggattctgggattcagataccatggaggattcatcattaaatcacgatacccaagctcaaggcgtttataatctattagagaagacagatccctaaatagatgtttcaataatgtgattgtgttgtcataggagagctaagctctggcactacatgagcttctggataagaaacctaactcatgaccagaagacttcagggagagctatttaggagcagtggcaaatgcctggacatacacataaaactaagtaagaacaaaatagccagttggtgtttttatttatctgaatgtaagaacatagattatcgatcaatgaacaattgctcagatttaaaaagaaatgaggaaaactaaaatgttagtcctcaaattcctgtcacttcccacatgtgccctgcagtcatttcctgcaaatggaaacttccaacaaaatctctgggctggagacctggggttccagtttctttcaaggtcttgtggtagggaactaagtgggtgagtaacctgcctttggcttccagggtgcaaacagaatcattgctaaccccctttgtgtctcacaatgggtaatgaaattcatactatggcaccaaagcactttgagctctttagaaaaagtaatcataccaacttagagcattaaaaccaccccgtattttgaaggactcatgatctgcactgtgcttggctgctggtggaagcttaaagacaccagtaattggcagaactttatcttagacttccatttgaccctcacaacctcacacatgattttacacagcttcctataatgggggagaaaagcccttcttttaaatctaatgttagtttaaatgctaaggctttcaaagtgggcctttaaagtcactttttagaatttgtatttttttttaacctaaaatagacatgccaacattattctgactaaaagaagtagacaaggtcattcaactcctaaaagcttattttccaaaagcacagttaggtctcagctttcagggtgcttctggctgtatcaaaaagacagaatatactggtcactgtgttgttttctgaaagtgccgagggtaatctgtgtatgagttaaagggccaatttcctataggaaccttctcttagatgggatttttttttaattaaacaatgttggtgaaatatatttaaacgtaaatcacaaattcgaagtcttccaaatatttatttactaatgtggaagacatggaaactacagtaatctcatttaaaggaagttactttgatgtgcatttgcttttggcggggtatgattgctgacctgcctttgagggcaacttcctttggctcaggtaagcaggcaaacccgtttctccaaggcgattccaaccccacgcccctcaaaaccttaaatcttaaattgagttattgggtgcaggtcctttctcccacagaacctcccagcttccggaatagaggagcggggcagaaatatcctgctttttatttcagagctgacgtttgcaatcctagtgcactagcggaaaaaaaaaaaaaaaaaaaaaaaaaaaaaagctgaattttccgcgctctcctggcaaattggcgtccgctctccgacgctaaaccaaaggaaaaggagtgttcaatggcgacagggcgctctttgaagccggctcctcacgcggattctggcccaggccgccgctccggtcccagtccggctgcagagcgaattggagaggatggcacctcctgcttcccggggggcggaaggagcgccagcgcctaaggtgggtcacctgccaggaagggaatacgcatggtgcagactcacgtgggaggagcacaggtcccgggtacaagtgccgagctggcgacttagagaagaggtagactcgggctcagaccaagcaggcgtaagggagtagacgggacgtcccgtgtttgcagtgacggcggagtcacccatcccagcagcctcaccttcttggagcgctggtccctccccttggactgaaaccccaggggccaccgcaccgggtgggcgggaccgactactacccgaccagccgctggagctgcgtgccaggcggggctgtgcggagcagctgagcgcagagcggagcaccaggcacctagcgggccggactctgggcggcacccgagcgggccgggcagcagtgggcgctcgcgatcctcctctgcccaacgcgctctccctccgggcccggcctcctccgtcccctccttttgctcccgctcctcctcccgctcctccccctcctcgggattgagcaccaaaacgcccgcctgcaaggtcctctgcgccctggcagccaggagtcgccgccacgacagccgggtctcagtgggtgcctgcgccttctccccgcccgcctgccccgggccatccagaaacttgctctacccgccgcgggtgctcggcagtgctgcccatggcccagcctaggagcctatttagggcgccggacgggctggacagaggcgcggctcaggtgagtgcggcgcgcgcggggtgggagagtggcaggacgcaggtgtagagggctccgaggtgcctttgtctggcgttctggacttcgggcaagtgcagaacctaagaagaatcgaggctggagcaggtggagtggatgcagagggaaccaggaagcaaaggctggggattttcccatcctcctcacctcctgccctagcacctctgctctggaagtcccgagggaccggttgatctgtaaggacagggacccagatttctgactcttactgggttggatgttttccccccctgcagagtcgtgaggttcgctcctgccggccgcttcgcgaccgcagcttcaccataggaccctgtagggcagcgagagcgcagcactcaacggatcctgggtaccacctggggccagaaactggggcgaggacacagcccgcaaaagtaactcggctgagggagcctttgggggtggagaagccttggtcgggtttgcctttgcatttggttggagataggcatctcccaaagagagagattgaggtgacagccctgacaataaacctctcatccctaatgccaattacatgagggtcttgatttttttcttgttactttttactgatttttttcccccttcgtggttttctatttccgggcccttgggtagtggcagcggatggaggtgagggatggcggggtgcgaacccgcggttggaacgcctagaccccagctcccaggaagggtcttattcgcggagcttgacctctccaggtgcgctctaccagccagggggcggacggcgcgctgctcctccttctagccccagcctgtcccaggaagcggaggacagacccagaacgtaggcggatgatgggaagaagaagctggagccaaagccgggtgccggcgcgggatggggtgtgctgggctctgcagttataggtctataactctgcagttataggcgctataggtcttccatctctttccctcccctgggagccagcgat

SEQ ID NO: 10077 - DNA, 6000 bp, Homo sapiens; identical to SEQ ID NO: 3420

SEQ ID NO: 10078 - DNA, 6000 bp, Homo sapiens
atgtctattctgcaggcatcggatgaaatgttctgtaaatatctatgaggctcattctacagtgcagattaagtctgatgtttctttgttgattttctgtctagaatatctgtccaaagctgaaagtgggatgttgaagtctccagctgttattgtattgaggtctagcagtctctttagctctaataatatttgccttatatgtctagatgctcaagggtttggtgcatatacatttacaattgttagatcctcttactgaattgagccttttctcattatatgatgacctttgtctcttctgatagtttttgttttgaagtctgttttgtctgatataaatatagctactccggctctttttttggtttccattggcttggaatatctttttatgttccttattttcagtctatttgtgtcattataggtcacatatgtttattgtaggcaatagaccaatgggtcttattttttaatccattcgcccactctatgtcttttgattgcagagtttagtccatttaattcaatattattattgataagtaaggacttactcctgctctttatttgctttttggttgttttggggtcttctcttccttctttcatttctccctgtctgccttttagcaaaggtaattttctctggtggtatgatttaatagcttgctttttatttttgtgtattcattgtgtttctttgacttgaagttctcgtgagccttgcaaatactatcttcttataacccactattttatgttagtaattacttaacactgattacataaacaaagaaaactaataagagctctacaccttaacttcctccccttgcttctaaactctttgttgtttctccttatattttattgtgctgtctatgtcttgacaagttgtcgtagttattatttttgattggttcatcatttagtctttctacttaagataagagtagtttacacaccacagttacagtgttataacattcggtgtttttctgtgtacttacgattaccagggagttttatatcttcagatgatttcttattgcttgttaacatccttttctttcagattgaataactccttgtagcatttcttgtaggacaggtctggtgttgatgaaatccctctgcttttgtttgtctgagaaagtctttatttctccttcatgtttgaagaatatttttgctgtatatattattctagggtaaaagttttttccctccagcagcttaagtatgtcacgccactctctcctgggctgtcaggtttccactgaatagtctgctgccagatgtattgcagctccattgtttgttaattctttcttttcttttgctgcttttaggatcctttatcctagacctctgggaatttgattattgcatgccttggagtagtcatctttgggtttatctgctaggtgttctatacaattcttgtatttggatattgatacttttctataggtttgagtggttctctgatattatccctttgaataatctttctaccccatctctttctcgaccttgtctttaaggccagtaactcttagatttgcttttttaggtaattttctagatcttgtaggcatgcttcattattttttattcttttttctttgtcttctctgactgtattttctaatagcctgtctttaaaagtgcactatttcttctccttaatcaattctgctattgaaagactctgatgcattcttcagtatgtcagttgcatttttaaacttgagaatttctgcttgattctttaaaattatttcaatatctctattaaatttatctgatagaattctgaattctttttctgtgttatcttaattttctctgagtttcttcaagatattgattttgaattctctgtctgaaacatcacatatctctatttctccagggttgttccctggggacttatttagtttgtttggtgaggtcatgttttcctgggtggtctggaagcttttggatattcattggtgtctgggcattgaagaccaccccaagagcctgcttagtactctacctccctgtggctgagctggtacctaaggggaaggaaaacatcctctttacttttccttctgcttttgtcaagcagaaggagtctctcacattagccaccacagttgggaatatactgggtctcacctgaaaccagcagatctcagagtcacacccaagaaccacagtgtactacctgagtattgcttctggctattgagaacccaagggctctttagccaacaggtgatgggtcctgcccagactgtttctttcccttcaaggcagcagtttcccttctggcccaggatgtgtctagaaatgttatccacaagttaggacctgggatgggggtctgatgactcagactgatgccctgtcctactgtggctaaactgatattcaagataacaaagtcctctttactcttccccctcttctcttcaagcagaaggaatgggtctcttcgtgctgtttttaatcactccagccactagcattgggactgatgcagacactaaggatccaaatgattatttttgttttgtttttttaactgcattgggattaggcaacagaagggtctaatgtggctgagagtttttgagagaggagcatttttaggagggtagctgcattccaagtagagagctctgctggggtaaaagaggcatgagtgctagaaaagggcatgcagtgatgaagagccactaacagcactacctggggttggggtaggggtgtcacaagcactcccttagctcccctgtctggtgtctcagtaagtcgcatgccctccaagtctactggctctgagctcagcatttgggcttgcttaggagttgctgtccttgtggcctaggctgcctttaaggttatttggggccccagagcactttactgaaactcaagttttcaccactggtatgggctatttcctctgagggaaattggctgagttcagcctagttttgctttctgctatgacagagcagtactgagttcaattcaaagtctcccaatcactgcactctccctttcccaagccacaaggctgctgctgctgggggatggaggactggcggcattggcaaatcaaaactgtctttcctggcttcttcagtgcctctttcagtaatatgaaattaaaaccaggtattgtggttactcacctgatttttggttcttataaaggtgctttttgtgtgtgtagatagcagttaaattgtgttcctagccggggtggggggtgggtggtcaaaccttctatttgaccatcttgcttcacccctttctactgatactattgttgttgatattattaggaatgaaaatgagccctgtgagttataattgtcttcattttgcagaccaggaaactgaggctcagagaaatattaagcagccaaagtcacagcgattaaaagaggcgggaccaaactttgacggagatcaggacccactcctttgagaaatcacctcttttgctagctccagcctaaaagtgctatctaggagaaggtttatgggaccccagcagatgttcaaccagaaacttctgacctgcaggggctgcagaggggaaatctgccctgattagaagagatttgttttccacccatattagtttgatctcacattgctataaagaactacctgagactgggtttcagaggctgtaccgtaggcatggccagagaggcttcaggaaacttacaattatggtggaagaagggaaagcaagcacatcttcacatggcagaaggagagacagagcgagcaaaggggaagtgccacacacttttaaatcatcagatatcctgagaactcactcactatcatgagaacagcaagggagaaatccgccctcataatccaatcacctcccactaggtccctctcccagtgaattataattcaatatgagatttggatggggacacagagccaaaccatctaaccttgccatgtcctactgtactttttggaagttttctgaactaacatttcttgtctagaaatatacacactcaagatcaatctaactattaaaaacaaaaaatgcttattttccagtacctgttttatgttagattctggggtaaaaagaaaaaggtactgacttaatgttcctgtctatcattcatttgtagcttgtgcatccatcctttcatctgtctatccatatcacaaacatgtattaaacacctgctgtatgctagacaccatcctgaaggtgcatttcttccctaagtcttttttttgcctgccggagagtacagtattctcaattcaagataagaagtggtgaataagagtgaagtgcaaattggtgaggacacttagacaccgagtgattacttctgacaggtttccaccactcagctaagtagcaaggtgaagactccgaggttgagttgtaactcacagagcgggaagaccaataggcagtgagaaaagaagttgcagtggcttcacgttatagcagatgcctgtgtgtacacatgggagcgaatatggctttatgctgtttttcaaccgcttcagccactagcattggtactgctgcacactaaggatccaaatgattgtttttttgttttttgttttgttttgttttgttttgttttgttttaaattgcattgggattaggcaacagaagggtctaatgcggccgggatgagacaggagagtttttaggagggtagctgcattctaagtaagggactctgcggggggaaaagaggcgcaagcgttgcaagaagggagtgcagggggttgagcaggcacctctacaggaaatggatgctgtccaggtgctggtgggcgccccagggctacgtggcgaagcagctcagccggtccaatcagagtgcgtccagggctcgggtttcgcgatctttaagtgactgaggcagatccccacgcggcacctggccatgctctcagctctcccgccgcggtgagtatgtttaaggaatcctttccattacggcggccccatacctaggtccccgtccgggacagaggaagccgcaacgggtccccccgggcacccgggcctttctcctgcctcccgccacgtccgagggtccggccgcagcgccgcctgagcccctccgcggccggcagtgggaggcgggctctccgaaagccgtcgcggtggtcccagaagccgggtcataaataattcacgagccagggtctggcgagctaagggaagggcggcggcagcggtgactagggcgggagcaggagcgggagccgggtgcacggtgagtagctgggtcctcatcccggagcgagagaggcatctgctgaccaggcgcggggctgagcgcactccttccactgtactgggggtgtacagtgaggagtggacgggttcgctctgcgccccccttaccctagccatctgcgccgcctccctggcccctcagcaggtggtgcgggcccggacagcggctgggggccagaggaactgcggggagagcgtggtggtgccggtgcccgtccaacccaaactttttagtctgagtggtggcccgcgacgccccgcttgggtcttctttccatccactggggatgggggcgggggtgggggtagccggcggccgtggttccggagcgggagtcggaggtgagtgtgcgaactggaccggggccccagagacttcggactcgctctcggggagaacggtgaccgaggtgagactcgccagggtcttgggaacgagtctgcggtaaaggaaactctagggatggccccggggacgtgaggcgctgagcttccctggctgagtgcggaaatgggccaacactgtgcagccgaccacagcgggagtagggatatgggggtacaaagcgaggccatctccccgcgtccgtgggagaaagcatgcacccctggcttgaagcaccttcccagcctctcgctccacggcccttctgcttgcatgcgcggggac

SEQ ID NO: 10079 - DNA, 6000 bp, Homo sapiens
caaagatagaaaatattactactgaaactcagaaattcaaactcacattaatttagtgcaaaggcttgatctgggttcagtggtatattttatttctttagaacatcagctgcaaagctgtttagatctttcaacaacatcaactcttctttttgacgacaaaatggtgaatgagttaaattcagaactacagtttgtgaagaaacatgacatttatgattcatgaaatagaagtcatgtaatgctaaaataaagtttcaactgagaaatacagatttaattaaaactgtgctctattccgtgcttgaatccacactatgaaaatcaactgtacattgattactgagtaatcatctcaaatataacttcaggtgctgtttaatgtcaccttacagcagagttcttagactcaggtgtgcatgggtacaatactggaaatttgttcaaaatgtagaaaccctgaggcctggtgtgagaaacacagccttagagttctggaaggtcactgagaaaccatcacttctcctcatgccaaggaatgaaggactaatgcatagaacataaaggtacataaaaacttacatgtctttgttgtgttatcaacacaagtattgcatttgaactctatgcattcaaatcttagactcaattacaaagtgactctaagcatttcatatttttctacaaatgttgataatgcaggcctgtctactatttttaactcagaagggaggtgcatggagtttagcccagaattttggagctacaagggaggatcggtcattgagtccaatactctacaggtcagaaaatgaagcagaaaggggtcacctgtgctcctttggtcaaagactttagttgaagggtcagagagaatccaggccatctcctgactcgggattctttcaagttagcaaatatgtgatgtttttattactcaggaaaagtgtacagaactactttcaaaagtactttagggacaatacactagaagtgttatcaagagataaattgctttgtagttaaaaagtgaaaactacagcctaaatgaaaggaagggagaataaaaggaaaatcgttatttttttcagctttcattatacaaaagatgttgccccaatttaccaatgaaaagacactgagggccacagtggccctctgagaccctctttccagggtcacatagctgaaatatgtggccaaaacagtatctttcccaaggcttgtaactgtaggcccttgtactacactgtgctatacctggtagaaaagaatatagatatacaaactaaaaaacatcacttattttaaaacttgttatttcatgaaatggcagaccataatgatttggtgtggacattaaacaaaaagagtttatatgcctcattaagataattttctggagctctgaatccatggtttatacataatgggttcagtatattttgtttagccacaaaatcactattgttaaatctttaattactgaaatatgaagttacgcaatttatttttgaagtctgcgtatgctactcaccaaatttttgttgtttaaaaaatattgttttgcaattttcaaaatacattagcctcatagtgcatatagcaatcttaagactttatcaacctctgatttctaaacacacatccaatattcatcactttcctctgctgaaattatttcccactggtggagtactttttttctttctagtgcgatgacatgctacggcacaccatcttattgtttgtgaaatcaatacttaagttgattcaggaaaagtgtatgaaacgaatttcaaacatcttttaggggcaattcactacaattgcccctaaaaccagttataagataaaaccaggatttggataacaatgatggacaatattgtcattgtcatccaaatcttggttttatcttataacttaattcagaatgttatttgatgcctatttaatggctagggttgctatgtttcttaaatactcatattgtttttctaacggtaataccataaatctaagcctgtatttttctttttacaactgatataaagtgcattatgatattttaactatttatcttcctctgagaactgctggttcttctatgctgcataaatatctcttaaggtaatttgtaacctagtattttgaagattccaaatacacatttgaaaatactattttcctggattctaactaagttgcaatacgttgaattaactcaaagaaaacaactctccatatgcaataagctatttgattatatgattatcaacacctatacaagggaagaatagcgttaactgaaaaaattatttttactaatggttgttttttaaatgcttttttgtatgttgacttcaatatgggtttgtttgaaattgtgtagtttcacatgtcagatataataaagcagcttcagtgaaaagattcaaccgacgagaagctacaagttcctcaacttgcccacattcgcattcccacatttccaatttgttcccccgcttctttaggcagtacctagcctcggcacggctgcttcctcttctttttttttttttttttggcacggctgcttcctcttcttcttttcttttttttttttttttttttttttttttttttttttttttttttgggacggagtctcactctgtcgcccgggctggagtccagcgacgcgatctcggttcggttcactgcaacctccgcctcccggattcaagccattctcctgcctcagcctcccgagtagctgggaatacaggcgcccgccattacgcccggctaatatttgtatctttagtagacacggggtttcactatgttggccaggctggtctggaactcctgacctcgtgattcgcccccttcggcctcccaaactgctgggattacaggcgtgagccaccgtgccgggccctctctcttctatttaaaaggataggcacagcctttggaactgaatgtctttcctcaggcctcataatagaaaatgaggaaagtccattctgacaactggctgccttaggcaacagaatttgggattcctacccttccagctcctgttgagtcaaaggcaaaggcaataacccaataaatgtggtgagacagtaaatggaaactgacataaaaatagcaataaaagcctacttccttcttgacaatcaatacataatggaatgggtatgattttacaccataaaacatcagagaataatagaatatgggctgaagaaagctcagaagccacaacattttccccaccttttgattttcaaaacgattcttaagatttgtcgggagtatttgttttcaattgtttcagtgaggctcagttttgaccacatgcaaccaaaatagagaatttcatggaggatggtcacaggattggcttagaaaaatgtaatcctgtgagctgtcccctttcataaataataaggttccgacggctgcaccgaatgttcctcctttcaacgaggttgggccgaggttgggctcccagctgctgggacatttttagtccatcttggactctcacctctgcctcctgctcagctgtcagaatgccaggcggctctgcagcccaaagcccactccgttttaaacttgctcgtttgcaatcacgtaacccgctactgacgacagaaccctcaaggcccatttatatgcggttctcaagtttaggtctagggaagtttccaggaagcttagtgttcggggaggaattcgttttgcttttgctaatcaaagagacacaaaagcacagctgagtcccgaagctggcacacgggaaatcgaggtaccactgtcccctcaccggagcgcgcaacaatcacttggggagcggggaaaaggtttccaccttccccgagcctggggcaccttcgctcccaccgccccagctggtggtggtctcgacaccacgctcgttgcggggtcacacgccagagctggaaaggggaggtccagccccaagtaaagcgacaaagtaaggacacagtggtggccaagggctgtctcctaaccccagtcccgaaagacagtgtggaaagtccgccggcgcgccagcccttgaaactctgccggtccggccgcggcccctcccctgcgcgtccccacctgttgtgaagctgcccaagctccttcttgcccaaatgctttggaaactgccaaaggacactcagaggccagggaatgtaacaggcaagcataaatatgcagaagagatggaaccaaaatagcgggcaggcagggccggcgctcgtgggggtcggtgatctggagccgggcccccgccgccgcggccgcgccagcagtgccaagacctggcgggcggcgccggcgcactccgggcaccgagtctgcaaaagaggccctgagcggaccgccggacacctcgcagactgcgggcagcggtggtggcggccgcctctccggggctccacggccgacccgccgcccgccgccgccatccccggcccgctcctgccgggtccccgactcgagccccggaggcgcccgctctgcgggaccgcgcagcccggctgcatggagcccggcgcggtgccccggccggccgagccagccacggcgcgagaaaccgtcgcccgccacggcgagggcaggaagaagatggcggctaccgtggcggcggcggcggcggcagcggcctcacacgcgtcgctgacgccaatggctcgcgccggtcggcgggccgcggatggcggcggcggcggcggcggctcgggctccggcgaggggcggggcgaggcggggagggggccggccggaggcagaggctggagggaggcggcggggacagtttgttgtgctcggaacatggcgggcgtcggcgacgcggccgctccgggagaaggcggcggtggcggcgtggacggcccgcagcgggacggccgcggcgaggcggagcagccgggcggcagcggcggacaggggcccccgccggcgcctcagctcacagagacgctgggcttctacgagagcgaccggcggcgggagaggcgccggggccgcacaggtgaggcgggcggcgctaggccgtggcgggctccgaggggcggactggggaccgagggcggcgggggcgccttggaaccccggcccccgagccgcgcggctgccgttgcctcccggggctccccaggctgtgggcgcgcggagccgccgaggctgccgaggctccgcggccgttgacagttcctcgggcgggttgcgcgcgcagccccgaggcccccgcggccgcgccaggccaggtgtgccctagaaggggtctgcggccgggaaagttctgtccgggtccttgcatcgccctcggaaggtcttaggttagcgggcatctcccacgtctcggagcccaaacgtgagaagcacacggctgatttcttaattatattcatgccaaggtgactttttttgttctgtattttaagcaaacttgagccatagaaacctgttaacttgccctgcaagtagatttttcacagacagctgacggtgtggtagtgaccatgaagttcagtagttttgcccagtacagaaatatttaacactccataaaatgttgcatctgaacttttcctgaactgaaacttatgccaaaaaaattactagatgagaaaatgtgtacttatgaatcctacattcaatgaccagttttaaacgtattgttacaatgttacagtttctataagctgtaggtttttattctcattttaaaagaatttttaaaacttgcatttgtattcatattgcagttacagattagttttaaatgaaaaaaggttttgagatggatgtcttcttgaatatagagtgaacccaacgttttaattctcaagctgtaaacagcaactgaaccataactccattaaatttcttccaactaaaaaattacttctgttgtccaaaaggggctgtgttagccgttatttcctgaagttcatgcaaataactaagttgtgaggctgatta

SEQ ID NO: 10080 - DNA, 6000 bp, Homo sapiens
catccacttggctcacaaaatccctagcaccaaatacagcacctggcacttatgatgcactcgctataatgtatgttgaggaatgaaacaagggctgacactctggaagtgcatcaacttttcccttgaaagtgcattggaatctttcactgcaattctcttttgttagctgaactcttaggtcatatggtgtattagtctgttttcatgcgctaataaagatatacccaagactgggtaatttataaagaaaagaagtttaatggactcacagttccacatggctggggagacctcacaatcatggtggaaggcgaatgaggggcaaagtcacatcttacatggcggcaggcaagagagagcatgcgcaagggaactcccctttataaaaacattagctctcatgagacttatacactatcacaagaacagcaagggaaagacccagtctcatgattcaattacctcccatccagtccctcccaccacaagtgggaattttgggagctacaattcaagatgagatttgggtggggacacagacaaagcatatcacatgggctcacaaattcaaagtaaaaaatccagagatggccagaaaaggaatcagtggaatagaattatcaattggtgtaataagcaatgaaatattggctcctctaatttttactgtttattcgttcatatttacaaagcacatactatatgccagatattgtggtagggtattgaagatattaatacaagcccttaatatggccatgaaaatgagataaatagagcatccctagaattaatcttacccattaataataacaaatagtatccagcacgatgttccaggcattgttctgagttgtctccatgtattgttttatttatagtagcattattttatctctattttacagatgagcaagctgagactcaaaaaggttaagtaatttctttgttcatgcttcccagccagccaggggtgaagatcaggcttcaatttctgccttctgatagctcccctcaccctcttaatggttcccagggagtttccccacaagtgatcctgagatcacaggtctccaaatccccagggatgctggataaaaatgcagatttccaggctcggggctgaggatcagaatctccaggaggaaagtctggaaatcaccatttttaaaccactaacccaggtaattcagctgtgcagtaaagtttgtacaaaatagcactcaaatatgctgccatccccccaaccatgagttgacaaaatcactagcatccaccacatctcccactctcacttcctgccaaccaatgagcaggaggaagaaacagaataggaaaaagggaaagggaagggaagggaagggaaaggagaaacttgtcccaaattggactccattttggttcagggcaggtcaatgcccagccctctgctcttctggttcttggacttacagaaccactgtccccccagcttttgaagcaggtgctgatgggcctgacaagcctcagcaggaggcaccctgaatggctggtgatgtctgcccagctggagcagttgaagcagcagccaaaaccctggatgctcatcccttcccacatcagaacacagctgctctgggtcatcgcccagtgagcagggtccatcatctgtagacagggaagattcagacaaaaggactcatagcaggaaggaggaagagagacgagagccctggctccaaacaggctacatgatgctagaatagggaaggaaagctccatgccatgggaagtggcgtgaggatggggtctgcagggtcctcgaggggaaatccaccactggttctcaccagcaaagcatatggccactgtgagtcccagccttctcatttgtaaaacgaaaatagccattatcgtaggaaggctatgaatactgctgcctgtgatttattgaacattttttgtatgtcagacactctattgagtcaatcgttcaatcttcataacaaatatctattaaatcattctgatccccatttgacagatggaaatgagtcttaggttaagaaacttgctcaggctgggcgcagtggctcacacctgtaatcccagccctttgggaggccaaggcgattggataacttgaggtcagcaacttgagaccagccgggccaatttggtgaaacccgtctctactaaaaatgcaaaaattagctggttctggtggtgcatacctgtaattccagctacttgggaggctgaggcacgacaattgcttgcgattgggaggtggagtttgcagtgaccctagctcatgccactgcactccagcctgggcaacagagcaagacttcgtctcagaaaaaaaaaaaaaaagaaagaaagaagaaagaaggaaggaaggaaggaaggatggatggaaggaaggaaggaaaagaaagaaagaaagaaagagagaaagaaagaaagaaagagaaaaagaaaggagggatggagggaagaaaggaaagaaagagagagagaaagaaaggaggaagggagggaagaaaggaaaggaaggaaggaaggaaaagaaagaaagaaagaaagagagaaagaaagaaagagaaaaagaaaggagggagggagggaagaaaggaaagaaagagagagagaaagaaaggaggaagggagggaagaaaggaaaggaaggaaggaaggaaggaaggaaggaaggaaggaaggaaggaaggaaggaaaagaaagaaagaaagagagaaagaaagaaaaagaaaggagggagggagggaagaaaggaaagaaagagagagagaaagaaaggaggaagggagggaagaaaggaaaggaaggaaggaaggaagggaaagaaagaaagaaagaaagagagaaagaaagaaagagaaaaagaaaggagggagggagggaagaaaggaaagaaagagagagagaaagaaaggaggaagggagggaagaaaggaaaggaaaggaaggaaggaaggaaggaaggaaggaaggaaggaaggaaggaaggaaggaaggaaggaaactaatttgcccagtatttcctagcaggtaaccagtgaagccaggatttgatcccaagtctgtctgatgccaaagcctgtcctcccaataacatccacagcttctccagtgtcccttccccttcttgtttctgtgactaaatgccccaaaccatgtggtcttcatggtttcaaagaaaagaggcaccactgtctttccagccccacactgacagtaaaaatgcgttagttcctctgtgtctggcagagactcagcaagatgtagcatgcagctctgccagtggaagcattgtcagtacacaaggagccccacgggtatctagcaaatggaccaagtctcagcacagccaagcagggcgtcagaaacgcaggtttcacagccattgtcgtctgctttccaaagggtctgaactgaggacataatctgtgcaatggaggttgaagggctttccagcaccacagagcttcatggaacacccaggaccctgagatggcccccctctctgatctcacgtcctgctgtttgcctctcactcactcctacttctatctatttgtacctcaatggggccacactcattcccacctcagggcctttgcacttgctgttacctctgctaaaagtgctcctccttttgcctgggagaagctgtcttgggatcttcacaagactttgtccttcttgtggttcagtctcagatcacagtcccctccttaagagacctctcctgactaccccttctaaatcagcagccccaggccaggtgcagtggctcacgcctgtaatgccaacactgggaggccaaggcaggaggattgcttgagctcaggagcttgagaccagcctgggcaacatagcgagacctcctctcttctaaaactaaaaaaatcagctgggcttagtggtgtgtgcctgtagtcccagctactcaggaggctaaggtaggaggattgcttgagccagggagcaaggctgcagtgagccatgatcgcgccactccactgcagcctggggaacagagcaagaccctgtccccgccccccaaaaaatcagcccctaatctgtttgtatacatcacatctccctgctttactccctttgtagtacttactacctgaaataattctgctcattatttgctgacatgctagaaaagtgcctggcaaatgattgactctcaatgaagatgtgctgaatgcaaggcttcatgaatgaagaggaaatctcactaacgtcttttgtaataaggacccaggtacctatgttcaaaagtgcctcaatcctagttaacaagggcagagaccacgagaaacaacactgtgtttagtagcaacttaacaaccagccagcagttctgtccacacacacaccaccgggcatggttccaaagctaaaaaggcactaattgcttttctataaggaggtagaacacagtccctccgtgttctttaggcctgatggtctgcattatcggatctgttaccgtgttaattgttcctgtctcacacagccggtttgggctttcttctgcatatgtctgggatggtgacgggttcctatatagaggagtactggggaagcctctgtgtgtgtgtgtgtgtccgtgcatatgtacacatgtgtgtaaaaagcagccacacgctgagaatggttaacgggtagccaggctgtctgtactcagggccctaagactggcccaggaaagggccgggggaggtggggcggggtgaaggtggagcgggcttggcttgtgctcactgccttttccacaacaggagtacaaatgctggagtgagtgaggtgaactcaagtcgcctttaggaatggctgaaaaagcccacacctggaaatcactccctccctgctcctccacggcaggttgcatctgcgagacgcttcggtcattagaggaatgagccgggagtgagcaattcaccagctctccagcacttggtggaaagcagcaggcaaggatggatgtggttgacagccttcttgtgaatggaagcaacatcactcctccctgtgaactcgggctcgaaaatgagacgcttttctgcttggatcagccccgtccttccaaaggtaagtgtcggaagctgttattttaattcaggaaactattgagttgtgggagaaatcagcaaaggcaaggctgataaaaaatatatataaccaagtcattgtgagacaaggctagataaagtcatatgttcagaagtttggagaagagattaaaaagcagaatagagtcaaatattcttattgtcccccatgggggagttgggcattcatgaataggacttgggggaacaaaagcaggggaggaaaagctgagtgaagcaagagggactacaagtgtcaaagcctgaacttacaagcacagcagaaaaggtgttgtcaccatgcagctgttttcttttcttggggggaaacccagcatgaagtgattaaagtgaaataatgcttagcagccaggaaagaaagtgatcactgttcacttgaggagctttgttcttaagaaaaagtggttccctgagtgatcctttaacaaaccaaccttctaaaaagaaaataattcagtctctgctttcctcaatttgtttccgcaaaatgttgccaggacaggaatcgtgggtccagtgatgtacaccccggtggggggaaaatcggcaggaattcacccttggcttcggttttagcattctgctgtcatcacctccatccctccgtcttgctcctgtttctctctgcagagtggcagccagcggtgcagattctcttgtactccttgatattcctgctcagcgtgctgggaaacacgctggtcatcaccgtgctgattcggaacaagcggatgcggacggtcaccaacatcttcctcctctccctggctgtcagcgacctcatgctctgtctcttctgcatgccgttcaacctcatccccaatctgctcaaggatttcatcttcgg

SEQ ID NO: 10081 - DNA, 6000 bp, Homo sapiens
cagttgagaggggaagtgggagcgggagtcaggggtagcacatgggaaaatgagagatgagaaatgtcaatatttggtatcattagggaaagtttcgtgggtgcattagagttcaagtttgttggctcattgtaggactgtcatttattaacctaaggctctagtcctgtttgtgtaatatggtagccactagccgtatgtggctatggaatgcttgaaaagtgacaaacctgaattgaaatgtgctgtaagtgtaaaacacacaccaaatttcaaagacattatataaaaaaagaatgtcaaatatcttgctagtaattttttatattgagtacttgcgaaataatattttaatgtggtgaattatataaaatatattattaaaattaatttcacctctttttgtctttttaatgtggttaccaaatctctccaaagtctttcaggttcctagcacgtatctaggatcattttattttattctttttcttttttctttttttttttttgagacgggctttgctcatgttgcccaggctggagtgcagtggcgcgatcttggttcactgcaacctccgcctcccagcttcaagcaattctgctgcctcagcttcccaagtagctgggattacaggtgcatgccaccatgcctggctaattttttgtattttcagtagagacagggtttcaccatgttggccaggctggtctcaaactcctgacctcaggtgatccacccacctcggcctcccaaagtgctgggattacaggcatgagccgctgtgcccggccaggatcattttatttgtttgaactaaaatgttctccttatactcaaatgtagtaaatgaatgacaaatgatttaaattttctaaccatgtgagaattttattacttttcatttatttttcagaaataggattcagaaaaaaaaaaagttgttactattttcacttactgataccagtaattaaagtaaaggagctttccccagctaacacgtgctccacactagaccctgaaccacccgcagtgctcttagggagaatgcaagcccaggccctttcttctacccgtgagcagctctaggtcatgtaactttcctacctgcctggatcagggaccaaggccctcttaaaggcaagaactataaaaatagactgggtgcggtggctcatacctgtaatcccagcactttgggaggccgaggtgagtgggtcacctgaggtcaggagttcaagaccagcctggccaagatggcaaaccccatctctactaaaaatacaaaacttagtcgagcatggtggcacatgcctgtgatcccagctatttgggaggctgaggcaggagaatcacttgaacccaggaggaggaggttgcagtgagctgagatcatgccactgcactccagcctgggcagcagagcaagactctatctcaaaataataataaaaataaaataagctagccgcctgtaaggtggtcatgaatcctctgcccaatagagacgctccatcttgcatagtgaggcaaagatctgatcagatttcccttcttgggggaagtattctcagagcgggcctcagcccttgactgtaagccatgagcctgggaaaaggctgtaggaagacacatatagaagcaaaggcagcaataaagagaagtggggaatagaaagagaagcagattgaggaagagtcaaagagaagtcaagtcatagctaaagtggagagcagcccaaccagacagcctgaccaccacggctgctctgggagtccccagaagccactgctccaggtctctagagggcctggctgtgctgctgtgtttccttacagcctctagtgtctttaaaataaacctccatccccttgtggtaacccaaggttctctgttcattgcaacatatatgaaggcagaatcacagctggcccacgtctggtatcagaggaagacataggagggaaatgtgtgtttgtgtgtttgtgtgtgtgcgtgcgtgtgtgtgcgcgtgcctgcgtgcatgcatgtgtgtaggggcagggggaagttttttaaaaaggaataaaaatattacatcttaaagttatcagcacatatggttctgagcatactattcttggttgctagttgtgaataaagatttaaacgttttagaaatctcaggtgaaggcagagagagtattacataacctcttgggcatctggagtcgtgaaaaaattgtgggctttggaaccagacttacttagttttgaatcttggctccctcccctattggatgatgaccttgtgcaagttttttgttctctctcaaccagtttttccatctggcgaatgggaataaagtatatgttctatgtagtttgtggtggtgattagccaatatcttgtgtgcaatactatctgcacttaggaagtaaatgcaagcttaatgatgatgattagatgacacaagcaacaactctacttggctcaacttgtttttggtaaacaaatgtaaaaacacttaaagaaaacttctccgttttctgacaataaagtatttaaacatgttggtctctggggaaaggaagaatatgtctttggacaacaaaaaccccaagtgattatttttccttgagagggcaatatacagtgtgagtgtgctgatcatagtaatttgagaatttctgaaatgaaaaagattttagagcttagttcatccaacaagctgggaatcccctctccaacgttcctgacgggtgttcctgtcttcctacgtttgtgtaatatagacatgtttgtatatgtttaggtgaggagcagagctggttttgttttgctgttgtttttctttttacagttatttatattttgtgtgatttccccctacaatatatgtggaaatacatggactacattttaaatttaaaaaccccaatatgatagttaaaaaatgtattttaagaacccacccactccccaattttataagacataaatctattataatcattcatgtttaaattgatcattcctcctgtagacaaatccatctggaaattttcttctttactcgtgatctccagcagtcacctaaatcttaagtcaagtatgaaaaaaacctcaaaaatgttgctttaaaaattgatccgtactttgcgatctacattttaaaaaataccatgcttattttaccacttcacttcaagaaaaggcctctaggtcagaggtctccaatctttttggcaccaggaccaatttcatggaagacagtttttccacagaccgggtttggagatggaggagagatggtttcgggatgattcaagcacattacatttattgtgcactttatttctattattatgacattgtaatatataatgaaataattatacaactcaccataatgtagaatcagtggaagccctgagcctgttttcctgcaactagatggtcccatctgacatgatgggaagcagtgacagatcatcagacattagattctcataaggagcacgcaacctagatccctcccatatgcagctcacagtagggtccaagctcctatgagaatctaatgctgccactgatatgacagggtgtggagctcaggtggtaatgcaagcgatggggagcgactgtaaatacagatgaagcttcatttgcttacccaccactcacctcctgctgtgtggctcggttcctaacaggccatgaactggtacctgtctgtggcccaggggttggggaccactgctctagataactcctttccaccctcttcctgcctgattgctgaaattatggagtcaccattcctactcctgcccatcatcacatgactgccccacccaactgatgaaagggataaccgacctgcaccttgaagaaaagcatcatcaaagagctctaagatgctgtggaaaaccagtatggtagttctgcaaaaaattaaacagaatggtcatacgatccgtgaattccacttctaggtatagactcaaaagaatgttaagtaccaacttaaatagatatttgtgcaccacgttcacagcagcattattcacaagagccaaaaggtgaaaactacccaaatgtccattgatggatgaatgaatgaacaaaatgtgggacgtacatacaacaaaatagtattcagccttaaaaaaggaaggaaagattctattattctatgtaataataatagaaatgatatggatgaaccttaaagacattatgctcaatgaaataagccagtcacaaaaaaccaaatatggtataactccacggacatgaggtacctagagtagtcaaattcacacagacagaaagtagaattatagtttccagggtctgagggaaggggaaaatgggaaattattttttaatggcatagaatttcagtttgggatgacgaaaaatctttggagatgggcagtggtggtggttgcacaacagtgtgaatgtacttaattaatgccactaaattgtacatttaaaaatgcttaaggtcaggcgcggtggctcacaccgtaatcctagcactttgggaggccgagacaggcagatcacttgagctcaggagttcaagaccagcctgggcaactggcgaaaccccgtctctacaaaaaatacaaaaaacttagccaggccagttggtgagcgcctgtagtcccagacatttgcgggactgagaagcccagcctcttgcgggctttagcgcaagaggtcaaggctgcagtgagcagtgatcacaccactgcactccagcctgggtgacaaagtgagaccctacctcaaaaaaaataaaaataaaaataaaaatagaaagatggtgagcatgataactcctatgttatgtgtatttgaccacaatttaaaaaagtgctaagattataatgaatatatataacatgcaataccagtagcatgcagaagagggcggatggggtttaagctttacagaaaacctcgattcaattccctcctgcagccaattctgaccgtgtcaacgaatcatccacgcacctgcagctctgctgagagagtgcaagccgtggggtaagaaccttagctttgtttgttgtaactctcattaaaaagatataagggctgcatgggtattttctaaaaaggagataatttgagctaatattgaggggagggaagtagggttatttagatttttagtatttactattttgtctagattaatgattagtgaccttggggctattgatctgaggaatttcttgcagatgcttgagagcgtgggtttcttttcactgattgcggatcaaacctggtcagctcttctattcagattgaacggtcctatgcactgtggcaagttttttctagctcttatttccccacagcgtatgttaacctctgctggatgaaacctttggctatttaaggcatatttgttgctcctttaccccgttgaaaagttctgcatttgtgttacctgtttaaaagtaggggcagatctgatggatcttgtacaatgcagttcttattccgtttccttcagaagtggacaaagagggccatatgtggttgctgtaaagaagaggatggttaacaacctgtgagcatttggtttcttgataagctttctcccagaccacctacactgagctattaattaggaataggatgcacttcgagttttatttcaattcttgtgaacttataactttcctaagaatatatttatacatgtaggcaaagtctcttgaactttgtggcacctagcagagtgtcccacagcagctgcatgaagcttcatagacaggggcatggggtgagaaaggaggaagtggccgccatggcagctggtcagatcaatggattcaacctcagtgattcggtccttaggatgtcgttacatcttaagccacctcatttcaaggtttgaggtgccttgcatttgggtttagttaccatccagaaggaaccagacaggtctgggttcaaatctctgcttcttcagttggtcatcttgggc

SEQ ID NO: 10082 - DNA, 6000 bp, Homo sapiens; identical to SEQ ID NO: 3737

SEQ ID NO: 10083 - DNA, 6000 bp, Homo sapiens; identical to SEQ ID NO: 2303

SEQ ID NO: 10084 - DNA, 6000 bp, Homo sapiens
ggtggcacgcacctgtaatctcagctactcaggaggctgaggcaggagaatcacttgaacttgggaggcagaggttgcagtgagccaggatggtgccactagactccagcctgggtgacagagcaagactccatctcaaaacaaacaaaaacatgtgatcgaataatttgccttatagttagtacataattgtggcctatgaaaaataacccaagctatcatttcccttcgacctgtattatttggtatatttttgtgtatgctgccactaactaatagtcaaacactaatccagataagataatttagaggaagaactatttatttttcgatgaaatccatagaggatacatatctctacatttataacacatgaaacaagactgtgagagaactgggtcatagatgtttttctaggcagggtgttaaaattagaggtcattcaggttctagtaaaaagaattaccagagtagaggggcttctttctaaaccttcactaaaaatcaccgtacaatttaataaatcaaagagactctgacctttgggactgtaccactgaagctgtatccttcctgctcatattatgccattcccttaactgtccctttaattagttgattaactccagatctgagagtgggcagtaactaagccattaagtggcattttgaaactaggcaaatttgaaattagtttttgaggttcaaatttcacaaagttggatggtctatgcaaataagcagctcatataatctaaatagagatgtcacttctgtcaaataacttgcaaaccattagtttaaaaaacaaaaactttccagaaagcttgaaatagagcctttcataaagtcatgtggtcaggctgcagggctgtgcagtctggtgtcacagataaaatacattttacaagtgctagtatagctaaattattagtttagatttgaattttcttgatcaagacattattttatgaattttttttctaaattccattggttgttctcttttttatcttattgaaatcatagaattacagtatggtagtcaaagaataacagcacgatgataaaaattaaaaggaaatttatttccttggattccttaaacatcatgaagtgtacatataacacaaatgaacacttttgaaaaactccttttatctctcatcttttttccccagattccacatttacttccatatccttgcccccaaatgtctctatgcacgttttcctgagacctatgccgtacaccactcatctccttatccttcctgttttcctcctggccctctaatttctcctcatattccattacaaaaaaaaaaaaaaaaagctaacctgacagttggccaaatctgctttagagagttccaatcactcctctccctcaaattggatttatgaggggatctagactgagaacaaaggtgggatggttggtgttttggagatagatgagacttatgtgaaaagaagaggtgagcacattgtgcctcttctcacttctaagattaagacctgggaaggggcaggagatgggaaagtaaacaaactttgtgttttgagagaagttagggagagaagatcttgccataggagacttatatgtgttcttcatctggcaagttctgaaggcatcaggctcacagaaacatacttcttttacatcttgacatcttgttcaacacggtatttatcccagatgttttacttttgttgaaaaattactatttatgtttgcattaaaataagtcagtgtggatttgttagatcttgactttttacttctagtttctgcaatcatctcattttaaaaatgtgaaatgtgtgcagtaaacaatattatgcctttaacacatggacaaacctgacagacaactagcaatagcctgtttctgtttatctgacctttccagaccaaaccttactcaccactgatatagtttggctgtgtccccacccaaatctcatctttaataatagctcccataattcccacgtgttgtgggagggacccagtgagagacgatttaatcatgggggcagtttcccccatattgttcttgtggtagtgaataagtctcacgaaatctgatgtttttataagggcaacccctttcacttggctctcattctctttttgctggctgccatgtaagacatccctttgctcttccttcatcttctaccatgattgtgacgcctccacagccatgtggaactgtgagtcaattaaacctctttcctttataaatcatcctgtctggggtatgtctttatcagcagcatgaaaatggactaatacaaccaccattctattaaatacatcattaaggatacttactaataaaggatggtggtctgggacactagcagcacaggaaagttagaaaaactatattgtaaatatatattttattatttcctaaaacttactttaatttatgcagtcaaattaaaaattggaaaattcattcttcaaaagaggaaaacatcagctgttattgggaatgtgattttatatgcagttcaagcaattttaaaaataaattattactgtagaatatgaacttgaattgggaagaacacaaggtcctaggagaaaataaatattcatagtaaattgagaaacctatgggataattatattcttggaatgggctgtgttatgcacacaattaattaatgcatctaaactgcaattgaaatataagctgtaattgttaaaattcacaaatagagttatatgtaataattagatgatcaattttttttgtgataaaactggaattgagtaaaacaaacaaaaaagtagacttaaacataatagcacgtttcgtttctttgttgcttccaaacaggactttaaaaatatttgatccttaaaaaaaaatctttgtaaataaacttaaattatctacaaaaatagtaaacttttaatgacagaaaaaatttgttgaattgtgttaaaatcatttgaaaattttcaaagaattcaattgttttgccaataaaatacgggttttgaaaatgtagcagactgtagttattaaaaacaaagcccatgacacaggaaaatatttaaaatactcattcaaaaccaagggataatatgaacaaatttaattggatcttaaatcttatataatatttaactttcacattctataattgtgctttggaatattttaaatttatataatttttttcatgggatttctactataagtagtataaattcacatttttagagacataaaatttaaaaggctttccaatttgcaggatctaaatttgttaaaccttcaaaagaggccgggcgccgtggctcatgcctgtaatcccagcactttgggaggccgaggtgggcggatcacgaggtcaggagttcgagaccagtctggccaacatagtgaaaccctgtctttattaaaaatacacaaaaaattagctgggtgtggtggtgtgcacctgtaatcccatctactcaggaggctgaggcaggagaatcgcgtgaacccgggaaggcagaggttgcagtgagccaagagggtgccactgcactccagcctgggagacagaacaagactccatcaaaaacaaaaaaacaaaaaaacctcaaaagaatataaataacaacaaaattaatgaaatttgtctcatacaaatatgtgctgaagataggttaccttacaggccagaagaaggtacttgcgaaaatatttggactgaaaaaattacatatttcaaaatgaaaaaaatagaaagggtattttctgtttagcagaatttctatgagcttattttctcaatttaaaatactataatacatggtgaacagttaagtgaagatgtcaacaatttgacatatatcacccataaagtacatgttttagaagagtataggcgatttaaaaagttgacaagtaataataccatattaaaatatattctttagaaaatatcagtgacccagtcttatagaccaaaacactaattaaaatacatcagcatacagcaagaatgatcattttattatacatatatatattttgagatggagtttcactcttgttgcccagctggagtgcaacggctcgatctcggctcactgcaacctccgccactgtgattcaagccattgtcctgcctcagcctccagaagtagttgggattacaggcatccgaccccacgcccagctaatttttgtatttttagtagagacagggtttcaccacgttggccaggctgatctcaaactgctgacctcaggtgatccacctgccttggcctcccaaagtgccattttattatgttcatattatcaatacagactttacaaaaagttttagctttaatatgtaattatatcattttaatttttagaactaatttcctttccaaaatgaattttgaattgcactttattggcccaccaatataaagtctcaaaatctcaaaaaataagaaaacgtataattttaattaattacattgccctctttcactctcaagggtctcagtttgggcaaaatattatgtggtcatcataattagcatcctagtatgcttaggagagatcagatgggctacacgggatttatgacttgctttgggttacaggcaatctcaaactttcctaatcaccaagtgggataaagaagtaacacggagccagggggcttgccaagagatagctgcgacatggaaggaaaagatcccaacaggtgtcactaggaattatgttggtaggtaggaacacccatctcaattcttttgtttgattcattacagagggacttatattagaagaactctcctaatggctgtctttttagttcctcccgtggagatagcaatcatctatctgattggtcagtttggaacgcgcagtccttcatgtgaccgcctcttcctttcacctaaggcggaaactgctcacaggaagtacctgttttacccgacccctccaggctgtaaaacggaaaggttcggaatttgcctctgcgccgtctttttttgcctgttacctgtgacgtccttggtaagtttgtctcattctggggttcgttgtcagtaagctgacagttataagacatggtcttcattcattgctctaacagttatcaggaaatattttgaaatttttttttttttttgagacggagtctcactctgtcaccccaggctggagtgcagtgacgccatctcggctcactgcaagctccgcctcccgggttcacgccattctcctgcctcagcctcccgagtagctgggactacaggggcccgccaccacgcctggctaatttttttttgtatttttagtagagacggggtttcaccatgttagccaggatggtctcgatctcctgacctcgtgatccacccgcctcggcctcccaaagtgttgggattacaggcgtgagccactgcgcccggccagattttttttttttttttttgccactttccttttttgtttcatttctcccagagggaatggaaagacgttatattttggaccttcctctcactctgacatctaggacataggatgggagtaaaaggaaaattaaaaggaaaggaattgcatgttgcagagcgatttgtgtagttgtatcttctggcatggctaaagtgggaagtgttgcactctggcagaactggtctaggtaccgatcatatatgttcagctgtagtggcaattttgcccacaggagagtagctgtttgtatataagcaggtttgcataccttgggctgtgagcaaaagccaataagctttgagggactcagcaaacaaaatctgaccaggagtgttgaggcatccctattaaacgggtgttggtcacgtgattattgctgcttggctttgaaatctgtagaggcagttttttctaagtagccttgactgagagaagggtatgattatagtctttttgtgtacgagccttacagatctcaaagtggttctaggatggccagtggtatttg

SEQ ID NO: 10085 - DNA, 6000 bp, Homo sapiens
ccatttctctttgagaaatattttttttctttgcctagatacctggcacagtgatgaacttaatagaagattctgtcctcactatgcatatggtctgtgttgtgggttcttccacataagcaaacaggtgaagattaagccaggccacccatgtgggggatctagcccactgccaagggtgactttttagggtgcttgggcctcatccatccttttataatcaagattattaaaacaatgggagatgctgtatgctgatctccagaagaacaaagaattagttgggtgttaaaccaagaacactaaaaatgcagcagtagccaaaattgctgtgaccaggtataggacagtaaaaggaaggctgtaaaaagaacctctgaggacccaggtgactctagctgttaatgtctgtctgtccttggatattgggaactgaagcagatgtctaagctgtagagctagagttgacatgagatagctctgtctcttcttgggtctgtggaagttgcagtctttatcgagtggcagtgattagaccactctaagacccaaggcttatgaggctggggagcttccagggtgaggaagaagcaaagtactagctactacctcctagaaaagatgcgagaatttgggagtggtgggaggaactgagagaccctgtgatttccagcaacttaaagagacaagcaagaccaggtgtccacctgggaagccatttttacatattttagaatcttggcttattgaacaagctcaggtctattgcttactaagcttctcttcttgctaagtttccaattagtaatttaagtcgtgctgtgaaggattgtatgcagtttgaaactccacagtccagattcatttgagttaacacctctgtatcccatatatgtattctcttaatacatcacctaatatttccaaagcccccccccccagtcactgtcatctggtcatcctctatcttctcacaatactttttcctcatagcactaaatagtacctgtcctcatattaagtgtctgtttattatctgcctccttccctggaatgtaagcttcatgagggcaggagtgcagttttgtttattactgtaacctcagagtagagaagcctggccacatagtagatgctagtattcgtttcctagggctgctgtaacagataccatacatgagttacttaaaacaacagaaatttattctttcacagtttaggtggccagaagtcccaaaccaagatataacaaattatatctgcaaagcctttatttccacagaaccacattctgaggttctgggtggacattaatttggcagggagtagtggggggacactaacctactacagtgctcagtaaatatttattgggtgaatgaaaattcagagtgtattctaagctgtaaaccccttggatgttttcatcacagtcttctcttaataactgctacagaacataaggattagtttgtggtcccagattttttaggctccaattctgcttctaccactttctacttgtgagctcttaggcaagctatttaactttgtaagcctcagtttcttctgtaaaatggtgacaataagaaataacagtaagtgcccaataagttttaactattattatgtgtctatagctattttaaagcactttctatatgtaatcctcataacaaccgtattaggtgagcctattacacttctcattttatgacaaaggaaactagatttgtttcaagaatgaaaaacctagaaaattatatgtcactttatgaagtgcctggcacatagtacatagaatagcttagctacaataatatagatatgtgactttacctcataactttaagacatctcaaattgattcacaaatcagaaaaaaaatctgaggcatcagatgtgaggtgaggtgaggtgaggcatctcagtttttgcacatatggttactgttattgagggagctccatgtcattgagggagctccacgtcattgagggaggactgggtgggatgctggccaaaggtaggggcatatttaggcagtgaaattgcagttatgggacccctctatagcactagatgtgtgagaggactaaaaataaaattcctttgaaatttcttacagggtcatatattacctccttcccaatgactactgtggtatattagagtaggggattgatgtcccagaaatattatgtacatcaaacagaagatctacacaaattgttttatcagatactgaatatatcaatgggctagagtgtattatagtacatatgggtatgttgttttcccccttttgactaaataaactctcccctctctgcaacaggtaaatttccagtttacctttttcttgctgtttttaattttttttattttgaaggctttgtatctttatatctcagctgaaaatattacattctaactccccaaagctattctcacattatttgcaagtattttttcatagtttacatgtttgtgtatttgtttaatacattccacaagactgaaagtcttggtgagggcaggaactctgtctaggttgttcatctggcagccagcaaacccaaaataagtattagttgaatgaatagctaaatagatgagccatggggtagcatatctgttttagctactgcttgcctgttatcatcctgggatgctgcttgcttctccgtgatctcttcttgttcttaaattgtcttcagttgtagtactaagtactaatttgatctgtaatgtgatatgtggctgaagtttgctctgtaaaatcaccgtttcctgaggtatattcaatatctttaatttttccataaatctcttcaaggtttgtgtgtgttttcttttaaattatctaactagttggatgtatgcttgaagtgctagacaataaaagtttcaataggctagaaatgtttctttttgtaaaattattttaagaaactagatgatggttgtcacttgaagctgaaatgcaaatgtagctagttttttttaaagaataattcaaataggtcattaaagattactatgagcacactgcatattcaaatcagtttgaatatgttttgagacttctaatagtttatgattcttgacattttaatgagcacactgcatattcaaatcagtttgaatatgttttgagacttctaatagtttatgattcttgacattttaaaagtttattataaagaatataaaacatctttaccctcattttttatgtcattaccttcatgcaaagaatacctcaggtattaattctggtgctgttggtaactagaactggttgggttttcttgctaaaaggaagtttaaaaaatgtttattttacaccattaatgcaattagctttagttctcagaggaactaaaagtggaaaagtgagggagactgatcgaccctatctcaaatccactgacgtagctactttaatttcatagtccctgtagcacctccaccagagggcagaaagtggaagagaaagaagatgaaatagaaacttgtacttggcctcagaatgcctgtagaaaccttagcaattgaatccagcccttatgttataggctgagttaactgtggcccagaaagactatgtgatttgctcacagttcttgattcccagactggcactgcggtgatggtgtgtgatgaggtagtatcttagtaagaacacaatccagaagtcactgcctcgggggaatcccagctcagcttcttgctagcttgcgtaggctggttacttcacttcagctccctgaatctgctttcttatctctaaaataaaaataatagcttcttcctcagagtagttggtggaactgaaagaatacatgtaaagtgcttagtatgacacctgccacataatatgaactgaattattgtgaattatgataaatttgtcagatactggtttacaaatcggatgttagaataacatggaatcagtgtttcagtcattttactatacatatgcaatattttctacatttgatctcacttcagaaacaaaatactgccccccccattttacaaatgcatatttttttctcagcaataatgttcaagaacaagtgcttggcccatattttgttgtctttacatggctttctttaaataatggggatggatttattaaataacctcatgagtaattttcaaaatttccattaagatcttgattgaaattggatgaaaaatcatttctaagaaaaacccaatgaagtgtttttctttgccacatttgacaattgccttggacttggtaaagtaatcattactgtgttgagtacctccagtgccctccttgacgctgccttagaaaaggtagctgcttttgaatgacaggcaggaatttgttcgccttttaggttcagcctgtaggtgccctctgcaggaaatcaggaactagggttttggaagcagtcagggtggggttctcccttgtccctgcagcctcagcaaagactcaggcagtctggcaaaagcagtttcttcagcatacctaacagaacgcaagtttccatatgcctgatgcaaataatggcctccaaacgttaaaccttttttgagataaacttgttctttaattgccagcgcctgcagttaattttgattggctacactctggttaaaagaaaatgctttcgatgtgatatggcaaatttggagaaaagtaactcttttgctcccaaccagtcttccacaacttaaacttaatcgtcctgtccttttctgctgccctcgtggagtgtaagtttttgagggagaccagcagaaactgactttccatatgcccctgaagaataacttctttgaatgcaaagaggtggggacacggaggatctgtcattacgggttattatgggtgggacccagagacgggagtgaagggagggtgtggcccgcgggtgggatctgtagagcagacaaaatatggggcccctggcgcttaaagttcagtttgtctctcttgagcttggagaaaatcatccgtagtgcctccccgggggacacgtagaggagagaaaagcgaccaagataaaagtggacagaagaataagcgagactttttatccatgaaacagtctcctgccctcgctccggaagagcgctgccgcagagccgggtccccaaagccggtaagatcgatgattcgctgtcctaccgcagccaggtgtgatggcctcttagtcccggtgaattcagggtcagcccctcccgcccccgtcctctcctccgcccgatgccacctccttccccagccgccggtgagctcccgctctgacagttccgcgctcagcgccctgcacccagttcccaggcgcacggccctggtcccgaccaccaccccggtcgcccggcgtccgagaccctcccagggtcatgggcagggtttccttcagtgttcgagtcggctcgatccggagaccccggtctccatgccgggggtgatgccacctttcctgcagagtccctcctccgcacggtgccctccaagcatctagtggacttggctgcacactggcggcaggggaggctgcaggtggagctgtcggagccagcccctcggggatctacagcttcctgtctgcgccggcgtctcgggcgccgggtggctggagggactgtgcagcagtcttgcctgccccagacgtaagcccccttccccagctgcgagcgcctgggtgtcggtccctccacagcccgggctcgcgcttggttccccggcccccagttggtgcctggggatcactcgcccgtcctaagtgctggcatcccagaactggccctcttgcagagtgctgggaacttgtaggtccctgcgtgcaaactttctccggcgtgaacctgcctaggcacaggagggctggccgccgggggcgcaggctctgcgctgtaggatttggttggctcagatccagtcctgggaaggggcagcgttggctctcgttcaggaggagaaagaaagggaagggcaccacg

SEQ ID NO: 10086 - DNA, 6000 bp, Homo sapiens
gagagctgccagacagctgaacacgtggaggattacagggagatgaacaagaactcatccgtgtgctgggaaagcagagcaccccgactccgcggggacagaagctcctgcacccaagacccttccagacctcaccctctgtgtctcttcatctggctgtttatttgtaacccttaaaagatccttcttggctgggtgtggtggctcatgcctataatctcagtactttttggagaccaaggtgggtagattacttgagcccaggagttggagactagcctgggcaacatggtgaaaccccatctctacaaaaaatataaaaattagctggatgtggtggtgcatgcctgcattcccagctactcgggaagctgaagtgggagcattgcttgagcccagggaggttgaggctgcagtgaatggtgattgtacctctgtctcaataaataaataataaataaataactattggactgcagtgaatggtgattgtacctctgtctcaataaataagtgaaatgaaatgaaatgaaatatccttcttaataaactggtaaacctgtttccccgagttctgtgagccgctctaacaaattagttgaacttgacgagggtgttgtgggaaccccaatttatagctggtcagtcagaagttctggagacctggacttgtgactggtgtttgaagtggagggtgcagtcttgcggactgagccctcaacctgtgggatttgatgctatctccaggtagagagtgctggaattgaattaggacatacagctggtgcccactgcagaactgattgcttgcttgttggtggagaaaaccccccaacacatctggtcacagagagtcttctgtgttggttgttgttgttaagcaggagaataggaaaaagcacattgagtgtattttccacacaaataggctgccacacaaaataccatagactgtgtcttagtccctttgggctgctataatcaaatatcataaactatgtgacttataaacaaacatttatttctcatagctttggaaacttggaagttcaagatcaaacggctggtagctttggtttctggtgaggggcttcgtccttgtatatggttgtcttcttgctgtgttctaagatagtggaaggggcaaaccagctctctggggcctcttttatgagggcactaatcccattcatgagggctcagccttcataacctaatcacctcccaaaggccctaatatttcctaataccatcaccttgagggctaggatatcaacatacaaatttggggggatgtaaacattcagtacatcgtagcctgggtggcttaaacaacagaaatttagctcacagttcctgatgatttggttcctggtgagagttctcttcctggcttgcagatgactgtcttcttgctgtgtccccatggcacagagagatcgaaaactatctagtatttcttcttgtaagggcacaaattccatcatgagggccccagcctcttgacctcatctcaacctaattacctccaaaggctccatttccaaataccattacattgagggttagggcttcaacatatgaatttggggggggggacaaaattcagtccatagtacatgcacgatctcatttgatcttccagaaccccatgacatagtttccatttgaagatgaagaaaaggaagcttagaaaggtgaagctgccaatggccactctgctaggtagaaatggaactgggaagttttcaagtctaaggaattaactaagcaatatttgccttaaaaacaagtcttgctgactcctgaggcctgacattatccagtttggttttgagccatttggtctaaaggtaaatatgaaaatatgtgaggcaagaatataaagagaaactccaatgaagaggaggctatggagggatgggcacttagcagggtgcaagtgagtacctggacacagagggagaggatcctggaaaagtggcttatctccaggaagaaattgggggaggagttttacaggaaactggatcttggaaggttggcagggcggaggtggagggttggaattacgatgtcaactctcatcaggaaaatgtttgactcatgttcgctcacccctttggccttcttcctaggtcccacacccttttgctggctctgacaggtttttcagaacaggaaaaagaagaaaacacacacacacacacacacacacacagacacacacacacagaaaggaaaaaagaaaaagaaaaggcaattccctgcctctaccgtatacccaggccgtgggagttacaaagatctctctgttgaatagatcttagaataagaacatttctcccacatccagccagtgtgaagataagagtgaggttctcacagtcctctgaagcctaattaagtcacagtgttctggaaagagcactagtaacactgtatctcaattcagataacatttattaagctccttttctgaagcaggaactgtggaaggtgctggagttctaaggagctctgtgtggcttcctccgtctttgggaagttgtcagctatgtgatgatttagatactttggggcactagccccttatcttggccactgtttctacataagggtgaattctcagccacagccaggtgtgggctgtgccaggacatactgaccttatttcctcttattctctttcttatcttcccatttgcagctgttcctttaactgagtgcagccactagtctcctggttcctgccaaggaggaaattcagaggctgaggagggaggatcgcttgagctgaggagttcaaggctgcagtgagctatgatggtgccactgcacaccagcctaggtgagagagtgagactctgtcttaaaaaaaaaaaaaaaaaagacattcaggaaagcttggaccaccagtatactcaattagaccattaaatcttaaatcgtcacatggccttgagaaagccacatagcatctctgaaatatagcatatcatagcatctctgaaacatagcatatctgaaaataaatacaccctctttgcttacctcacaggttcttgggggaatattaaatgatatattatgtacgtgctttataagcagtaaaatattacataatgctgtggtaaccctcacagggttgataagctagggagccttaagcatcacctattaccccgtatttattgtgtactgggccttcttctaggcacttcaccgatcttaagcccttgaatctgctgagcatcccaatggggcaggtactgaacagggaagttaagtggcttgtctagggtcacacagtaagtggcagagctgacattcaaggccaggtagtcaggttccagaacacacattgttaaacaccagaccaagctgcctcctgtgtgccccactgacacttcctgtgtcctcctccatgagcccctggcagagatgacaattgcttgccttaacaatagataagctaccagaagtcagggcctgtgcctcattcacacacgtccacagtgcctgccacatagctagagttcagtagatatttgttgaatgaacaaataccctccagggagggatacaataagtctgatacaactactgtatttttccttcattttttcttggctaaccacactcatttccttcagttgtttccaaaaggaggttggcatctctcactgtcctcattgacctcctttgcactttctccacgtcaacagtgacccatctaaagccgactactgtgacatgaacactgcacttgaagagcctgaccagcgctgggctcagtagaactatcctttcttctcccatggtgtatcctcactgtccaggactctcttctcagaagcccactccttcccctgtgctgtttatatgcttaatgaaaccaagtacccaaagtgaccgttcaactgttactaggcagctaagtagactccattaaaccttttccttccttcctccccttctttctttctctcccattcttctttcattcttctcgtccttccttctatcctttcttccttcctgcctccttttcttcctctcctctgccctttctttcaggtcttttttgtggtaggaactggtaagaaaaggaaaggaattccctaagattttaaggaaacaacaacaaaaaccaggttatgtttggtgagagagttggggcaagaaactgcatcttctaatatggaatccaggtaatttatcagttttttttcatagcatgactacggtgagatttcttgtaagaaaaaaaaaaaaataccagcatcgctggcctcatatattggattatacttaaggggatcaagggataagatgtttgaatttggagatgtcttgaaaaatcctgtggtgagcacaaatgtttgcagtgtctctgctggactcctcaaattgggaaaaaagagactctggttctcatcatagactcaaaacctgaggaaaagcgagatgcgattattagataaactggcaatgacacgcacaaaaatgtgtctattccagccagggcttttcttttcagttgtttgttttggttagagatgactttggggaactgcatgtcccactggacattccaagctgcgttgtcggagtcgcgggtcgcggcctccagtcagcggagccgccgcccccagggtccgccacccagaagtcggcggaggggggcccgccggcgggagcgcgcgccccggtcgccgtctgcgggtagaagcagaggaaagacggtggcctgggagcgcgcgaggccgcacgtgcgcgcgcccgcccgcccgccagccagtccgctcgcccacgcgcccacgcacgcgcccgcccgcccgttggcccgggaagtctcgcgatgccgtagccggctgctcccgctgcgggtggctcgggctgttgctgtggtttcctgagttgctgctgctgcggcggcggcagcggcgtctgtgcttgtggaggtgtcggcctctgggcggatgttgacattgtgttgttgttattgctgatggtaatggcggcggcggtggcggcgacggtccagaccccatcccctctgtagccggagccgagacagccgacagcgaactccgcggcctcggagccggcggcagcggcgactcccctcagcctccgccgcctcgcccgccggtaccccggcgccaaccccgggagtcaggccctttgggcaggggagctcggaggctcaggatggcggatttcgacgaaatctatgaggaagaggaggacgaggagcgggccctggaggagcagctgctcaagtactcgccggacccggtggtcgtccgcggctccggtcacgtcaccgtgtaaggcccggaggagggcgagggcgggaggtgcgggctggggtgggccccgttactccacgggagccccgtttcccctgtgtccgtctggtgtcgggggccttccgaaagagtaggcaaccaggaagtgagaacttggcttattttcatttgtttgggtctccgaagtggggacggacgctgtccttcctcctccacacacccctttagcaggccctacaggcccgggcgatgtgacgatcccagtaggcacgggttttcattagggtctgccctgcgggccacccttcctcttcagggtggaagtacgtgtattgacagggagcctccttgttttctcgcccagttaccctgtggttgtctgtgcctttgcacccagtgacatggctcagaggccagatctgggccgtgtgagaccccagtgacaattggcagcgaagctccgtttcgtgtctatttcacacatacccacaggtctcccagtttttccactaatttccgcagaactaatgcaagttcttgtaattgtacgtgataaaaatatatagttgaacacaaatttaagatatacagaaagaaatatgtttacaacaacaacaacaacaactacgtgagggacatacactctgctcaggttactgagggaaaattgtagtcctgaagc

SEQ ID NO: 10087 - DNA, 6000 bp, Homo sapiens
caaggaaaagacaatggaaaagttagtgttgtattggcctgggcatccctttgattacagtcatttaaaacagatttttttttttttaatcatggaaactttcaaacacgtaaaagtagagagaatagtcaaatgaatctttaagtaccactgttcaacttccacagttattttttttaatttttttaaaattatactttaagttctaggtttaatgtgcaggtttgttacatatgtatatatgtgccatgttggtgtgctgtacccattaactcgtcatttacattaggtatatcccctactgctatccctcccccctccccccaccccacaacaggcccaggagtgtgatgttccccttcctgtgtccatgtgttctcattgttcagttcccacctatgagtgagaacatgtggtgtttggttttttgtccttgcgatagtttgctgagaatgatggtttccagcttcatccatgtccctacaaaagacatgaactcatccttttttatggctgcatagtattccatggtgtatatgtgccacattttcttaatccagtctatcattgatggatatttgggttggttccaagtctttgctattgtgaatagtgccgcaataaacatacatgtgcatgtgtctttatagcagcatgatttataatcctttgggtatatacccagtaatgggatggctgggtcaaatggtatttctagtttagatccctgaggaattgccacactgtcttccacaatggttgaactagtttacagtcccaccaacagtgtgaaagtgttcctatttctccacatgctctctagcacctgttgtttcctgactttttaatgattgccattctaactggtgtgagatgctatctcattgtggttttgatttgcatttctctgatgaccagtgatgatgagcattttctcatgtgtctgttggctgcataaatgtcttcttttgagaagtgtctgttcatgtcctttgcccactttttgatgcgattgtttgtttttttcttgtaaatttgtttgagttctttgcagattctggatattagccctttgtcagatgagtagattgcaaaaattttctcccattctgtaggttgtctgttcactctgatggtagtttcttttgctgtgcagaagctctttagtttaatgagatcccatttgtcaattttggcttttgttgccattgcttttggtgttttagtcatgaagtccttgcccatgcctatgtcctgaatggtattgcctaggttttcttctagggtttttatggttttaggtctgacatttaagtctttaatccatcttgaattaatttttgtataaggtgtaaggaagggatccagtttcagctttctacatatggctagccagttttcccagcaccatttattaaatagggaatcctttccccattgcttgtttctgtcaggtttgttgaagatcagatggttgtagatgtgtggtattatttctgagggttctgttctgttccattggtctatatctctgttttggtaccagtaccatgctgttttggttactgtagccttgtagtatagtttgaagtcaggtagcatgatgcctccagctttgttcttttggcttagatttgtcttggcaattcaggctcttttttggttccatatgaactttaaagtagttttttccaattctgtgaagaaagtcattggtagcttgatggggatggtattgaatctacaaattaccttgggcagtatggccattttcacgatattgattcttcctatccatgaacatggaatgttcttccatttgtttgtgtcctcttttatttcattgagcaatggtttgtagttcttcttgaagaggtccttcacatcccctgtaagttggattcctgggtattttattctctttgaagcaattgaacttccacagttattaacctttgacaaatcttcatataacttgttaagacatggagtccaaaatactgttggtaatgtaaccaaatttggagatcatggagagtaatttatgcagtgtgctttgagtatgaacaatgtatattctgtatgtacaagcccagaaaagtagctggagacaagaagtgcttaaagattaaattaaatttgtcttgggtgaggctattacaatgattcctcatttaagctcatcttgacattattttcaccatcgtaaccccagttcctggttcaatgcctagcatatagtaggtgctcaaaaactgttgaatgaatgagcctgcttagcagtttagatctcagcagcatgaagaagcccatgcattgtagtataagcaacctttgcagaatgtttcttaatgtgtatctggtgctttctatgtccaagatctttactagctgtgttggggcctactccaagtgccttacatgcagtaactcctttaattcttgtaagaaccctatgaagaaggtactattataattttttttgtgtttcatagataagttacttgtaagttggtaaagatcacacagatcataagcggtagatctgggaataaaatccagagtctgtgcacttagctactactctgctgtggcatctgaatagcatctatggaacactcaacacatttggggcactttgctaggtgccttactgttgggttaactcacaaaagtcactcctttgcaatgccagataacgagagggtgctgcacatggaacagcctttctttctttcttttctatcttttttttttttaacagactttgccattttttttgtgaacctaaggcacttctaagtgctgtgtgggagggaatgtggtagactgatttcattgagactctgccaaattctggtcttgcggccatcaaagacgcatcatttcctccaagacttctaaagggggctattaccacgggcctgcaggttctggtttgcattcagaggagacactatcttcttaaatgagacatggaagaggaagtgtcatgaactgtaaataaggctgatagggaattgtttggtgatggggatggagaaaaactgccctctccaaaccaggttccatctcccacccctttatccaactttgccagagtccatcctattttatttgctgagtttactagcaggaagagaggagtttctttaaagattctctcccctccccaaataaatacctcccagataaatatgagtacatctatatagtagagcactatgccaacattgaaaagatggaaggatggagctttgttcgcagccagcttaggcaacatagtgagaccctgcctctatataaaaataaataaataaataaataaataaataaataaataaaagatggagctttaaaggttgatgtagaacgaatctccagtgtatattataaagtgaaggctgggcagggtggctcgtgcttgtaatcccagcactttgggagactgaggcaggaggatggactgagtccaggcattggagaccagcctgggcaacatagtgagaccttgtctcaaataaataaatcaaatttaaagggaaaaaagccaaggctcaaatagcatttataccaagcaattgtgggaagagaagggtgacatgtctacatacttgtgtttaagaatctgcttggaaaaaaaaggaaacataaaaatgcctctgccaaaagaaaagtcttttcactctaagcctttttgtgtttttccaaaatttttttttgccatatacattcattatatttcagcattaaaatatttcacctgtcaacttggaaaagtaaaagcgtgaatacagtaaatatttaaaaacagatgaagataagtaacaggttacattaattgtatacaatcaatctagtttgaattaggtgtagatataataattctgtgtgtttatcttggtgaagaatggtcctttaggttgtcattaaaaagcacctctgggaggtaaaagacataggcatctggaagattcatatttaatgaagttaggggacatttgatgtcactccccaggtgtggggagatatggacagaaaaccagaaggaacgaatgtggtcaggaaggaattggagttcccctccaaacagctgccacaagaagtccacacacgtggagacagttgtgcaatttggtcacagagtgtcctaggtgcttttgcttcattgctcctccactgaagcacgctggcagctggcctccttcccctgggactaaggatatcttggctggaagctctgctctgaaaaggggcatggccaaactttcactagggctcttcgttggggagcacgatggacaaaagccttcttggggctaggcaggtcacttcaaacttggagccgccaaatattttgggaaatagcgggaatgttggcgaactgggcaagtgcgttttctgattaagagcaaccagattcagctttttaaactacaattatactggccaaacaaaatacccttatacaaaaaccaaaactactggcaggagtcgctgccagcttgcgacccggcatacttggctgagtatccgcttctcccttgtggctccaaactgctgcagattctcggccacttcagacgcgcgcgatggcgaagagggtcctgcactttgacgcgcctggtgagggagcgctgctcttcgcagcgctcctggtgatgctccccaaatttcggggaccggcaagcgattaaatcttggagttgctcagcgcccgttaccgagtactttttatttacaccagaaacaaagttgttgctctgggatgttctctcctgggcgacttggggcccagcgcagtccagttgtgtggggaaatggggagatgtaaatgggcttggggagctggagatcgccgccgggtacccgggtgaggggcggggctggccgcacgggagagcccctcctccgctccggccccgccccgcatggccccgcctccgcgctctagagtttcggcaccagctcccaccctgcactgagtcccgggaccccgggagagcggtcaatgtgtggtcgctgcgtttcctctgcctgcgccgggcatcacttgcgcgccgcagaaagtccgtctggcagcctggatatcctctcctaccggcacccgcagacgcccctgcagccgcggtcggcgcccgggctccctagccctgtgcgctcaactgtcctgcgctgcggggtgccgcgagttccacctccgcgcctccttctctagacaggcgctgggagaaagaaccggctcccgagttctgggcatttcgcccggctcgaggtgcaggatgcagagcaaggtgctgctggccgtcgccctgtggctctgcgtggagacccgggccgcctctgtgggtaaggagcccactctggaggaggaaggcagacaggtcgggtgagggcggagaggacctgaaagccagatctaactcggaatcgtagagctggagagttggacaggacttgacattttgcgatctttcatttaccagtggggaaactgaggctcagagactggcccaagattacccagcgagtctgtggtcgcctgtgctctagcccagttccttttctaggactctggtttgcgacagggacctcggctggagcatgtcctgagatgccgacacaccctcaggctcttgggaggctggggtgggaaggcgcctggggttggcaggcaggaggtgcctccgcaggcgagaacaggcggtgaaaagttgtctggctgcgcgcaacatcctagtccgggcccggggaagaaaaccttgccggaatctcaggccgggtctcccggatcggacggtacactcggttctgcctctttgcgggacccggcccgttgttgtcttcatgctcgaacacacttgcacaccactgtgtgaagtggggtctggagcggagagaaactttttttccttccttggtgcaggacgccgctctccttgcagagcgaagaagggggggaatagggacttgtcctgggggctttgacagcttccccaa

SEQ ID NO: 10088 - DNA, 6000 bp, Homo sapiens
tagaagaaagagcttcttgaatccatacaatttccagtaaatgatgccattttctatatgtatctttcttacctatgtgtttgcctacatctaacaataatgtagcttgatgtatacagtattttgaaaatctgctcattatgtaacttcctgaattccaattctttttatctaatatgtaacatttttgcatgaatactgacacaaaataatacagggcaagtggtttgcctttagagtcctattttgttttctctttcacctgcccatccccaggttcagtgtcttccaacatatatttgggtagcatttagcatagattaaaaacacaatttttattgtgaggtcctcgaagagaaaccacagactggaagtttgtatttgtaacacaaatatctgatgaaggagctatatctataatgtactaagaaatcttaaaactcaaaaataagaaaacaaattaattacaaaatggacaaaagatgtgaacaaacacctcaccaaagaagatatacagatatcaaatatgcatattaaaatatattcaatatcacgtcattatgaaataagacaaacagatgccacaaaacatcaattagatatggctaaaacccaaaacactgacaataccaaatgctggagaggatgtggagtgacagcaactcccattcattgctgggtgggatgcaaaatgatacaaccactttaaaagacattccggcagtttcttataaagttaaccataagcttaccattcattcccacaattatactcatagctatttaccaaataaatttaaaattatattcatataaaaacctgcacacaaatactcatagcaacaaacaaggtttcctttaataggaaggacaaacaaaatatggtacatccttacaactaggtatttttcagcaattaaaaacaattaatgagctgttaagctatgaaagaacatggaggaagtttaaatatgaattgctaagtgagagaagccagtctgaaaacattacgtactacatattccaactaatgacattatgggaaaagcaaaactatgaaaatgataaaatcatcagtgatttccagggcttagaggggctaaggatggatgaacaattggtagatagaatattttaggtcaccaaaactgttctgtataatattgtcatggtggatacattttgcatttgtcacaacacagtaaaacacaaactgggaaatctaaaataacctagtgaaattagttaatgataatatatcaatgttggttcttcaactataaaaattttactacactatgaaagatgttaaataataattaaagaaactaatgttgaggatgtgcaaaggattattaggaaaatctgtgccttatgcttaatttttctgtaaattaaaactgctctaagccttgttgttaatgttaaaaatgagctgaaaagaagtaacacctcaaatggagactaaactgaaatgaaatgctttttgttaaaaaatataaaaaataggaagtgaatataatgtaattttttctgttcagtgtttttaacaactaaatgcaactggaatgaagattccatcttttgactgtgtatttttattaatgtgtgtgtatttttattatttttaaattttaaatatattttaaattggaatatagtttaccaaatgatatccattatctagtacgagtattaattcaatgttattttcattgtgatatgtttagcaaaaccatataaaacaccttaacaaataacaaatattttgtttttaaaactacttcatgtataggtaataaaataataagtagtataatatctgaaattttttacttcccttcaaaatttttaacttaggtgaatagatgcaattttcctcttttcagggatactcgcccccccatctttttgtctctttctacattccttgcttttgttattattttggtgggtgtaagtttattttacaccttttattttggaatgattttatcagacctgagaaaaaagtagaaagttttgtatattcatcactggatttaccttaattttacatattgcatcactatagtagatttaccatactcagaattaacattgatgcaatacggttaaactacagatgttatatttatttcaacagattttcccactaacattcttttttggttccagaaaacaaccctggatagcacatcgaatgttccagtagtgtccctgtgtaggcttttctgatctgtcgcagtctcaatttttctcgattttttatcgtgttgatacttttgaatagtattggtcccatattatgtaaaatgtccctcaatttgtccttgatgtattcttgtagctggattgagataatgaggtttggaggaatattacaagagtgaagcattcttctcctttcatgacataatgagtacatgaatggcaacatgacttttcatggtgataatagacttggtcaagtggttaagatgctatctgctttccggatttctcttctataaagtggctgtttttcccttttcattcattattttttgtaaatgtgtcagtaattgaaacccacactcaaggagacaatatatccataaattatgtggaagtcttgtgtaaggaagacttgctcctggttcttatttatttatttatttatttattatgtattcaatcatttatttataatggtatgaactcctaggtatactgttttgtgaatttgaacccattattattagtacttattttgttgcttgaattattcaaactttggctatgagagctctttccaattggcttctgaattcttttgactatttctttttctttttcttttttttttgagacggagtcttgctctgtcacccaggctggaatggagtggtgcgatcttggctctcagcaacctccacctcctgagttcaagtgattcttctgcctcagccttccgagtagctgggactgcaggcgctcgccaccacacccagcgaatttttgtatttttagtagagacggggtttcactatgttggccaggttggtctcgaactcctgacttgtgatgtgcccacctcggcctcccaaagggctgggattacaggcgtgacccactgcacccagccaactattcctttttttaaataaaaaaaaaaaaaatctggagaaacattatatgaatagtgtttaggtcatttcaatataatgcaataacttagcacaatatcattctgttacacattcaaattatactttttggtcattaattaatttatttaatactgtttatggatcaccagtccatattagaaactgttctaaatgctgtaaataggttaggggatatggtcagagagatgtcatagggtgctgggtgatgcagaactttgcaaacctttgcaaatatctttggctttttttttttttttaacataaaatagaaagcccctgcagtgtgttgagcagattaagttacccacttaatatagaaccaggtcactccacctactgttttaaaaatagactattgattgactagtgttggggtaggaagagcagtttggatatgcaatacaggtgagattcatgcttggattgtaactgtgaacagattgtgtagtggatctctgatggattagatgtgaggtgtgggagaaatggagaagttaaagatgattccaagtttgaagtgctgaacaaccagatgataaagttgcataatgtgtgcccacacatacgtgtaaaaagacacatatccctatcatttatatttttgaaaatataaaatattgaatgtaatgtaatataaaatattaagtgtcaacataataactgaagagtgtaaagtgaatctctagggcataatgtataataaaattaaaaatgaatacattattttagttgtttataaaagtaaagattagcctcaggtagataacaggtttcctcccctatatattttgtgtcattttatttgtatgttttcattgaaaatcacattccagaatattttcctttaatatcattttgaatcagtgataatatgttttggatttttttttcagttgtttcttcatcagatttacatatctcagaggactaggagtttttctaaaagctcttttgccaggatgtttttcagatttcatttttcattctgaggctatctgtattttctataacatagtgttgtggaaaatgtgatgctgactacagattttgtatatcagttcaacagatttccaaagatatacaatgttaaaataatgtttacttctttttccccaggttacaaaattgttctctatcaaattctaatctcatagtttgctatcttttcaatgtttatatgaagtgaagaattcatcattttatattgtgtaacagttattttaagttcgttgggatttgtaattagtactgacaaaaataaatttttcactttagaatgctttacatgcacatgcacatatatttatatataaaacatatataaacatatatatgccacttctctttaccttagacaggattttttaaatgttacatagtaatgtactaggacttttaaaaatttaactttaagatagcactttgctaatgttaaatacatctcaatgcaaatgtgtgtgtgtgtttgaagatcagtgcatccagaactcagagatgatgaaaatgttctgtctattcttgctttggaatttcagataagagtagtcatattacaaagcagagataaaaggagaaagcaagaaatcattcaattgctggtaaagtaatactctacacagcaaatcacaatagcgtgttatatatagaaataagatcagtcactgttttcaagcctgctaaataaaactgaactcttggaatggcataccatttgacctttcaaaggttctccagcagtatttaactgatgcaaaaggaacacacttgcaattttctacttttgacatgacagaccctcctcttagttcacacaatgttcaaaaggcacaagtccctcgcttcggaacgcaagagagcattactttcccaaagagctacacggttcatactgaaggatgatatgagaaattttcactttttgtcaaaacttgtactctcagcgggccctctaagaccaactccagcagtcaaacattcaaaaacgactcactttgagattgaaatatttgatgctcaaacaaggaaacagatatgtattctggataaggtgagtttatttatttatttatttgtttgtttgtttaagtgtttcttctctgccccaaatattattgattgcttgattaaattctaacacgactgttctgaaatacatttctgacttttaccttaattttgtggtgaacaggatgcatactttatgcattgttttaatagaagatgttcaatgcatctctcatactcaatttaaattaattaaatggtagataataatgaggttctgtcattggtctgtgaattttatgctgtcattgaccattgtccacaggtaaaattacaaatgctcaacctattttcctacatgtaaaatgtctccaggtttttgtcttcgtgtacttcattgtatatacaaattatcatagagtttgattagtttctatagaaaatagtaagcaaaagccacagtagttgttagaagtaacatgtaatatgtctgaaaaaatttaatcatttaagcattattttgaattgattttattatttttcttaaaaagtgactacctcactttttatgaaagtttacttgcttcaaaaacactatttaagttcatgaaaataatgttttgaaatgttactcgtccaaatccatattcacaggtgttgcactaaggaatgagaaaatatactcttcttaggttagaaaactaaattataaatatatgtttatattttagataaatatatgcataaataatattccaagcattttcagtttttaataaatttgaaaagtactattaacttaatatgagaaaggcatatttgt

SEQ ID NO: 10089 - DNA, 6000 bp, Homo sapiens
tttataaaatatgtttttgtaggagtagattagctatcaatttcaagtcacatatcaactgagattaataaacagttctctgaatgtgaaaaatattacagcttatttttcacatatttgcaaatacttttggagtccagaaaacaggttagaataggtagaattttaactctaacagtagtgttatttcaattttctgactcttatgtccacacatttcctactttttcagtcccaaaagtccgtattatcccagcattcacaacttcatctgatgccagttatccaagatgctggatgcaaacaataaccaaagaatttcctggcaagtcaatttggctcatcataaactctagtagccttggcctcatgctatgctgcaacatctgcaatcctagcacattgatgaaagaatgattaaagaagaaaccaccaccatcaacaatcaccatgtctcttcggctcactgtaattcatctgaacatcttattctttcttctttgctacataacttcctattaataatcacgaacagtgtgacaactttattctgttctcaatattgatagaaaagagataaaaagagtgctgattgtgatatggacatctttaataagtgaaatttctgataagtaagcatttcatgtattgttaagttataaaatactttctatatttatatcctcattaatttattaaaatggtattaatgcattttttaattgaacacgcatctgataacttgttaaatttaaaaataatttaacttcacattaataggtagaaatgtgagtcattagcaaaaagaagagattctaggacttcaggaaaaaaatgcttaagaaataacactaaacaaaaaatatttgatgttttatgttcattaacttaagacataatacacacaattatggatacattacaatattatctatgttgtgaacttcaagagttattgattgcttaaatatattttagtcaatatttacctttgagatcaaaataattaatatcactgtacatctatcctctttataaaattatgaatctgaaaacttaacttctttagggtatcttatcgtttcattagggtatcatataatttctcatctaaaatctaccatgggttaaaattttgctttgcttgtatttttcaccaaattcccccaaagaaagaatctagctaagtgacaaaaatatttaaaactgatttgtaaaaaattgctacaattatatgaggaaaaatgttcttgagtttatggagttttatttaaattgttttagtaaagactgttgcttatattttttaccatggtttaaaggggctgtgtgccatgtgttgagctactattatctgaccacagacgtcaatcttgttatttccttgatttggtccattgtcttcattgtacacaaacaaatcgtgtgcatgtttttatgtacacgaaacagtatttttctttaagtaatgcttgcttatgatccttcatttcttgttttctcctattcatttatctgacctatactacctatttggaaaatcgcttttagacttaaacctgaaaattaaaatattttcatgtattcattgctcccattcatgcagaattttggggtagttctctttttctgatcaacctggctatcaaatttattctttacttctgttatgtaggacttttctccaatagactcaatcccatgggtgaaagtttccgtgtcttaccagctgtgagactacttggatcacctaatctcatttcctcagttttctcatcattaacatggggataataattacaccaacatcagggttgaagtgtcagcattaagtaaaatagttaaggtaaaaacgtcacataatgctttacacatagcaaatcttcaggaaaaactagcaaggctttctgtcaaaattgcttttcttgaatctttgaatgcagggaagatacatttgggcttattgatacactgaacctaactataatattaaaactttttatgaggttagtaaactttcaaggcaccttatcaaggttactttgaatatccttccttcaggaatacttagtactgaagtcacacaaaagcacagatcttgggagacactaaccacttgcatcttttaaggtcatagtagctattccaagaaatgagaaatgcaaacaatagggcaccaaaaccaatattgatggcatggccttttgttgtgcaaaacaataagtataaaagaaaaatataaaccaaatctagttttcatgcaatgccatggttcaatgtaattgtgttaaaataaaaagtattaatatgccaagacatcaacacgtggccaaatgtgaatctcctttgagcttgaagtccaagtcaaaccaccatcattaccttttctgattaaccctccttagatcaaaaaatgattttcattgttgtcatcagaacttcatgaactttacagcttcaatgaactttacagctgttcattctttcagagatgtgtaatcaatattattaaagaactatgagaaagatggctgcaatttaaggtggagaatacaaagaattttgctttctgtattctcaatcatgtaacttagctatgttgggagaagataacacaattatgcccatgctgaccagcgtcccaggttttctttgacaaaccagatttaaattctgtctttcttctctttagatatagttagacaattttattccacctttgattcagaaaatattggcattgtgttgatttatgtaaagctatgagtactttgaggaggagaacgaagtaacttttttgttgagaaaagaagaatttaatcttgagtgcctggctctcctaggacactgggtatgatttagatgacagtagtgtgtgtgtgtgtgtgtgtgtgtgtgtgtgtgtgtgttgtggtggggtgaggtggggggcggataaatatttccagaggtgggatttctttagaatggaatgacaggtagaaaaatcagagaggcatgaggtaatttaggggaaaaatgagtttaacattgtagtatagaataaaaaatatatttaaaccatttgtagtagaaggctttaaattctaggctgaaaaatttggttattttgtggccaatagtaaataattggagatagatgaacagggtagtcacatagacatgcaaccaacggaagggaagaaggcttgaagattgtcttctccaaattcctcattttactgatgaggatactgaagcctgtagaagtaaaggaacgagctcaaagccccattaaactcatattagttttactacatatttctgggctttagatatcgtagttggtattctgcttaaatatttttaagtaactcaattataattgtaggggagaggggagcttacattttgaatggtcctcaaatagaaacataaattttaactttccatctcacccgtgaggctttttgccaaactgagaaactgattcactgctcttcctctaaatttgcttcatccattcggagcacattataataaaaagaacctgctttcagacttctggtgccaaaacatttcaggaaaaaaagaaatcaaagatgagctttcacctctttacaaaattgcatcactgctgctttattctttcatctttattgcaaatatttaaacaaaaaacaaatgtcaccagctaaagatagtgaggaatttattgtggagacaaacaaggctctagatatgtcaaaactggtgagctgactcacctttattaggtgtgaacggaagcccaagctttacagtggttactatacatgaaattaaatgagatatctttcttctataatcagacctttctgtaagtgctttctctgcagccttttgtttttaaatgcctgtgtactaaaattgtccttcaaatgtatctctttgaaagaatgaataaatcgagggaatatactaaagcaagaaaagacataatagaggtgaagcatagaaagttgattgttttaactgttttttttttcactgtttgtaaatctcccaatgctatagggcacaatcaattaaaataattaatttttcaaaaccctgaatttatttgaccgaggctaatttcactggaatgtatgtcgtgtatctgcatatcgtccaatttctaaaatactaaaacattttatcaatgaaataaatgaattaaatcgccacctatgaaagtacctggcacactacaaatctcaatagtcaaattctttgactccttgaaatctcaaacagagctaccgcctctttatttactctacaatttacttctgaagaaaacattgagtaattatcctattccagccatcaaagtatgggaagaacagaaagagtcagcagcggtaagcggtatgggtgtttaagaaactagccacggaccagcagagcctgcgaatgcgcggcgatgtgacgacaaggttgttgatgccacagcctgtgagggacagcaggcaagatgccaaacggagggacccgcgtctctaagggccgccggctgagctggggctgatctcccttccgcctcccgggaaccccagtcctcgccagcgtcgtcaggattccttgccctaattatcccgggaggaagacgcgcctttcccggagaccgctaggcaacactcaccaaggcagcctccagattacttccctccgtgggtgtgtgacttcgtcgaagcaactcacacttacagtagattctcactggcgaggctgcgagcagcagagggcgggggagctgggaagaggaggagggaaggagggtgggaggcgctgagctgggaggcagaggagacgccggagctccagacacagcaggagcgcgccttggcggtgcagtttcaacctcgacttcgcagccgcgcacacaccgcctgctccccgagcagcgggaaccgcagcagctcctgggccgccgcagcgcagctccgcgctcctaccggccggcagccgtcagtccctcccctcttcagcactcagcccgcagctatttccttctgccagtctctttgaactctggatctttgcttttgctcgctgctctcctgtttttcattctccacattttctcaagtcctctttctttatccttagccaccctgcttttttcctccttttttaaaaaatcggagatttcgtcttaaaatgatttgccttccttaccttcgtccatttcaacactgaaggctgcaaagaaccttcacctttcccctagtggtatttaaaaattctcaatccgtaaaaagtctttttgaaaggcaaaggaacaggacccaggaccctctcgacacccttgatccgagtccagatctgcactagcaaccagaactaatatttcatttaaccccaccaaagggggaggcgagaggagccagaagcaaacttcagctgtctcagccggatccgtggttcctacatttggaggagccgcgtgccagaaggcgtaggaccccaaggggggacaaggaggactcccgagtctcccttcgccgctctgcgaggccgaagcggtggactgagccgctcgggacagcggcaccggaggaggctcggagaagatgcggggctcggggccccggggtgcgggacgccggcggcccccaagcggcggcggcgacacccccatcaccccagcgtccctggccggctgctactctgcacctcgacgggctcccctctggacgtgccttctcctgtgcgccgcactccggaccctcctggccagccccagcaacgaaggtagggagatgggggtggggaccgtggcgacctggggcggaggggctaggcggggcctgggagttcaggtctcagcgcgctggacgctgctgctgcagactaaatcgcagtctcatctcaaattggtatttgtcgtccccttccactggccttttcgctcccctctgcggtttttggttgcattgtttgacgttagctgcggagtgctgggcaaggaacatgcgtgtggacagaggctggttg

SEQ ID NO: 10090 - DNA, 6000 bp, Homo sapiens
gccaaaattgacaaatgggatctaattaaactaaagagcttctgcacagcaaaagaaactaccatcagagtgaacaggcaacctagaaaatgggagaaaatttttgcaacctactcatctgacaaagggctaatatccagaatctacaatgaactcaaacaaatttacaagaaaaaaacaaacaaccccatcaaaaagtgggcgaaggacatgaacagacacttctcaaaagaagacatttatgcagcaaaaaaacacatgaaaaaatgctcaccatcactggccatcagagaaatgcaaatcaaaaccacaatgagataccatctcacaccagttagaatggcaatcattaaaaagtcaggaaacaacaggtgctggagaggatgtggagaaataggaacacttttacactgttggtgggactgtaaactagttcaaccattgtggaattcagtgtggcgattcctcagggatctagaactagaaataccatttgacccagccatcccattactgggtatatacccaaatgactataaatcatgctgctataaagacacatgcacacgtatgtttattgcagcattattcacaatagcaaagacttggaaccaacccaaatgtccaacaatgatagactggattaagaaaatgtggcacatatacaccatggaatactatgcagccataaaaaatgatgagttcatgtcctttgtagggacatggatgaaattggaaatcatcattctcagtaaactattgcaagaacaaaaaaccaaacaccacatattctcactcataggtgggaattgaacaatgagatcacatggacacaggaaggggaatatcacactctgcagactgtggtggggtggggggaggtgggagggatagcattgggagatatacctaatgctagatgacgagttagtgggtgtagcgcaccagcatggcacatgtatacatacgtaactaacctgcgcaatgtgcacatgtaccctaaaacttaaagtataattaaaaaaaaaagttgaagaaaaaaagagttgatgttatacatgtaaggagcagatcttaatgatgtttgttttgctgtcttaatcttaaagtacatcataggaatatcatagaactgaacaaatatctgtggaattccatgatgtttaccatattaggcttctctgaaataccataacacaatagggtctgagctactatgtgcaatgactcctaatctatgttctatttcccacttcttcatttacaacatgagaatactttacttgttacctggtgtcagttttgtaatttctccttttcagggatgacaataacatcggttgaagaaaaatctcaatcagagaagttatcttacatcttcctcaaggaaagtatgttgttgctattgtctcatgatataattcctatgcactgtagtattttttcattataatggcacattaatatgagataataggagagcagtagcatgcctatttacattattaacaatttaaaacaatcttaagaaagattttctgcaataaatttcaactgtacaagtaaggtttaggcataaacaagtccaggtaatttatacatactatgaattactgagagctactcaagtagatgcctaaagggaaacaaaaaataattacctccatactaaaaatgtgattgttgacaatcatactagtttacatctttgttcccatcacatcagggaagttatattgggacattgtagttgtttgaggggatacagcataaaagatagacttaaatagcagacaagggctgctattcccccccaccgccaacttccataatcagctggtgatggggaaaaaaaaaaaaactattattttttagagctagatttatgtcaagcaccattcacatagtaattctaaatgataaaggggagagccttttgtgtcagagagacctggaaggaaatgctggctctatcatttacagacatatgagactagtcaaattatttcacatctgtgagcctcagtttctatttctgtaaaatgaggttaattcctccccaaagggctgctgtgaagtattaaacaagataatgcatgtaaagtagtgatggcaatggctggcctttgatgagtactgtttatttgcaataattataatttcatttgttttactattttgaatgtaaattttattgacgtataacttacattaaataaaatttacctttttagtgaatagttctatgacttttgacaagcacatatagtcttaaaaccaacaccacaagatacagaaaaatttcatctccccaaaaatttcgttgtcataaaggccctctttgccatcatcacactgtggcaaactctaatttgtttttgtctttccggtatagccttttctagaaatgtcatatgaatggaattatgcaatatgtaacttttgaatctggattcttttactccgcataacaccattgagctattctcatttagtttgtacatatattactattcttagtgcagaaaaattaagtacagaaagttaggtaatttactcaaatccataattattagaagacagaaatttggttctggttctttcaaagttgtgtttcttgtttgctatgtcatattgcctgcctcctgttggcctatagcttattaaactcccactgccaattctggagtttatgctgatattcagacatttagtcttctacactcctgcaatgaaatagacagaaagctaagatgccagattgtattaggatgcacagagagattctgaacaaaattcttatgttctgccacactgacattcatagcagtcatcattttaccttaatgtagtccatgattcccttcttatttgtaccagatagtgtgaggggcattttgcatatactgtttcctataattcctacaatagtctggaaagctattattcattccatttacggacaaggaagttaagacacaaaaatgccaaccagcagctagagagtaaagccaggatttgcaggctggtatatctctctccaaagttagagctctgtctatgaggacttctgccactcacaatggaagccgttgtttattgccattttgctagacagtttcacatacattatgcaatttaacactcacaaaggtcctgcatatagatggtatcaacccattctaaataggagaaaaattatgctcaagggatttaagtaatctgctcaaattaactagcagagtcagaattccattctaagtccatgccctattcactattccatgaagcactatgccagaagaaaaggaggaaaaagagggaaaggaaggaaaaggaaggaaagaatgttcctatgtgtgttccttgtatagttcactagaataaccttcactaaggttttgtctgttaaatattaggtaagaaaacatatgcaaatgaaatacagtcctaataataatagccgatgtttcttcttgcttccattgcaagaggcactattttaaacattttacatgcacagcattaactcatatatgtttcacaaaaaccctaaaagatgataattaatattattcctattttacagacatggaaacttctgagatttgaaccttggcactcctagagagcctatgcacttaaagcactctgctgtactgtgtaaaaagatttcaaatgtgctttctccaagtgctagaagcaatgacttggaaaacctctatttaaagtagtgttcccccttaaatgggtaccatttggttataaggtatgaacaagaaacactaaatattttcgtccttcgtgcaattggtaaaaagaataagggagatctgggccgggcgcggtggctcacgcctgtaatcccagcactttgggaggccgaggcaggcggatcaacaggtcaggaaattgagaccatcttggataacacggtgaaaccccgtctctactaaaactatagaaaaaaaaaaaaaaaacactagccaggcgtggtcctgtagtcccagctacttgggagactgagtcaagagaatggcgtgaacccgggaggcggagcttgcagtgagccgagatggggccactgcactccagcctgggcgacagagggagactccgtctccaaaaataaaaagaataagggagatctgttttccccaaaatggaatgatattcacaatgttaaacgaatacaaccaaactgcacaataatgtatacaatgtgatacttttaaattaaaatgcataaatgttttttatgcattataagcattaacaccccttctcctaacactaggtgcttctgagggagaaggaaagggaccaagagtaggacattgtcaaacatggttttagtctcattttttacaaagaacatgtattaatatgttgtttgtctaattgaaaatgtttatttcttctctttttttcattctgataaatgtctgtcaatgttttatcacattaagtcatttggggaaacatatagttttatattaatttatttgcctgtactctcagaagtgggtatttaaaaaaactattatgtattagtaaattcactatgcttctgtaagatacctgctgttcaacatgaatttatggaatatttcttgagttatatttttattatgtatttagattttaagatctgtttgtttttatctagagcttttatgtgacagtttctttaaaatacttatatacctaccataatcttctttaaattcttaattctagtacattcctaaggtatttctcattctaatctttgtaaccagtttctcctcctttaacaaaattagtccatactaaaaaaatattgctttcttgttgggactatcctgtctctggctttcttcaaggccttctatgggttgaaacttctctgttcagacttgtcaaactagtttcatttcaactacttgtaatttgtttccttatttctttgagccgtagacttctaatacatctagagatgtcatatagttgattagaaagttgagttcagtgggtgcagacctgcaagatcatattcttcctcctgtacatgatgtatcggtaagttcagttctgttttatagatggcttgtttgatgtactgtctgtcagtggccggattcctgatgtgtaagaggactgctagtgaggtgtctttggtggattcaatctgcactggatttttttaaatttctggaattatcatagcatcctggattaattaatttctgtgtttgaaatcaaagtttttgtataaaaattgttagcattatttcatgtggccaagttcaatagttaagattttagaaaaggttaatgaaaaactatattacattgtgtcttaattggttttgatttttttgtgtgtgtggaaggagggtgtttatatgttttaaaacaagccttctttcagcaatattgacaaaatttagcttctatagcgttttctctttcgctgtgtttacttgtcccttatggtgggtccttgtgggactaatgcagattgagaggtaaatagctgcagagacacctgcctccattgtagaagacccagggcttccatgtgggagaatgagaaaacaagctcaatactgggaaaacatgcctattctctacaattcttcctattacgttttgaagaaaaaatacatgaattatttgggtattgtttttcaaaatggggtatgccatgtgcaaagaatatgaaaaaataagattccttggcataactttatatacagttaaaatagtgattttaaacagccatgatgataataatatttcaccattgtttagacttgtactatttttgaaacatctttatgtatgttatttcctttaatagccaagacagccttgtggctaagtagaacaagtatcacaagtatcgttaactcccattttaaagcaaggaatttgaggaaaacagaagttaggggacgtctccaggtctagagggctgtcagaagccagaatcatggctataattccttgcagtcc

SEQ ID NO: 10091 - DNA, 6000 bp, Homo sapiens
gatcaatttaaagcttgaaatcaaatagttacaagatttaagtcaatattttagtagataacagtcaataaaaatgtagattagataaactacatctattacaaccaacagcaaagagcttttcatgagttaaaaaaaaaaaaaaaactcatgtcggccccagccctgaggctacctgacctgacaaaactcttcacactctatgtgtcagaaagagaaaaaaatggcagttggagttttaacccagactggaggttcctggccaaggccaatggcctgtctctcaaaacaactagacggggtttccaaaggctggcccccatgtccaagggccctggcagcaacagccctgttaacacaagaagcaaataagctaactcttaggaaaaacctaaacataaagtctccccatgctgtggtaattttaataaataccaaaggacatcattagctaataaatgatagactaactagataccaaagcttgcattgtgaaaatccccacataaccattgaagtttgcaacaccctaagctcactatcttactcctattatcagagagcccagttaaacataactgtacatcagtagactgggagctgtacgtggatgggagcagcttcaccaatccctgcaaaatgactctgaagaagacaacaaacactgctccagtcacacccagaagctgactggtccacgcatggctgaagcatgaggagactcatcgcaggactcattttcctcagaatttggacttgtacaggaaggacttcaactgaccttcctcagactaagaactgtttccagtatatacatcaagtcactgaggtggaacaaaagattgctacagtcctattactttatagttattataaaagagctaattactttatggttattataaaagagctaattgccttccatgatcacgccctcataatcgtctttcttatcagcttcctggttctatatgccctctttctaacactcacaacaaaactgactaacactaatatcacggacgcccgaggactctaaaaaaattaaatagcaacaaaaacaacaacaaattgtttgtataatgctattctatccaaggtatgtagcccaggaaataaccaacctgatgtgtgttatgaacaattttaagcctcccatgatcacagtttttaaaataaaattaaggactgctccttttctatgtgacacaagtaaggtaataggtagaaccgaaaaaaacagagctcctcaaaatgtaaccttaaaatttgacacttgtgccgctattaatagtaagcagcatgaaacaggatgtgattctctaaattaaaaaagaaagttacacagtaaaaaaaataagtatatctgtcaaaaatcatatttatgtgagatgtgtcaatactggtctcgtgtcattcagactacttaaaaggaaaataaaaaagatcgtgtttgactccaaaaaggaaaactcagcccctcttgcatgaataggagctacaaccttttagaattgataatcacaaacccctcagacccaaagtaaaataaaagaaaaatatatatcattagacatggataaaaagggactagatcctaatgtaagcatcctaataaaaggagaggttcaaaaacgctctccagaaccagtgtttcagactttctatgatgaactaaatgtgccagtacctgagattccaggaaaaactaaaaatttctttttgcaattagcctaacacgtagcccagtctctacaagtcacctcatattatgtttgtggaggaaccataacagtagatcaatggccataggaagcccaagaattagttcctacagacccatttcctgatgaattcccagcccaaaagaatcaccctgatcatctctaggttctaaaagtctcaattattagacagtattgcatagctaaagaaggaaaaggattcactcatcctgtaaggcagcttagctgtcttagacaaaagctctataatagtaccacaaaaacagtcacatggtggagttccaattacacagaaagaaatccattcagtaaatttccaaagttgcagactgtttgggcccacccagaattccactgggactggacggcccccaccggattatactggatatatgtggacacaaagcttatgctaagctgcctgatcagtagacaggtagctgtgtaattcgcaccattaagccttctttcttcttactgcccataaaaacatgaacttctaggcttcccagtctatgcttcctgggaacaaaaaaatgaagcatagccataggaaaagatgataaatagccccctgaaaaaaatcatacaatactatggacccgccacttaggcacaagatggctcatgaggatattggacccccatctacatgctcaaccgaatcatatggttacaagctgttttagaaatttttactaataaaaccggtcaagccttgaccgttcttgcccggcaagagactcagatgagaaatgcaatctatcaaaatagactagctcttgactacttgctagcagctgaaggaggagtttgtgaaaaatttaaccttactaattactgtctacacatagataatcaggcaagttattaaagacatagttaaaaatatgacaaaactggcacatgtacctgtgcaagtgtagcacggattcaaccctgaagccatgtttagaaagtggttcccagcactagaaaaatttaaaactcttataataggagttacaataattataaaaacctgcttactgctcccttgtttgctacctgtacttcttcaaatgataaaaagcttcatcgctaccttagttcaacaaaatgcttcagcacaactgtactatatgaatcactatcagtctattccacaaaaagacataagtaaaaaaatgagtgagaactcccactaataaaaagtgagagtctcaaaaggggggaatgaaggaagagaaggaccctctcagattattttatattgttttatgctcagtacctgttttaagaaaaaacaacaaagaagtaaaaccaaagacaggcagcctggctccaggcctgaaaccaggcctgggcctgcctgacctaaacccagtagttaaaaatcaactcataacttagaaaccgatgttattcagagattccagacattgtacagaagaacactgtaaaaccccctgccctgttctgtttctctctgaccagcagtgcatgcagcacctgtcacatacccactgcttgcttaaatcaatcacgaccatttcatgtgaaatctttagtgttgtgagcccttaaaaaggacaaaaattgcgcacttgaggagcttggattttaaggcagtagcttgccgatgctcccagctgaataaagcccttccttctacaacttggtgtctgagaagttttgtctgtggctcatcctgctacacatgcacagagaggcaactggaggctgaggagtttcctttgtctggttgctgtggcttgctctctggggtggaggggtaggtccacaagggacacagacctgagccccacccaggttttggcaccagatataaggttcttgaattggtttgatccctgagagcatgccaacagacaacacgaggcagtgcggagcagcgtgctgttttaatgagtgcctgggtgcaggtgggctgaggcctaaaatggcatcagccccaagtgaggatgggacagtggttttatagttctctgtaaagagtaagtgtcccaatctaacgtgactgctatgtagtatctggatggcctcttgatcttcaagggttcatgtctccagccagggtaggtgtcttctggccggctctcttcctgcttctgctatcttgctgacacacgctgctgatgcaagcagccttgcatcttgggactgggcctgagaagggaggagttactcatcccttcaagctttcaggccccagaagaatctttgaaccccctgctccgctggccaccctcctaaaggatcactgtggtgccaggcaggaatgagctgcttgggtatccagagagctcccagtacctttctgctacttcctctacccctatattttgcttggcttggttctctaatttgactcagcttcacataaagtcaggaacttctcctgcaaacagaacttcagcttctccagtggggatgtgtattctggagagggggatcaccctttcccacttccattgttggggcactcacagtgtttgggatgtctcccaggtcctgcaggagcagtacgcttcctgcagagggtgtgtggatcctctcagaattgctggtctgtccttgcagttgacctgcagctaaaattcacaatgcaagcctctgcatgctgctctgtctggagctgcaatctagtcctgcatcccatctgccatgatcactggaaaaccctcatttattttttaaagggtccagaaaatgctaatctatagagatagaaattagattagtggttgcctagggtaggatggatgcaaaatttcagagtggggggttagaggctattgtatagaatcttttggagataatactgattattgtagtgaaagtaaaattctgtgaatatactaggaaacattgaactgtacacactaattggtgagtcatatggtatatgaattatgtgtcaacaaagttttagaagacattacttgcaccacgatattaaaaaatggcgtttgagttgtataattacttcttctctctatgtcaagggcaccgaacaggcaggagcctctcacctgccactgttcttaacagtattataaaataattacataagacaggttacttacgtattctaggtcataaaaattattgcttgactagagtaattgtaaatataaaagaacaccaaacacactaaaataaatatgaggtcaactcaaattttagcagttatattttaacttgattgatttttcctcagatataagtatgagaaatgacagaaagaaacaacaactggaaaagaagcactgcataagaccaggatgtctctgaaatggatgtcagtctttctgctgatgcagctcagttgttactttagctctgggagttgtggaaaggtgctggtgtggcccacagaatacagccattggataaatatgaagacaatcctggaagagcttgttcagaggggtcatgaggtgattgtgttgacatcttcggcttctattcttgtcaatgccagtaaatcatctgctattaaattagaagtttatcctacatctttaactaaaaatgatttggaagatttttttatgaaaatgttcgatagatggacatatagtatttcaaaaaatacattttggtcatatttttcacaactacaagaattgtgttgggaatattctgactataatataaagctctgtgaagatgcagttttgaacaagaaacttatgagaaaactacaagagtcaaaatttgatgtccttctggcagatgccgttaatccctgtggtgagctgctggctgagctacttaacataccctttctgtacagtctccgcttctctgttggctacacagttgagaagaatggtggaggatttctgttccctccttcctatgtacctgttgttatgtcagaattaagtgatcaaatgattttcatggagaggataaaaaatatgatatatatgctttattttgacttttggtttcaagcatatgatctgaagaagtgggaccagttttatagtgaagttctaggtaagtcgtgtgtccaattggtgtttattaagttctaattttcctgtgcctttgaaggtgggcttatataaatataatgtcagaagatagtgtttttatgggaaattatgaattgcaaatgtaagatgatctatgagtctcaaaaatatagaatgttgaccttatagaatcagttagaaccctggtgccatcactgctataggacaccaagagagtcataaaccttcaatgtaaaacacttatg

SEQ ID NO: 10092 - DNA, 6000 bp, Homo sapiens
ggaaaagagagaatttcttgcttagtttgtggaggcgggagggactgaaggagggagtatgtggtctgttgtgagcccttgcattcaggggtaagagctaggcctagataggtgactggggggtgcatatttgggctttcttaggggagacctgatacccctgttctgccaagaggtttaaaagggagatagtatgtatgggtgttgcagtctctttgagaggggctacacaggagcagattattaacatattaaagaagagaggatgattttagggataaagtacagaagttactagcaagggcctgtccaaaaaggtgggggctgtctctaaaaccttgaggtagtacgcaccaggtgagctgacctgaaaggtgggtgtcggggttttcccaggtaaaggcaaagaggttttgggaatcagggtgtaaaggaattgtgaaaaagcatcatttaggtttagaacagaaaagtgggtggtattcgagggaagtgaggaaagtaaagtatatgggttagaaactactggacacactgggagtacagcttggttaatgagcctgaggtcctggactaagtgataagttccatctggctttttaacaggtagaactgatgtgttaaaaggagagtttgttgggcagagtaggtgactggtgaggaggagagaaatgataggctttaggcctatgagagctgcttgggggatgagatactgcttctgtgataggaacggggtgggctctttaagggtgatgtggatgggggtgtggtgctctgtgaccgagggtgtggaagtatcccaaacagtggggttaactacaggtgggggataaggaaaagttgcatgtttcagggtgggaggtcggaggagtagaagaaggttagaagcctgttagaagccttggaggggtctgggttgatgtgttgggtactatggggaatgtggaagtggagagtagtgtggagttttgaaagaatatctctgcctaggagcggagctgggcatgaaggcaggactaagaaagagtgactgaaggaaaaggtgttcagggagcagaaaagtggaggggggtcttggggtttggagacttgtccattgattcccacaacagagacttgggaggactgggtgggtcctgaaaatttaggtaaagcagagtaggttgctccaatattaatttttaaaaaacatgcatgcctacctgccaccatcagggttacccttggctcagatgaagcaatggtagttgctgggacatctgttccagggcactgtcagtctttagtggcaaggccattgagatccgagtaggaggttttggccagctcggaaagggatggaggcgatccttgctggagccgctcacagcctgactttcactgagtcctccacagagggggcacagcctggtgagcacagctgggtttgggcatggcctggaccagtagccttcattgccacacttgaaacaggcgccaggtggaggtgttttgctaggaggcttctgtatggagctgtggccctgtgggcctgcagggtaaaggcaagcattggaaactgtttttttcttttactttcctcatcacaactgttaaagactttgaaggctaaattaagaaggtcccactgtggggtttgagggccgtcatcaaccttctgaagcttgcgccaaatatcatggtagattgggtgaggaactgaaggtttgaaatagtggttccttctgggctggctgggtccaggttggtaattttctcatggcttcagttaaacaagagagaaaaagggctgggtttttgtcaggaccttcggtgatttctgaaagtttttcatagtttaccactttatgggcaccctttttgagtcctgcaaggagacacataatcatgaggtcttgatggctgtgtccagaggccctgtcttgataatcccagtgggggtcctggttgggaactgcctctgtgccagtaggctgggcaggagcttgatgatgaattgtattagcatgcacctgagctagggtccaagtacggtgctggtcttctggggtgagggtggaagagaagataagtagctgtcatgccaggttagttcataagactgagtaaggtactgaatctccctaatataagaggtaggatcttctggaaatgaactgagtcttttgttagtttgagagagatcagtgagggagaagggaacatgaactctaacaataccttcagttcctgctacttcccgaagggggcattctagcactggcgctaaagtacgggtggggcatgggccaaagatggtgccggagctagtatgggcaggagagaaggaagaagccagaaggggttcctgctgagggtttgaagagggaaggggggttgagttgataggcattggaggatagatacgggtgtaaggtggcgggatgggtttacaggctccgtgagagggctgtaaggaaggagaatgagtacaggcaatgctagagttttcctgaggagaggatggtataggaaaagaagtgggtgatgctggctgggaagatggtggctgggaagatggtggctgagaagacaatgaggaagcttggggagttaatgaagttggttgagatggaggggtagggtctgggaggggtggacagcagtctgctccatccaatgaggaaaaagaggtagggtcgggaggataaaggcaatgagggcggcgagaatgaagaaggatttgaacaggtaagcaagaattgcagaggtcgggctgtgatctgagtgcaaaaaggcctggacacaaggaatttctccccattttcccagtcatctgcaataactgcttaagtcagttaaaactgtaaagctgagtgttccatttgcgggccatttggacccgttatctaattcatactgcgaccaggctttatcgtataaaaaagacaaggcacttatggcagatatcttgcctgaggcctaaggtttgcagatttttaatgaggcaggctggagggctgttttttggaattgaggaccgggagtttcccataatgaagggtagctcgagagaacagggaaaaaggagaccatcctggacagctggagggagacgataaaaggagttatcgtctccgctgcctttttggttcctggaacgggatgaaatggcttagaggcatccccctaagaccagatgaccagcgagtgcctggcgcacgctggcgccttcttggatcagtgttggatttttggactggagaaaccaagagaggccatgtagattttgccctgttaaccgggctccaagggaaacttaccagtaggcgagatcagtggctgatgcgcatgcacagagaggcgactggaggctgaggagcttcctctgtctaattgctgtggcctgctctctggggtggagggataggtccacaagcgacacagacctgagcccctcctaggatttggcaccagatgtaaggttcttgaatcagtttgaaccccaacagcgcgccaacagacaacaggaggcggtgtggagcaacatgctgttttaatgaacgcctggttgcaggtgggctgaggcctaaaatggcatcagccccaagtgaggatgggacaggggttttgtagtcctctgtaaacagtaagtgtcccagtctgttgtgactgctatgtagtacctggatggcctatttcttgatcttcaggggtacatctcttccagccagggtaagtgtcttctggccggctctcttcctgcttctgctatcttgctgacacacgctgctgatgcaagtggtcttgcatcttggggctgggcctgagaagggaggagttactcatcccttcaagccttcaggtcctgaggagaatctttgaaccccctgcatcactggccaccctcctgatagatccctgtgatgccaggcaggaatgagccgcttgggtatccagagagctcccagtgcctttctgctacttcctctacccctgtattttgcttggcttggttctctaatttgactcagcttcacataaagtcaggaacttctcctgcaaacagaacttcagcttctccagtggggatgtgtattctggagagggggatcaccctttcccacttccattgttggggcactcacagtgtttgggatgtctcccaggtcctgcaggagcagtactcttcctgcagagggtgtgtggatcctctcagaattgctggtctgttcttgcagttgatctgcagctaaaattcacaatgcaagcctctgcatgctgctctgtctggagctgcaatctagtcctgcatcccatctgccatgatcactggaaaaccctcatttattttttaaagggtccagaaaatgctaatctatagagatagaaattagattagtggttgcctagggtaggatggatgcaaaatttcagagtggggggttagaggctattgtatagaatcttttggagataatactgattattgtagtggatgtaaaattctgtgaatatactaggaaacattgaactgtacacactaattggtgagtcatatggtatatgaattatgtgtcaacaaagttttagaagacattacttgcaccacgatattaaaaaatgccgtttgagttgtataattacttcttctctctatgtcaagggcaccgaacaggcaggagcctctcacttgccactgttcttaacagtattataaaataattacataagacaggttacttacatattctaggtcataaaaattattgcttgactagagtaattgtaaacataaaagaacaccaaacacactaaaataaatatgaggtcatcaatcttttgttggtctccttggcatgcacctattcagactgttagtattatgtatttacttcaaattttagcagttatattttaacttgattgatttttcctcagatataagtatgagaaatgacagaaagaaacaacaactggaaaagaagcattgcataagaccaggatgtctctgaaatggacgtcagtctttctgctgatacagctcagttgttactttagctctggaagctgtggaaaggtgctagtgtggcccacagaatacagccattggataaatatgaagacaatcctggaagagcttgttcagaggggtcatgaggtgactgtgttgacatcttcggcttctactcttgtcaatgccagtaaatcatctgctattaaattagaagtttatcctacatctttaactaaaaattatttggaagattctcttctgaaaattctcgatagatggatatatggtgtttcaaaaaatacattttggtcatatttttcacaattacaagaattgtgttgggaatattatgactacagtaacaagctctgtaaagatgcagttttgaataagaaacttatgatgaaactacaagagtcaaagtttgatgtcattctggcagatgcccttaatccctgtggtgagctactggctgaactatttaacataccctttctgtacagtcttcgattctctgttggctacacatttgagaagaatggtggaggatttctgttccctccttcctatgtacctgttgttatgtcagaattaagtgatcaaatgattttcatggagaggataaaaaatatgatacatatgctttattttgacttttggtttcaaatttatgatctgaagaagtgggaccagttttatagtgaagttctaggtaagtcatgtgtctaactggtgcttattaagttctaacttttctgtgcctttgaaggtgagcttatataaatataatgtcagaagatagtgtttttaagggaaattatgaattgcaaatgtaagatgatctatcagtctcaaaaatattatagaatgttgaccttatagaatcagttagaaccctggggccatcactactacaggacacccagagagtcataaaccttcattgtaaagcactaatgatttctttaaactatcacatatcattttgctatacatttttt

SEQ ID NO: 10093 - DNA, 6000 bp, Homo sapiens
aaaagagagaatttcttgcttagtttgtggaggcgggagggacagaaggagggagtatgtggtctgttgtgagcccttgcattcaggggtaagagctaggcctagataggtgactggggggtgcatatttgggctttcttaggggagacctgatacccctgttctgccaagaggtttaaaagggagatagtatgtatgggtgttgcagtctctttgagacgggctacacaggagcagattattaacatattaaagaagagaggatgattttagggataaagtacagaagttactagcaagggcctgtccaaaaaggtgggggctgtctctaaaaccttgaggtagtacgcaccaggtgagctgacctgaaaggtgggtgtcggggttttcccaggtaaaggcaaagaggttttgggaatcagggtgtaaaggaattgtgaaaaagcatcatttaggtttagaacagaaaaatgggtggtattcgagggaagtgaggaaagtaaagtatatgggttagaaactactggacacactgggagtacagcttggttaatgagcctgaggtcctggactaagtgataagttccatctggctttttaacaggtagaactgatgtgttaaaaggagagtttgttgggcagagtaggtgactggtgaggaggagagaaatgataggctttaggcctatgagagctgcttgggggatgagatactgcttctgtgataggaacggggtgggctctttaagggtgatgtggatgggggtgtggtgctctgtgaccgagggtgtggaagtatcccaaacagtggggttaactacaggtgcgggataaggaaaagttgcatgtttcagggtgggaggtcggaggagtagaagaaggttagaagcctgttagaagccttggaggggtctgggttgatgtgttgggtactatggggaatgtggaagtggagagtagtgtggagttttgaaagaatatctctgcctaggagcggagctgggcatgaaggcaggactaagaaagagtgactgaaggaaaaggtgttcagggagcagaaaagtggaggggggtcttggggtttggagacttgtccattgattcccacaacagagacttgggaggactgggtgggtcctgaaaatttaggtaaagcagagtaggttgctccaatattaatttttaaaaaacatgcatgcctacctgccaccatcagagttacccttggctcagatgaagcaatggtagttgctgggacatctgttccagggcactgtcagtcttcagtggcaaggccgatgagatccgagtaggaggttttggccagctcggaaagggatggaggcgatccttgctggagccgctcacagcctgactttcactgagtcctccacagagggggcacagcctggtgagcacagctgggtttgggcatggcctggaccagtagccttcattgccacacttgaaacaggcgccaggtggaggtgttttgctaggaggcttctgtatggagctgtggccctgtgggcctgcagggtaaaggcaagcattggaaactgtttttttcttttactttcctcatcacaactgttaaagactttgaaggctaaattaagaaggtcccactgtggggtttgagggccgtcatcaaccttctgaagcttgcgccaaatatcatggtagattgggtgaggaactgaaggtttgaaatagtggttccttctgggctggctgggtccaggttggtaattttctcatggcttcagttaaacaagagagaaaaagggctgggtttttgtcaggaccttcggtgatttctgaaagtttttcatagtttaccactttatgggcaccctttttgagtcctgcaaggagacacataatcatgaggtcttgatggctgtgtccagaggccctgtcttgataatcccagtgggggtcctggttgggaactgcctctgtgccagtaggctgggcaggagcttgatgatgaattgtattagcatgcacctgagctagggtccaagtacggtgctggtcttctggggtgagggtggaagagaagataagtagctgtcatgccaggttagttcataagactgagtaaggtactgaatctccctaatataagaggtaggatcttctggaaatgaactgagtcttttgttagtttgagagagatcagtgagggagaagggaacatgaactctaacaataccttcagttcctgctacttcccgaagggggcattctagcactggcgctaaagtacgggtggggcatgggggccaaagatggtgccggagctagtatgggcaggagagaaggaagaagccagaaggggttcctgctgagggtttgaagagggaaggggggttgagttgataggcattggaggatagatacgggtgtaaggtggcgggatgggtttacaggctccgtgagagggctgtaaggaaggagaatgagtacaggcaatgctagagttttcctgaggagaggatggtataggaaaagaagtgggtgatgctggctgggaagatggtggctgggaagatggtggctgagaagacaatgaggaagcttggggagttaatgaagttggttgagatggaggggtagggtctgggaggggtggacagcagtctgctccatccaatgaggaaaaagaggtagggtcgggaggataaaggcaatgagggcggcgagaatgaagaaggatttgaacaggtaagcaagaattgcagaggtcgggctgtgatctgagtgcaaaaaggcctggacacaaggaatttctccccattttcccagtcatctgcaataactgcttaagtcagttaaaactgtaaagctgagtgttccatttgcgggccatttggacccgttatctaattcatactgcgaccaggctttatcgtataaaaaagacaaggcacttatggcagatatcttgcctgaggcctaaggtttgcagatttttaatgaggcaggctggagggctgttttttggaattgaggaccgggagtttcccataatgaagggtagctcgagagaacagggaaaaaggagaccatcctggacagctggagggagacgataaaaggagttatcgtctccgctgcctttttggttcctggaatgggatgaaatggcttagaggcatccccctaagaccagatgaccagcgagtgcctggcgcacgctggcgccttcttggatcagtgttggatttttggactggagaaaccaagagaggccatgtagattttgccctgttaaccgggctccaagggaaacttaccagtaggcgagatcagtggctgatgcgcatgcacagagaggcgactggaggctgaggagcttcctctgtctaattgctgtggcctgctctctggggtggaggggtaggtccacaagcgacacagacctgagcccctcctaggatttggcaccagatgtaaggttcttgaatcagtttgaaccccaacagcgcgccaacagacaacaggaggcggtgtggagcaacatgctgttttaatgaacgcctggttgcaggtgggctgaggcctaaaatggcatcagcccccagtgaggatgggacaggggttttgtagtcctctgtaaacagtaagtgtcccagtctgttgtgactgctatgtagtacctggatggcctatttcttgatcttcaggggtacatctcttccagccagggtaagtgtcttctggccggctctcttcctgcttctgctatcttgctgacacacgctgctgatgcaagtggtcttgcatcttggggctgggcctgagaagggaggagttactcatcccttcaagccttcaggccctgaggagaatctttgaaccccctgcatcactggccaccctcctgatagatccctgtgatgccaggcaggaatgagccgcttgggtatccagagagctcccagtgcctttctgctacttcctctacccctgtattttgcttggcttggttctctaatttgactcagcttcacataaagtcaggaacttctcctgccaacagaacttcagcttctccagtggggatgtgtattctggagagggggatcaccctttcccacttccattgttggggcactcacagtgtttgggatgtctcccaggtcctgcaggagcagtacgcttcctgcagagggtgtgtggatcctctcagaattgctggtctgttcttgcagttgatctgcagctaaaattcacaatgcaagcctctgcatgctgctctgtctggagctgcaatctagtcctgcatcccatctgccatgatcactggaaaaccctcatttattttttaaagggtccagaaaatgctaatctatagagatagaaattagattagtggttgcctagggtaggatggatgcaaaatttcagagtggggggttagaggctattgtatagaatcttttggagataatactgattattgtagtgaaagtaaaattctgtgaatatactaggaaacattgaactgtacacactaattggtgagtcatatggcatatgaattatgtgtcaacaaagttttagaagacattacttgcaccacgatattaaaaaatgccgtttgagttgtataattacttcttctctctatgtcaagggcaccgaacaggcaggagcctctcacttgccactgttcttaacagtattataaaataattacataagacaggttacttacatattctaggtcataaaaattattgcttgactagagtaattgtaaacataaaagaacaccaaacacactaaaataaatatgaggtcatcaatcttttgttggtctccttggcatgcacctattcagactgttagtattatgtatttacttcaaattttagcagttatattttaacttgattgatttttcctcagatataagtatgagaaatgacagaaagaaacaacaactggaaaagaagcattgcataagaccaggatgtctctgaaatggacgtcagtctttctgctgatacagctcagttgttactttagctctggaagctgtggaaaggtgctagtgtggcccacagaatacagccattggataaatatgaagacaatcctggaagagcttgttcagaggggtcatgaggtgactgtgttgacatcttcggcttctactcttgtcaatgccagtaaatcatctgctattaaattagaagtttatcctacatctttaactaaaaatgatttggaagattctcttctgaaaattctcgatagatggatatatggtgtttcaaaaaatacattttggtcatatttttcacaattacaagaattgtgttgggaatattatgactacagtaacaagctctgtaaagatgcagttttgaataagaaacttatgatgaaactacaagagtcaaagtttgatgtcattctggcagatgcccttaatccctgtggtgagctactggctgaactatttaacataccctttctgtacagtcttcgattctctgttggctacacatttgagaagaatggtggaggatttctgttccctccttcctatgtacctgttgttatgtcagaattaagtgatcaaatgattttcatggagaggataaaaaatatgatacatatgctttattttgacttttggtttcaaatttatgatctgaagaagtgggaccagttttatagtgaagttctaggtaagtcatgtgtctaactggtgcttattaagttctaacttttctgtgcctttgaaggtgagcttatataaatataatgtcagaagatagtgtttttaagggaaattatgaattgcaaatgtaagatgatctatcagtctcaaaaatattatagaatgttgaccttatagaatcagttagaaccctggggccatcactactacaggacacccagagagtcataaaccttcattgtaaagcactaatgatttctttaaactatcacatatcattttgctatacatttttt

SEQ ID NO: 10094 - DNA, 6000 bp, Homo sapiens
catgatagtgaataagtgtcttgagatcttatagttttataaaggagagtttccctacacaagtcttcttgcctgcctccatgtattacataacattgcttctcatttgccttttctcatcattgcgaggcctcccaagccatgtgtaactgtgaatctactaaacctctttccttttaaattacccagtctcgggtatgtctttagtaacagcatgagaaaacgctagtacagtatcataaactataaaaccctagaacaaaatcaatagaagagaacataactgaactaaaaagcccctgtgcaacaaaagtaactatcaacagaataaacagatgacttacagaacgggcgaatataattgtaaactatgcatctgataaaggcctaatatcaaaaatctataaggaacttaaacaaattaataaaacatacacaaacaactccattaaaaaatggggcagggacatcaagaaagaattctcaaaagaatatatacacaggaatgtgctcaagatgatcaactagatgcagtcaggaagtgccactgccaccaggggaacaccaggttttttttttcataccaacataatttgaacagatctttggagagaaaatactgagtgtggatggaggaaagaagtagtcactgaggctgaagagaaagaaggctgaggacgctgaatggggtgcctgaatactacagctggttctctaccctgagcggtttctagggaaaggtgagtcaaaggaatagtagacagctccctctcactatagacatctggaattctggctagatggggctccataccttcaaggacatgtggactggcagaggggtctcccagaaattgcacagagatggagctgcagacaaaatccagggacttttgtgaataggtcctttacagagacaactcctatataagaaaaacttgaaacaaaggtgttgcattcaactctttcccttcagaggatgccctactctgtaatgtcatagctttcaatgaactatcttttctcactgcactctgtgactcaccttgaattccttcctgtgtggaatccgagaaccttctctcggtgtctgaatcaaggcccctttatctgggaacacttccaaggagacttttctggctttcatagtttgccttaatttgatggttattagtcctcactcttctattattttatcccaagcattaactctgaagaaaaaaacatttgcctctattgtggtcataatttctacttttcccatattgatacatttgtgatatatcctaataagtaacactttccctttcaaaagattaccatcataatttgccattactgaaagtatgaaaaatttaaattatcacattccagggtctatttgtgttctccctaccaatagtgataggattctccttacaactggtagtgaatgatccaactctaaaatctcattttgttgtctgttctttttttctgacctctcttggtacatattatcaaatgctgggtggctccaagaagtagactctaagctgaatatgcttttgaggaagataatttgggagttttattgaaaataacacctgtgaaaaagtaggaagcaagattggactatggaacaaattaggatataattcaattcaatggtttgaatgtttgagtgctccaaagattaatatgttaaaattcttataaccaaaatgactgtattagcagacagaaccttttaggaggtgtttaggtcacgaaggcagagtcctcattagtggaattaattccattccaaaatttgctcacaagaactcattcatctcttttccccattaagacatggtgacgggctgccatcttggaggaatgcccaataccagcatcttgattgtgaaaatttcagcctcaagaactgtggcaaataaattttttttgtctatatgctaggcaatgtatggtatttttctatatagcaccctgagcatgctgagacatgcagtctcagcataggtttcatctcacccactgggagtttgaagctaagttagcccttcagagttggtccacattgaaatgaggagaattggccttcaaaatcttacatatgaccaggcattggatatgggctgtcttggaaaggtcactttatactagatagctttcagcagtgctgttctgagacagagagcttataggtgaggtatgtcagttgttaatcacttcatcagctggaaagtaatttgtatattcccaaagggaaaatctgggtgacacataatgcatgcactcaaggacattaaaaatattgaacaatattgccactctgcaggcaatatttgctcagaaactgtgttccaacatccttttgagaaagacttatctcatttcaggttaacagattattaatagaataaaaacaaatttgtctgttttgtgacatgcatcttttccttcctaattctactttgatgtaaatttctggtgagactttttaaaagtacaaattacctgaattacaagacaatctgtgaaacaagttcaggagtaggcatttagaagataaatactttctaagagtgagaaacataaggaatgctgcaaatattcagaaaaataaaatattgtaatttagacaaaatatttgcaaatgaagcaaagtaactgtaattgtacttaaaacatatctgtttggataaaaagaaaatgaatttctatggtcagaaaaataatgtcaggaaacatgaaatgatgctaatatcataattgtgaaaatacatagagaaaatgaagacggtctatttgagaatgttaagataaataagaatagatcacacccctgcctcattgttgacacaatgctgctttcttatactagaaactcttcatatacaattaaattatctcttgttctggagacagccatatttacaataagaatgaaatttattattcacacatgcaaacacaaaatcattcatccttttctttattcacttgctttccaaaacctctattgtcaatacttaaatcattgtgacattgattgatattgatatgtaccaagttagagaaagttataaagaaagatagcattttaacaagttgtctaagaaatgggcttttttgtttcttatgctgacagttgtattttagccctgaatcctgcgagaatgtgctggtgtggccgatgaaatacagtctttgtatcaatttaatgttgatacttgatgaacttgctcagaacaccatgaggtaactgtgcttgtcaccttcagcttccatcctcattgattccaacaatctgctgttaaatttgaggtttatcccacatcttttactcagaaggaacttgatttcatatttatgaaattgatcaagatgtggacatataagtttccaaagagtacattgttggcatatgattcaaagatgcaaaaactacatatcatgaatgttctgatactgttcaaaagctcattgagtatgctgttttgaacaagaaaattatgaggaacaacaagattccagaatttatgtcattcttgcagatgtcagttctcagtagtgagctgttatctgaacagcttagtctgttaaacatttgttatacatttggtctactatcatccatttacaactggcagtatgtaccaagaactctgtggaggacttacattacctccttctgatgtaactgttgtcatatcagaacttagtaccaaaacacatttgtagaaaggtgaaaaatctgttgcattttcttcattttgactttgcatttgagatttttaacaaaaagaagtgagattagttttacagtgaagtattaggtaagttattatttaatttattcacttttccctccaatatgtggaaggaaaccttccttttttgggtctgttggagtgtgtttataaattaaaataaaaaataacttttttggttatgtgaaagacaagggtgggcaaggttgtggagacattgaaaccctcatacattgttggtgagaatagaaaattattcactcactctgaaaaagtctagcaattcctcaaaaggttatatttacatttaccacataattcagtaattgcctttctaggcatatccccaagaaaaataaaaacatgtccacagaattcatgcacatcaatgttaatcaatgctattcataatggccaaaagtggaagaaaatcaatatctatcaacttataaatgaataaataaattgtgtttataaatagcatctgatacaatttggcaataaaaatgaagtccttatttacactattctacggatggtcctttaaaaacattaaactaaataaaagaagccagccacaaaagaccacatactatattgttccgtttacttttaaaaagatcctgaataggtgtgtttctagaggcagaaattagattactggttgcctagtgcagggtggatgcagaaatttggtggggagatgagaactaatacacaggagttttttgtttttttagataaaactgattgttacgttggatgcacaagtctgtgaatttactaggaaatacttaattttaaatactaattgatgaatcatatggtatttgaattatactccaacaaagatttacaagatattcattgaaccacgatattcaaaaatgctgtttgcattgtacaatcatttcatctcttattctgtgtcaagggctctgcaggactctctcacttgccactgttcttgacactattataaagtaggttacataaaacagggtacttgcaaggtcattaatcttaggtggatgacagtgaatataaacataaaagaaacataaaacatccttgagtaaatatgaagtaatcgaactttgtttgtctccttgccatccatgtactcaggatgctcctataatatatttactttggattggaggagttatattttaacttgattgatttatctctgtatataagtatgagaaagaaacagtgactggaaaagaatgatcgcattgcaccaggatgactctgaaatggacttcagttcttctgctgatacatctcagttgttactttagctctgggagttgtggaaaagtgctggtgtgggccgcagaatacagccattggatgaatatgaagacaatcctgaaagagcttgttcagagaggtcatgaggtgactgtactggcatcttcagcttccattctttttgatcccaatgatgcatccactcttaaatttgaagtttatcctacatctttaactaaaactgaatttgagaatatcatcatgcaacaggttaagagatggtcagacattcgaaaagatagcttttggttatatttttcacaagaacaagaaatcctgtgggaattatatgacatatttagaaacttctgtaaagatgtagtttcaaataagaaagttatgaaaaaactacaagagtcaagatttgacatcgtttttgcagatgctgtttttccctgtggtgagctgctggctgcgctacttaacatacggtttgtgtacagtctccgctttactcctggctacacaattgaaaggcacagtggaggactgattttccctccttcctacatacctattgttatgtcaaaattaagtgatcaaatgactttcatggagagggtaaaaaatatgatctatgtgctttattttgacttttggttccaaatgtctgatatgaagaagtgggatcagttttacagtgaagttttaggtaagaatttgtttaatcggtaacgtgaagatctaacttatttgtgtctttgaagcagagcttttataaagccataaagtcagggaagtggagtttttggtaagtgaatttatgaaatgaaaatacaagatgatctatcaatctcacaaacattatagaaaagcttaaattataaggtctgttaaaaccctgtggccatcactcaaacagaacaccccaggaaatcataaacctatatattagtacacctaagaatttaagcaattacac

SEQ ID NO: 10095 - DNA, 6000 bp, Homo sapiens
actccatgtagctctgtgtgtcacaattaaggccctggtggagtgggttcatgaggggacttcctgacccgagggttgcagagatctgtgggagaagcatgttacctggagttgcacattcactcatcacttccctggatcagggatgtttgcttggctctgcattgctcctggatggaccatcatcctgcttgctttcttttctttccttcctttctttctttctttctttctttctttctttctttctttctttctttctttctttctttcttccttgctttcttgcttgctttcttgctttcttgctttcttttcttgctttctttcttgtctttctttctttcttctttctttctttctttccttccttccttctttctttcttgctttctttcttttcttcctttcttcttcctttccttgttcaaaggtcatttattaataatttatttttgttgttgttcttcattgtatttgttttgtcttaagtttcaggatacatgtccaggatgtgcaggtttgttacataggtaaatatgtgccatggtggtttgctgcagctatcaacccatcaccgaagtattaagcccggaatgcattagctatttatcctgatgccctcccttccctatcccaacaggccccagtgtgtgttgttcccctccatgtgtccacgtgttctcgttgttcagttctgacttataagtgaaaacatgtggtatttggttgtctgattctgtgttagtttgctgaggataatggcttcgagctgcatccatgtccctgcaatggacatgatctcattcttgtttatgtcttcatagtattccacagtgtatatgtaccacattttctttatccagtctatcattgatgggcatttgggttgattctatctctttgctattgtgcatagtgcagcaatgaacatatgtgtgcatgtatctttaaaatacaataatttatattctttgggtatatactcagtaactggattatgacaatattaaccttaaaagtaaatgggctaaatgccccaattaaaaaatactgaatgacaagctggataaagagtcaggacccatcagcatgctgtatgcaacagacccatctcacttgcaaagacacacataggctcaaaataaagggatggaagaaaatttaccaagcaaatagaaagcagaaagaagcaggtcttgctatcctaatttctgacaaaagagactttaaaccaaaaagatcaagaaagataaagaaggctattacataatggtaaagggttcaattcaacaagaagagctaactatcctaaatatatatgcacccaatacagaagcacccagactcatgaagcaagttcttagagacttacaaagagacttagactcccacacaataattgtgggagactttaacaccccactgtcaatattagacagagtttcaaaacagaaaattaacaacaatgttcaggacttgaactcaactctggatcaagtggacgtgacagatatctacataattcctcacccagagacaacagaatatacattgttctttgtaccgcattgcacttactctaaaatcaatcacagaaatggaagtaaaacactccttagcaaatgaaaataactgaaatcataataagcagtgtctccgaccacagcacaatcaaatcggaacctaagattaagaaactcacttaaaaccccacaactacagggaaattgaacaacctgctcttgaatgactcctgagtaagtaatgaaattaaggcagaaatcaagaagttctttcaaaccagtgagaacaaaaagacaatataacagaatctctgagatgcggctaaagcattgctaagcgggaaatttaaaggactaaattcccacatcaaaaagcttgacagtcctcaaattgacacatatatcgcaactaaaagaactagagagccaagtgcaaacaaaccccaaagctagcagaagacaagaaataactaagatcagagtggtgctgaaggagatagaaacatgaaaaactattcaaaaaatcaacaaatccaggagctgtttcttgaaaaaataaaataaaatagacagcagtctagactaataaagaggaaaagagagaagaatcaaatagacacaataaaaaatgataaaaggggatatgaccactgactccatagaaacacaaaccaccatcagagaatactataaacacttctatgcaaataaactagaaaatctagaagtagataaattccttgacacatacaccctcccaaagatgaactgagaataagatgagacctataacaagttctgaaatggaggcagtaataaataccctaccaatcaaccaaaaaaaaaaaaaagcccaaaatcaaatggattcatagctgtcttgtttttctccattctctgtgtatcagttgcttccttgattagtcccaatgcaagtatctgaatgtttcagctgaaggtgctgtatttactcactccatctgtttctctccacaagagccatgcatatgagctgcttctagttggccatcttgcccactcccccacttataataattttcaagagtatacctcatattaagtgattttgctaacacaagaaatacttctgagatgttgcagatttggttccaggctactacaataaagcaaaacatgcaataaagtgagtcacacaatttgttttggtttctctggcacataaaagttatgtttacacaatgctgcagtctattaattctgtggtagtattaagttcaaaaaaagtacacaccttaattaaaaacacttctttgctaaaagtagtaacactcatctcagccttcagtgagttgtaaacttttttcttcgtggagagtcttgcattaatgttgttggctactaactcatcagagtagtgactgctagtagttggcgtgactgtggcactttcttaagggtaagaaaacaatggcatatgccacatccactaacccttcttttcacaaaagatttctgtttagcatacatttttgtttgatagcaattttcccatagtggtacttctttcaaaactggaatcaatcctctgaaagtctaatgctgctttattaagtaaatttaagtcatattctaaatctattgttgtcatttcagcaatgttcacataatcttcaccaggagtagattcaatctcaagaaacaactttcttttctcttccataagaagtaactcctcatgtatttgttttatcacgagattgcagcagtttacttacgtcttcaagttccacttctaatttgagttatctttctatttccaccacatctgcagttatttcctccactgaagtctttgttatagggccaacaggttcatatgcccactctgcaataatagaccaattacaatgagacattatgttttgcaacaaagaaagagtataataattggagggcactgagaaggaagatagttggaggccctcaaacttacctcctcaaggaaatctgggctggagtttttaaggggttaatggagggtgatggactgaaaaattggagtcatagattagtcaggataatgaagataaaatcagtaggagttggaaactgcattctttggtgagtcagctccttgtggggtccttgagagcagctggcatcagggaggtccctcagaccagctgagtcagtagtttcatcagtatgctggacctgaaggaatacctcaaagagaaaaccacatttcaaaatgtttaagttattatctatagaacagttaagatgaactttaatcttgtaacaatgtctgcataattctaagacaatagccaaaaaactattaggaagtgagtcagagagcaagctaatgtaataattaatactgaatgtactacaggcttggtttactttttttttttttttcccctccctttgtccttcattaattcaacaaagtctataggaatagtttcatcttgaaactctctaaatcatacatgatggttgtaagaatcaacacgtaaatgctatatcataaatgaacctttaaaatattatgctaagtaaaataagccagccataaaatatcacatattgtgtgattccatgtatttaaaaaatgtccagaataggcaaatctatagagacagaaattcaagtagcagttgcccaggataggacaaatgcagaaagaaggggtagggagtaaaaggctaaagcttatagggtttatttttaggagataagagttctctaaaattgactcttacggtagaagcacaattctgtgaatatactatgaaacattaaattttacacaataattgataatttgtatgatatctgaattatacgtcaacaaatttacaaaagtttttgaaccacatttagctattttatctttagttctgtgtcaaagagactgcaggaacatgagcctctcactgctactcttatgcacactattctgaaatatattacatgagtcaggtgatgagtccatccaagatcattgatattagctgaattacagcacttaaaaatctagggctgggtgcggtggctcacgcctgtaatcccagcactttgggaggccaaggagggcagatcacaaggtcaggggttcgagaccatcctgccgaatacagtgaaaccccatctctactaaaaatacagaaaaattagctgggtgcggtggcaggtgcctgtctgtagtcccagctactcaggaggctgaggcaggagagtggtgtgaacctgggaggaggagcttgcagtgagctctcaaaaaaaaaaaaatccaaaaagaacattaaacgcacttgtgtaaacaggtcatctaccttttatttgtctctttgtcatccacatgctcagactgttaatataatgtatttactttgaagtgtaaaagttacattttaacttcttgactgatttatactggatgtcaccatgagaaatgacagaaaggagcagcaactggaaaacaagcattgcattgcatcaggatgtctatgaaatggacttcagctcttctgctgatacagctgagctgttactttagctctgggagttgtggaaaggtgctggtgtggcccacagaattcagccactggatgaatataaagacaatcctggatgaacttgtccagagaggtcatgaggtgactgtattggcatcttcagcttccatttctttcgatcccaacagcccatctactcttaaatttgaagtttatcctgtatctttaactaaaactgagtttgaggatattatcaagcagctggttaagagatgggcagaacttccaaaagacacattttggtcatatttttcacaagtacaagaaatcatgtggacatttaatgacatacttagaaagttctgtaaggatatagtttcaaataagaaacttatgaagaaactacaggagtcaagatttgatgttgttcttgcagatgctgttttcccctttggtgagctgctggccgagttacttaaaataccctttgtctacagcctccgcttctctcctggctacgcaattgaaaagcatagtggaggacttctgttccctccttcctatgtgcctgttgttatgtcagaactaagtgaccaaatgactttcatagagagggtaaaaaatatgatctatgtgctttattttgaattttggttccaaatatttgacatgaagaagtgggatcagttctacagtgaagttctaggtaagtaacttttttgattggtaacatgaagatctaactttcttgtacctttgaagctgagtttgtataaagccataaagtcagggtagtggggtatttttgtaatgaatttatcaaatgaaattgtaagatgatctaccaaactcacaagcactatagaaaatgtaaattataggatcagttaaaactctgtggccatcactcatacagaagactccaggaagtcataagcctgtatattagtgcacctaagatttct

SEQ ID NO: 10096 - DNA, 6000 bp, Homo sapiens
attgtttaatggatttttaaatatttattttaaaatctatttactttaaatataagtcaaatgttttatgctataaatcaaataagttttatgcaaaatcaattttatttattaaaaaaagaaaataatggccaggcgcggtggctcacccctgtaatcccagcactttgggaggccgaggagggtggatcacctctggtcagaagttcaagaccaggtgaaaccccgtctctactaaatatacaaaaattagacaggtgtggtggtggtcgcctataatcccagctactcgggaggctgaggcaggagaatagcttgaacccgggaaatggaggttgcagtgacccgagattatgcccttgcactccagcttggacaacaagagcaaaacttggtctcaaaaaaaaaaaaaaaaaaggacataaagtttttctaaagaaaatgctgttgtaaaagcaataaccaattgtgttaatgtgaatgccatgctaactccttttgtatgcagttgttaaccagtagaaggcatctgagttatcagtggcgaatccttacaggtctgaagcaacttcaattcttgcctcctcagaagtaagaatttgactggggggcatcaggcagatgagactgacgggagtttcagagcaggagcggaagtttattttaaaggctttagaacaggaaagaaaggaaaacgtacttggaagagactcaagtgggcacctgaagtgccccgtttaacctcgatcctaggactttataggctcgcctcttttccatgattcttcccttagggtgggctgcccacatgtgcagtgcccttcttacccttgggaaatgagcatgcacagtctgtttaggaagttgtatatatgctcatctgaggctttcttcccttttttggtaaagtgtccttggatggtcacacttcaacattttgtctcttaatgcacgtgcccaggcagtcgctcctctctggcatctgcattcaattaacactttaatgttaacagctgtggatcataaagagcttgtctctccctggcactactggctgcaaaattctcatttttagagaggcagtgtgataatcatggaactgtcacctgacattcctaatgcctatctaattacctgtaacacaattaagcaaagtatatattttattatcattctctaagatgaaaatatttgagtatgctagcttcttctgaaatacgttagtttttttctctgaattcatgagctttcacaaatatagtaatcatattacacagtttatttttatttttaattttatgtgcacatagtatatataggtatatatttatgacatatttgtgatgttttgatacaggcatacaatgtgtttctttcaaaatttttctggcaagggcagattagcttttcagtgattttaagatcagagtaattacaaacacaaattcagacccacattttaggccaaatctttttacttaacaacctctttaagccttttgttgtgaatataacttcatttagttttctattaaattcgaaaatacaaatcaatctaaaatttaacctcactagtgtgagaaattttttaatactgatcatatttctgaggtatttatgctgtatcagcacatcacatgtatcacatgaatttatgcgtctattatgtactccacaaaaattaaaatagaaaacatttaaaaacactaaagttcattagtggcataacagcaattgcctttttgcgcactgcttgtcatgcacatccaggtagcctatacttcagcatgaatatcaaatatcatacctttcatgaagactttcctatcctccaccctaccgttaatccccccaaaaagctggaagtaatctctacagatctctgaaaacactttacctatgtcatttcatctgaaggcccttgttaatttctctagggaagagaaagagaagggattacatgaaaaagatagtatatttttaaacgtcacttttactccaggtaatatacttgttgcttaataaatacaattgtatctatttaaatatatagttttcttatatgtggtatgtattattacataataatttatggtattttttgtatattcatttttaatttattaacagatatgttgtttattttattttattactttatattctcaaactcaagttgtttttaattttcattttatatatgagaaaattgagtctaataaatattaagcagcataatgtgaagctaggattctttggcctaatttattctaaaatctaaattatgtttttaatatcttgctgactataatgtactacagtgatttttgtcacagatatgtatgtatttttcttatcttccactgatagactataaaattaatatgagaaagatctcctggattcctcttctacctagtaggtactgctgtgtgtgaatagtaggtacccaataaacacatagtgaagcagcccagggtcactggagcagtctccctatctgaggtattactcaagagttctttgtcttaggaccaagaaaattaatgagcgtggacatcaaaggtgaggttggagtgaaagtttaataagtgaaaggggaaagttttccacagcagagagggggcccaagaggattgccatttctcagttgaatacaaaggcttttataaacaagccagtggggtggggtgtttaattttcatatggcacacaaaaaaagatttttatttgcaaaggtgtgaatttctcacaactccacccactccctctcatgcacatgcaggcccttaacctgagttactccttattaccctgtttccttactgcgcatgtgtcaggagatggacttttccattacagacatgtctggttctgtgtaactaatcttatctgtgcacctccaggcatgttgtaggcaagccccactgtgtaagttattttatctgattatgtccaaaaaaggaaagaaacatgctcactgaagcccacagcatgtatatgtatatgtatatgtcttttgctggttacaaaagacaagggtgttttagggtcgaccttgcctgtttatctgtgcttgaaggttgtgcagcttcaggctgcccttttgttaaaaagaattttaccaacggaccttgttctaactatctgcctaactggtttcttgctttctcctctctcaatagcacctgaataaaatactatattttagttgtctaaaactggacctgattccctgccaataaataaatagaagaaaataacatcagtgaatcatgacatcctagtgaatcatgacaattattttaaagtttcttgccaagtcactatgaaccagactgacaccagaaaggcaaaaattttgtgcacaccataacatcttctgcagagaaacttcaatggaaatacactcaaggaattttatgattactctgttaaactttgaacagtactttataaaagtaattgttttaatgaaacagttgatgtttccatacagattatctttggtgatgggagagcttagaagagacatttttatgatattactaaaaatatagaatttataatttcagaagatttattaacatgaaaaggatcactctgcttattcacagacatatgcatacaaacataatattttcacagagatcgctttacttgaattacttgatccgatattatccaatgtgcgttacacaattttgtattgtgttagcatgcttttggcaggctgctattcatatggattccttagttggtaaggggacgtgatacattttgatgtggcaatctatcccagtggttaatacaataggctgtgggagtcagagatccttaagactgctaccagcagttcctatcttttatttattcttatttttatagatttaggggttcaagtgcagttgtcctgtttgggtacattgtgtagtggtgaaatctgaggttttagtatacccatcactcaagtagtgtacactgtatttccattgtacccaataagtaatattttcttattttgctgtaggaacatggcaaattattcaatctctttgggcagtggtttctttttctttgatgtgggagtaattataaaagatccataattggataatttttaaaataaggaagaaatgaaattaacgtgttaaagagtttgcgtaatgtctgacataacaaggacttaataaacgctagcagttgttgaaggctgaatctagatgtcaagtagctgtttttcatgcaggctagatagtttttgaacagcacttttggtagatgtatgcttgacttagtaattctcttaaatagctcctattcactactagcattacctataatctcttgcacatattttattttattcatttatttataatattttcttgaggattaacaaactatttttgtaaacatattactaaagtagtaatataatactatatgtgttatacatattatttataagtattatttgaatttataaatatttgaatttataaatatttatagtaatatatttatacatattatttgacaatcttatatattgtaactgttattataatgtttaattgtgataaatggaattatattcatgcattaaaaatttaaaaacttacagcattaacatctttaaatttctgaatgagttttggtcctatctgaggtttcaatacctaggcctgaatgtagagttgagatgtacagaagctttatccaatttaatagtaaaaatgtaacaattatgaaacacacaaaaaagggttggagtatcaagttcaaaaggaggattagacagcaggaatcataactaaaacactaaaattaaaacaacagatttgagaagtaagacacattacccataaatctgtaaatatcctaaaatatggagctactatgactagtatcactttctagaaagaaggcttttaaggatattaatggtttgcctcaaaattgagaaataattttgtctttcctttttttctttaaaagcagagaaaaacatttgcttcacatctcatcaaatcttctgcatcaagccacatcatgttaaacaaccttctgctgttctcccttcagataagtctcataggaaccactcttggtgggaatgttttgatttggccaatggaaggtagtcattggctaaatgttaagataattatagatgagctcattaaaaaggagcataatgtgactgtcctagttgcctctggtgcacttttcatcacaccaacctctaacccatctctgacatttgaaatatatagggtgccctttggcaaagaaagaatagaaggagtaattaaggacttcgttttgacatggctggaaaatagaccatctccttcaaccatttggagattctatcaggagatggccaaagtaatcaaggacttccacatggtgtctcaggagatctgtgatggcgttcttaaaaaccaacagctgatggcaaagctaaagaaaagcaagtttgaagtcctggtgtctgatccagtatttccttgtggcgatatagtagctttaaaacttggaattccatttatgtactccttgaggttttctccagcctcaacagtggaaaagcactgtgggaaggtaccataccctccttcctatgttcctgctgttttatcagaactcaccgaccaaatgtctttcactgacagaataagaaatttcatctcctaccacctacaggactacatgtttgaaactctttggaaatcatgggattcatactatagtaaagctttaggtatgtaacaaattttgtttttattacttgaatttgaacaaacagacctttgtagagcctcttctttatttccctatgtctattcttttttaattccaagtattgatgtactatatattactatcacttgatagcagaaaagaagataaaagacattgtacttcagaagtacagtgtgttgttttctaattgcatggacttaaatatatcaattcagttcttttatggat

SEQ ID NO: 10097 - DNA, 6000 bp, Homo sapiens
ttggttgtcaagtaaatcaaatgatttcttccatctgagtaaagagtaaagcctgagtaaagagtaaaaagatgacttctcaaacatatccagaaatttgtaaacagtacactcatatcttttagtttaagaagtggtcttaaaatatataaatttgtttttccacctatgtttaatatgcccaaatttaaagggagagctaaaagacagcctacaaataaatatagctatgaaataaaattatagcactttactaaaaaagggatgtaataatgttatttaacgaagtattttatatatgacttgccactattctatacataaaattttttttcttaattctttcctgtgttaactagggttattttctatttaaggtaatcctgctggagaacagatgctatccaatatttattacaacacatgagttgtgttgtttcacaatactgaatttcttaggtgaggtattttatttaaaaaggagggggaaaactcctatattttcttgacttcaaacctgtggggccaggggatatagattgaaatgctccgtatttagtcttggggatcaggcttgtttagtacaataccatggttttagaagtctgtactaggaacatttttaaaatacattttttatatttcagatgtaatgcagtgcacttttatttgaacaataaaaaaacccataactttttgagaccatgaaggtcttttattttttaattttgaaaatatgtggtatgtgtatatgcagactacatcattgttttaagaaatgatttaactcttggacattacacttgggttagttcacaccttaaatccccaagtagttaatatctcaattattgtataatcagtttataccatccattcccaacaaaattccacatttcatgccttttcaacatacatttcaacataatcaacatatttacaaacactgacttcactgtttataaagaagaaatttcccctcctatttcccattactgaaaagtcaagtcatttttattgatacatgaaaattaatttttttgtaaatgactacgtatagtcatttttctcctttggaaaaggtaaatagcttattaactaatcctgtcttgttcttcacaaaaataatagtccatccgtgttttgactcaaataacctaaatacacattttgtaaaaattttgtaccctatattacttatttttaaaacagtacagtgttagactaaacaggaaaactcaaagttataaaatctcttcagatcctctagtttattaaatctattttcatgttgatgtttttcacaacacttattcccacagatctggcattacagaacatttaaagtgtaccaaaacattgttttaataacagattttaaaatcaggattatttcaaaatgattaaaatagcaaagaacaaccaagtcactgcttttaatcactataagcagaaattcagtattccattctcagtatattttacttacgtaaatgaatctatgcagatatcttacacttttaatgtttgctgtccttgacactaaattccgaatgttccttaatgtctttggaaatacatatactattgataaatgcttgcttaagtcacagcatttgattaactcaggtgactggaatttaagatgggagcattatcagtgctttaataagtcttaatgtgttgcacaccttgattgcaaaaatatcacttgaattttggataagtgtaaaagaaaatgtgctactgtggctttgacagaatacctttgtaacgtaacaaagtacaaacctaatatctgtggtgtaggaggttgcatattatacttctgcttttaaatggattcacacttctgaaaaacaaaagccaactttgcattttcaatgcttgaaaaccaataataagaaagatggcaaggggatgtctttcaataaagagaaaaaagccaattctaaattaggtagctttggttttgagaagtagtgccttaagtaagaaagaaaaactgaaatcttaatctgattctaagggatcactaacaattgctcatggaaatagtttatttcttaaaggtgttttgttgttgttttatatataccctagtaagctacagtcatttagtttgacaaacatttcagaaggcatatttgggaaaagagaagactaaatgattacatgataattacaccccatattcaaattttcagcacttaattcaggctactacaacaaaaatactgttgactgaggagattaacagaatgtgtttctcacagttctgagagctacaatgtctaacgtcaacatgccagcctttatggtttctgttgagggccttttctctggtttgcagatggctgtttccttttcagtttctttgtgtagggcagaaaaaggtcatcttgcttttgtcttttccaagagacaggatctctgtcacccaggctggagtgcagtggcatgatcatagctcactacaacctcaaactcctaggttcatgtgatcctccccactcagcttcccaaagcacagggatttacaggtgtaaaccaccatgcccagccttgtttcttcctatgagggcacttacccaattcaagagctctacccttaagacgaattacctccaaataccatcaccttggggtttcaaaaaagaatctggggaggacaaaaatattcagtccatagcaagctccattcctgtgtttggcaccatgatggttaagaattacagagactgcagaaagaaaatgtaatacgtagtctcttcttaaggaatttaaagttgagaaattaactgacataacactaatatcaaagactggaataagctaattataaatgttgaacctttaaaaatgttttaatacattgcacaagttcatttgcaaagaggattgacaaatgatttcagttggtccactcaatagttgtagatcattttgtactgtactctgaaacaaaagatacaaaataatcacaatgttgtataaacagtacctatacattagtagtaacacttttcttttgcattgggctttaaaattgacaactacttcccccaacatcctctaccaagtagatagcaagttctagtcatccctgttatatagattaagaaatgtgtttatacacatatatgaaattagcagaaactaaatattcataaattttatttagatcaatattcaaacttaaggaaatactttttaaaataagaatgtaatatatgaacacaatgtatagcaaaaaatgtgttccaacactgaaatctcatttgtgaccccgatagaactccacaaaattaaatcttaggaattgaagaacagcttacagctttttttttttcttttcttgctttttttttttttttttaaagagatgggaatcttgttgctacccaggctggagtgcactggctcgatcattgctcgctgcagccttggactccggggggctcaagcaattctcccgccttagcctcctggtagctgagaccacagatgcaagccaccacatctggatgatttttgtatttgttgtagagatgaggtcttgccatgttgccaaggctgatctctaacttctgcccttaaggtatcctcccatcttggcctcccaaagtgctgggattacaggcgtgatccactgtgtctagcaaaaataactttaaaattctgttcagattatgaacagctgaacagtagtcagtagcaactgatggcttttttgttagcttaataaatggataaagaaatagattggtaggtttttcttttagaaaaagtttatatatagtgtgtgttgtgctgtgtgtttaaacacatttaaaaattcatgtatagatttatcagtcagtttggaaagcagatgaattccagaatcctgagaaagttatcgtagggtacccttggttaggtgcacagtgaagggcaaacaatagctggcgtttgacattacccaacattgttggaggcttcttttcctaagtaagtaaataaataaataaataaaaatcaaggtttactcctcacaacatattttagtctgtagtctaggggtgacccttcggtgaggaaactcctccacaacattccattttgttgtttccaggaacacaaaagttaaaactatatagtccatgtagattcaacgtattcctttaaaccagaagacagccagtgctgctgttcaggctctttaaagcttatataggatacaagtaaactcaaggaattcaccgtactgccagtgatagtttcccttaaataaagagatgatacttttactataagatttttgctgctatttatcatggaagacaaaacaccgaagaaattcagtttgcagttggtggtccaaatactaactggaacagatgggccaattaaatctacaagagactgaactatccctcgtgcttaacactcagagtcagcaagaaacatgcgtctctctacaagcaggtactttagcaacgtgtgactcttgagtatgataatctatcgtaatcgctaacggaagcaatcaggtgcacgtaaagaggttggggatcagcttctggtcacaaaaaaccgagcaaggataattccactacaaatgactattagctttagtgaaaaagaatggtaagttacacggtgtagatgaactttacaaggcgagagctccctaaagaacacccagcctggcggagggcagcaggctccacccatgtctctgcagttttggtccggcctcggactaactacaccctagcagcgggaaactttcgcgtgtgcgcagtaggcctgtccagtgccgcgtgggaaaggcgggactttcctatctcttgcgtcacatccactgcgacgcaagacgtcaccggcttgactgggaaggtcaatcgcggctgcaggcaggcgcgcatgcgctttatgcccgctgttgctggcgcgtgcgcgtatcagccttggctggccggtgtatgtccgctggattgtgaggcccgggatctgggctccgccgtggtgcagaaatgctgtgccggctcggcggtcggtggctgcggccgctccctgccctgcagctttgggctagggacctgccgcttgcgccggttcctacgagcggcgccaagcgccccactctcccagtgtgggcagtggcaccagtctctgcagtacatgcgaacggctggtacgaggccctggccgcgtcttcgccggtgcgggttgcggaggaagtactgctcggcgtgcacgccgccacgggcctgccctggtggggcagcattctgctctccaccgtggccttacggggtgctgtcacgctgcctttggcagcctaccagcactacatcctggccaaggtgaggggcgccgagccgtgcgcgtaccctgcgctgcaacccctgcggcggaggaaggccgacattcactcagggttttcgatcgcacgatgttgccttctgcagtgcttagtgtttaatcatcgtgaccatttcattgtgaccattttagcgttaaaaaaaattgaactagcattaggtgtgttaaataagatactttgtgacacgtgtacctgtcatttcttttgtcttactggatttgtgctccaagcacaagtggttactatacttgctctcggggaacggagacaaagaaatcagtcgcagaagaaattgtgttggcgaaacctacaaaatttatgtcttaaaagttttaatagccagtatgtctgcagtgtctttcgtcccaaagtattccagctggtctttcttattaggaagaaactactagactaacagtttgcgaacttgtttcctctccagacccgactaagactgtgtctggttggtcgcagttacttgaccttttaatgctgaatccttttttctgaggaatcaggctagcagtaccttccttgcctacttcacagcgttatcagagcaagtcagataatacgggttaaagtgcttgattattcaaatgggatatttcaaaaatagtggcttt

SEQ ID NO: 10098 - DNA, 6000 bp, Homo sapiens; identical to SEQ ID NO: 2307

SEQ ID NO: 10099 - DNA, 6000 bp, Homo sapiens
taaattcacgacaggagattgaaaacgcaaactgcttgagaatagaaagtctaacatttgtgcttaaaacattacctgatacatagtaggtatcagtaaacattcattaagtataataaaagaccagtaaataagtaattaaatataatttaacgtgtagtccattggagctctgcaggtaggaaaaaaaggacaatgagaggggggtctagtgaagactttaaatcatcaagtgtcaatctcaagctattctaactgcattaaaatgaatttaacatgttttggggttcattagcatttttattaataagtttgatttatttatttattaagaagtttgatttaatacaaagaataattttcaaagagtgggggcattcatggattgtaaagccaaataattcagtggaaatacaaataatttgataaaagagacttttttagatttatttacctacataatgcagtatagagtctctttttctctctctctcttaaaaaatctgcattatccctcccattcttgatgtcagattgaaagttaagcagggtcccagcatgactgtcatggtacaaaagtcagtttgaaaccttacctggctattctccagctgatacaattcccagagtgctctcactgatgaagaagggaaagtactgctgttgctaccacttctttttcatggcttggagagattttcatgtctgcttttgctttcatcttccctcattattgcttaggaaaagaatgaccaacagttttgcttgccaggaactatcccagggactgccctagttttagcatggaaagtcccatgtccatgagactgaagacacccctcagtctgtgacaaattaggacacttggctgccccagtaattaatgatcttctgattaatttttattaaatgaaagtgatttgattagttattggtctgaggccattttttgctttgctgtagatcttacatgagcaagtcagtgagatgcaaaatgctccaggactgggatgaattctttacccaagcaaacagataaacaaaaaagtgctactatttttctggtatgtcaatattctctgccagccttgtactcaagaaagaagaactgagtgggagtactctcagaaggcctggaaattttgaggaagaatgagttttaaattgaggtattttgctttagtttgaacctaggacaagatggattcttagaccagtttgggaagtcccagaagatgagcaggtaattagtcaagactagggataaaggaaaccaacaaatgtgagtttaaaatacttccttaggaggacagagtacatggttagtatcatgtctcatatttctttgccttctgtctccttctaacatgaaaccaattgtcacttttttggggggatacattttttccccagattttattcaataacatgctgatgtggcatataatatctttgattctgtcttaagattaaagttgaaaatggaaaccagtttcaaccagcaatgaatacaaaaccttgaaagatgaacaagctgttgatacaaatttcctgaaaatgtcagcctgtttcagttctcttatgggaagtcagggagatttatgtattcaggttggaccaaaatgtgaaatgagaagtggcaacacatacctggagactggagggctgcagaagtaatcagtattttagaacctcaagaaaagatgaagccaaggaggacagaattaaggtgctttaaggactttcttaattagtctcaggactaattaaggacttgcttctagtgcttaattatttgaaaattatgaaggctgtatgtttccttcttacaaaagtaaaagttatcttccatctagctagccccttgcccctcagtatcttcctcactccatcaggtaaaaagtggcagattgatgcagttgatagtggtggaatttccatccccaagtgaccagttggcaaagagtgagaagggatgttagccaccctccattcaatgtttgacatttgtaatgagcatattttcaaaatggaggtctgccggtatatattgaagttttcatccattcataattctcaggttagttgctatagtgatgatggtccaaggtaccattttattttgcctttgttaaaatagagatgataagactgacagaatgtactctgtgttcataagacaccaaattataaacaagacctaagaccatgccaggcaaaggtcaagtcacacactcctacacttaaaaaataaactatattctaactgccaaaagggttttctttttctctagcatctaaacaaacactggcctccagataagcaatattgaaacaattgcatcttactgactgcaagacactaactaattaatcctccacccctacccctgttccacaagccataactacagctctgactggacaagagactgattttaataactctcctgataagagaccactgaccatagactggttctggctggtttacagaggctgtggcactgagtgccttcatgtcttctgtttcaccttttgacatatagggcctaattataatacatttaattgttaagtctccacctcaaagtgaacatgagacatatgcaacttgcatgtttgcttactattcatgtttgcttactaaacatgcatgttgcatatgtcccatgttcactttgatgtggaaacttaacccacctgcttcagaaatatgcatagttcatgtaccccttgcttcagaaatattcatagttcctcctataacctgttgaatatgtatacttggccaactcatttagcataaattcctgttccaccctttcctccctcaaagtgcctgctttttgtctctgccagaggctacacttcccagcctgtcaagatgtccagcctgcagctgtaaccctttataagaaatgaagttctcctttccaaatttatgaacctcaggattgtttgtcaacatgttgctactgcaatagtctcctaactgctctccctgttgtcactgttgctaactccaaattcattgtctcattgcagccagaatgatctttgaaaaacacagatcatatcaattcatctgccactccactcctgggcttaaacccctctaataacctcctgtcacactcaatattaaatatctgaattccttatctcagtaaacaaagcatcacataatctggcccttgcctatttgtcttacatcatcttacctgcaaagctccagctacacagttttttttttttcttttttgaatatgctaagctaatgtctatggacctttgcagtaactccaaatgtttccccttagagctcttggaatgactgggtcttttttgttagtcactgagtctgtcattctttatcatcacaatattttaaatttctacaggccacctttccaatatggacattttttttccttgcttatgtatttatttcttattgtctgttttcactcttcagccagactgtcagcttcatgaaagcaagggcttgttatcttgttctgtgcactaacctccacttctggaacagtgcctagcaaataataggcactcaatgaatctttgttaaagtaactaatttttatcttcaaagagctgacatatctggttgtatatcaaatataataaatgaaaagttaaatacatatggcaacaaacagaagagatgtatatgtaagtactacataaagcattgattttgttaaaaatgaaaaggtatttaggttctaaaagccagttttgactaagggagggcggaagtcacggaggtggggggaagagagaggagggagagcagaactagtagacagaggatttgtgcacaaacttgagtgcttgcacaagttttgcaaaggagacctagcttgcccaaagctgaaattctccaaaactggagcttgcagggaaatgacagtgggctgaaatattttgaggtacaactttccactcccaaagaggcctgctatcccctcccactccccactccggcctttccttggcttggctttttttaaagaaaaaaaaaaaaaaaactaagcaggtttctttagaagaaaaagaggaagttcataaagagtgtttgtggtagtaggggtggggtggagtgaggagtgaggaggccgtcacctcccatggaatccttagtcttgggtttgtgaaccacgcatgggggctgttttagcacagctgctaaaataggccaggcctgcaggacatacgggtatgtttagtttctagataacttttgtttttctaaactccttcttccctttcccaaatctggcaagcgttagtcatcttcaactcggcaggaacccacaagtgtgcatgtgtggctcggaggcttcagctggggccccgccctcgtccccaggcgcacactgacacacgcagcccagacccggcccgagcgggctcctgccctcggcgtggcttctctccagccgggagtcccagggccagctagcctcctcccctaaaggggacggcctgtcagcgcagtgccagagtccagcaccgggaggaaagtttcggagtgcggagggagttggggccgccggaggagaagagtctccactcctagtttgttctgccgtcgccgcgtcccagggaccccttgtcccgaagcgcacggcagcgggggggacttcagccctccaggcggggtgggttccaggtccgggtccgaggcgggcgctggaggctcggccccaggccggagaggaactcctttcgcgagctgtcgccgtgggcccgcattgtctgcaggaactctccggaatcgggagggggaggactggatcgcgcttccactgggattcgtcaagagttccggcggcagctgcggcggtggcggagactccctttgtcctctcaggacctccctctctccctccctgtcagctggtgggtcccgctgccgcaggcgccggcgtctcagctgctcgccgccccccaccccagagtgcgtgccgggtgactcccgccacctttgcgaccctcctgagcttaggggactgcgagcgggagggagtctcaggcccccggccgcaggatggtggcggagcggtccccggcccgcagccccgggagctggctgttccccgggctgtggctgttggtgctcagcggtcccggggggctgctgcgcgcccaggagcagccctcctgcagaagagcctttgatctctacttcgtcctggacaagtgagtgtgcgagggaggtccagggtctcctggtgagggcggcactggatcagctggggctgaggctgagatgcgtgtgcgcaccccggggagtggtgttggaaacccgcggaggggtgccctgttgctgtcttctttcaaagggcaagcgcgttcggatctgtgtgggcggagatcagccgggtcgggggtagtgattggagccccgggctacttggctctttggggagttggggtattcactgtttgccagtcttttggcctcttgggaaatgggagtgtggcctcttgcgggccacgctccatcggccacagagtccttacccacctcctcgaccctgctcgtacgcaggctaaagtttgcctggttttatcctaatcatagcgctttcattggagccaggaaaagcctagggttaacatgcccaatgtggtttgcatttcctgcgaagaaaggcttttgtgtttactctgaagagctgggttccactctaaacaattaggcaggtatttacccaccccagaaaacgggctgacttcttcttcttctttttttttttgacggagtcttgctctgggactgacttctttaactctgggtaccaccaaagtttcagctacagatacccttacttagcttgaaaaagaggccaggtgcccctatgttcgtggcattgaagaaggaaccatttcaaaatgtttacttttcagttccgtgttttgtttctctgatcagttcaatttcatctttcaggtctgggagtgtggcaaata

SEQ ID NO: 10100 - DNA, 6000 bp, Homo sapiens
aaataaaatatattattaaagtttttttctgtttctacctttttaatgtggctacattacaattacacatgtggcttgaatttgaggctcatgatatattttaattaaacaacaatctttcaaaatccttacccagtaaacttaaccaatgaggcaaaataactgtacactgaaaactacaaaatgctgctgagaaattaaggaagacataaataagtgaaaagacatgccatgttcatggattggaagacttaatatcattaacatgaaaatactaattaaagttatatacaggtttactgcaatccctatcaaaatctcaatatcatttttggcagacctaaaaagatcctaaaactggtatggaatctcagtaagccctgaatagccaaaacaatcttgaaaaaaaaaaaaaaaaaaagagaacaaagttggaggtctcaaacttcctgatttcaaaacttcctgatttcaaagctacaataattcaaacaatgtggtactggcataaagacagacatacagaccaatggagtgaaatagccgaaaaaaaaaaaaaaactctcatatatacggtcaactgatcttcaacaggggagccaagaccattcaatggggaaaggatagtttcttcaacaaatggtgctaggaagactggatatctacacataaaagaatgaaactgggcatttatcttctacaatacacaaaaattaactcgaagtatattaaagacctaaatgtaagttttatagctaaaactataaaactcttaaaagaaaatatagaggaaaagcttcatgacactggatttggcaatgatttattggatacgacaccaaaagcacaagcacagacaatataagtaaaaatagataaactggactacatcaaaatttaaaatgtcagtgcatcaaagaacacaatcaacagagtgaaaaaggaaacctacagaatggaagaaaatatttgcaagtcatatatctgataggttaatattcagaatatgtaaagaactcctacaactcaacaaccacaacaacaaaaaccttatttaaaaatagaggacttgaatagatctttctccaaagagggtatacaaatgaccaacaagcacttgaaaagatgctcaatatcactaattattaagggagggcaataaaaactaccatgagatatcactccttacccactaggatggctattatctaaaaaacagaaaaagtatcagtggggatttggagaaattggaaccgctgggcactgttgttggaaatatgaaatggtgcagccactatggaaaacagtatgacagttcctcaaaaaattaaacatagaattaccataagatccagcaataccacttctggatatacatatatataccgaaaagaattgaaagcaggtcctgaagagatctttgtacacccatgttcccagcaacattatttccagtagccaaaaggtggcgcaacccaaatgtccactgttagatagatgaatggataaacaaaattcatatccatacaatagaatattattcagtcttaaaaggaagggaattctaacacatacaacctggatgagctttgaaaacattctaagtgaaataagccagtcacagaaagacaaatcctctattatttcacttatatgatgtatctagagtagtcaaactaattgaaacaaagtagcacagtggttgccagcatctggatggagattgaaaggggagtttaatgagcataaagtttcagttttgcaaaatgataaagttctgcagatcggttgcacagtaatgtgcatatatagttaacactactgaactgtacatttaaaaacggttacagtggtaaattttgttacatacattttatgttacatgtattttaccacaattaaatattttttaaaaatccttccccaggtatcactccccctcctccctgcttctgtgtgaattaacaactccctcctttgcacctctacattatcttgcgtataccaccattatggctcttattacatttttggtaattacgtgtttgacaggataagggttactgtcccatttgccccatcctgggacaggtgaatacttatccactcctggggtcctgactagaagctaggaaaatatactagggtctttggcaagacagagaaaagaggcagtgacccctatggcataattggctaaagaggaccgtcgttatcagcaagaatatatcttggatcttgtagatgtttcactctgaggctggacctggaaggaccatttttcttcaacaatccttttataggcaggctctgacaaacctaagtaacacttctttcctccctcaacacacaaaaacatcttctccattatgaggacagccagctgaaatgactggtcatacctggtctgacccacaggagggaaaagagaaagatgttcattcaagatggattcaagggccgggcacagtggctcacgcctgcaatcccaccactttgggaggccaaggctggcggatcacaaggtcaggagatcgagaccatcctggctaacgcagtgaaacccccgtctctactaaaaatacaaaaaaaaaaaaaaaaaaaaaaatagccgggcgtggtggcgggcacctgtagtcccagctactcgggaggctgaggcaggagaatggcgtgaacccgggaggcagatcttgcagtgagccgagatcaggcctctgcacaccagcctgggcaacagagcgagactccgtctcaaaaacaaaaacaaacaaacaaacaaaagatggattcaagatagaacagctgacctaataaggttctcaggggggacaataaggaactatttttgcttcccttagactccttgtatgtaagtttgatacctaattaaatttttttttccgataatggactgtaactttctgcccttccaaggtcatagtcaagaggttacatttgtttgctccatctttgcttctagatgggagctcctttaggggcgggaccagactttattcatccttggatcccctgtgcccactggtcctggcacatagcagatgcccaataaatgccaaataaatgactgaatgtttagaatgagggtctttacagcattgagcctttccaataacccggagagaggcttttggccgagcaactagtctaccccagagagaaaggacagtctgaactagagagccacagggagtaggaaggtctgctgggtatggggagcagagggagcatgagaagaaaacgtggttcattacatagcccaggttgaacagacagatgaaaatcgcaccctccagcttcatgttccactgtctgactggtcattatatagggccgacatttatctggtctccaggcaaattctataatttcagctccgtctgaagcaacacagtaacactgactcagtggcctagattccacaagtgccacataccttgctttagcttaaatcaggcattgttttgtctggctgctaggactggctcaggtctgctaacaataagatgcttatgcatggccctttcatgcagtcagtcttttaaatttttttgcctctcttgaaatcctggaaatgattcctaacaacggttaatctaaaaatcagctggttttggtcaatataatggcgccccttcgaactcacattcatggaatatggaagctggaaggaagagtagaaactagttctgcttctcaggtaaggaaatccgtgcccagagagttgggctgggttccagccagttaaaactagaactcagagatgctgtcccgagcccttttacttctgctgcctgcccgcaattgcggtcacacctgcttcagacacttccagctcaatcctccctccattttctgtgcaactagggtcctctctggagagctcttaagccatcagctctaggagagaagtgggcagacacaaatctttcacaggttaattttccttggaacattctgggtgatttttttgtaaagcccgattctcaatggtgttgatttcagggtagtgttcctcactgagagctaaggaggcgttgcagaagtgcgctgattagctagaattgaccataaacagagtggcgcggcggatgggcaaagggtgggcagcgaactggcccaaatcatctgtgcatcacctcacaagcaccaactgagcacttactgtgtgcctgggtaatccacagctgcctaattaagaacgagcagctgccttccaaccctcccctggcccgaggagccctactaactggcagattgagggacttctgattctcatcgtgggtctggccttaactagggtcgcgactccaagcaagtatttaaaattctccaacccaggtggcctgaggcttgagaagaaataaaaggcttctcaaagggatgacagtttcgggaagtttttttttgggggggggactggaaaaataccataaaaggcattttgggggtcacacacacacaagagcagaagcgctgtgagccgccctgcaggctccctgccccgggagccaccttccacccgcccccgggcggaggcggccaactcccgcccagcgggctccccagttcggccccgaaaagccgaaaggggggcgcctttgtctataagcgccgcacgggcgctcctgattggctgtagctaagcagggctttcttccgcgctccttcggagcgctccctccagcgtcgccggccccgttccattttcacagctcctcctccccggccgcgcgcccctcccgccccgcgcgcgcctcctctttctcgcggccgagttcagcccgggcagccatatgggggatacgccagcaacagacgccggccgccaagatctgcatccctaggccacgctaagaccctggggaagagcgcaggagcccgggagaagggctggaaggaggggactggacgtgcggagaattcccccctaaaaggcagaagcccccgcccccaccctcgagctccgctcgggcagagcgcctgcctgcctgccgctgctgcgggcgcccacctcgcccagccatgccaggcccggccaccgacgcggggaagatccctttctgcgacgccaaggaagaaatccgtgccgggctcgaaagctctgagggcggcggcggcccggagaggccaggcgcgcgcgggcagcggcagaacatcgtctggaggaatgtcgtcctgatgagcttgctccacttgggggccgtgtactccctggtgctcatccccaaagccaagccactcactctgctctggggtaagtcccgccggcgccccctgcgccccggcctccgtggccaggccgcgctggggcgcgcgaggtcgccgctcgcccctcggctgcgggcggtgcgcagcgacccccggtctcccctcgcctcccgctgcgcgccgcggcccccttggcatccagttttccgtcccttgggacgggcaggtgtttctgtcccagtatttcaacttccgccccccccccgcccccaccccgccgcggtctgcctgaggaagcgcatttgccggcttcccgatggagagccgggggggacccggagtcctgcggtgccaccgctgtgcgcagaggcgcgcgaagggagaggctcggcacaggctgaatcggctcccagcgagggaggacgggcgggcgattgtgtcacctctgcggtccctggggctctcctatcccccccatcacctccgcgggtcacggaccttggggacagagatgaggacaagtaagggagttggaccggggaggagagacccggcacaggatagagtcttggtttacgcgcaccagatggaagataccggttcccctcttgcctctccaaggcccctgtccctgccccctccgcaatcttctatgcccatttgcagttctcggtgaagtttctcggtgagcaaaccgatcccatggcgagagcggtctgaccctagcacgaagctccgactgtggctgtgcagagccttctccaaacc

SEQ ID NO: 10101 - DNA, 6000 bp, Homo sapiens
tagcagaagttctcttatgagggctctgcccctgtagcagacctttgcctggacatccaggcatttccatacaacctctgaaatctaggcagaggtccccaaacatcacttcttgacttctgtgcgccctcaggcacaacaacacatgtaagccaccaaggtttggggctcgcaccctctgatgcaatgggttgagctgtacgttggcctctttttgccacagctgggatgcaggacaccaagtcccaagactgcacaaagcagcaaggccctgggcctggcccacaaaaccatttttccttcctaggcctcctggcttgtgatgggaggggctgccatgaagacctctgacatgccctgagacattttccccattgtcttggtgattcacatttggctcctcattacttatgcaaatttctgcagcccccttgaatttctcctcagaaaatgggtttttcctttctatcgtatcatcaggctgcaaattttctgaacttttatgttgtgcttcccttttgaacacaagttccaattccaaaccatatctttgtgaatacataaaactaaatgcttttaacagtacccaagttacctctggaatgctttgttgcttacaaatttcttctgccagattccctaaatcatctctttcaagttcaaagtttcacaaatctctagggcagaggcaaaatgccaccagtctttttgctaaaatatagcaagagtcacctttgctctagttcccaagttcctcatctccatctgagactacctcagcctggactttactgtccatatcactgtcagcattttggtcaaagccattcaacaaatctctaggaagttccaaactttcccacatcttcctgccttctgagccctccaaactgtctgttatccagttccaaagttgctttcacattttcgggtatctttacatcagcaccccactataccagtaccaatttactgtattagtctgttctgatgctgctaataaagacatacctgagactgagtaacttataaaggaaagagatttaagtgacttacagttccacatggctggggaggcatcacaatcatgaagttgaaggaggagcaaaggcacatcttaacgtggcagcaggcaagagaacttgtgtaggggaactcccctttataaaaccatcagatcttgtgagacttgttcactatcttaagaacagcatgggaaagacctgtccccatgattcaattacctcccactgggtccctcccatgacagatgggaatttatggaggctacaattcaaaatgagatttggatggggacacagccaaaccatatcacaccttcatagaaacaaccagaataatggtttacttgtctagtttttttgagacagggtcttgctctgtcacctaggccagaatgcagtggtgtgcactgcaaccttgaccgctcgggctcaagtgatcctcctacctcagcctcctgagcagctgggactaaaggagtgcaccaccaagcccagctaatttttttaaagatttttgtagcgatgaggtctcactttgttgcacagactggtcttgaactcctgggctcaagcaatcctgcctcagcttcccaaaatgttgagatgacaagtgtaagctaccaacctgagcttcataagcctcttaactaatatccctacttatctcactgcttgcctacagtttactctcaacccagtattgagagtaattatttaaaatataagtcagtatgagacaagaactatgagaggaaaataaaataaaatagaagtcaggtcatgtctctgttctgttcacaatcctccaatggctccctcttatttcacttagagaaaagccaaagtccttaccacggtatgtaagaccccacacaacctggtccctagtcctctctgctctcatccctgatctctctcccttttgctcactctactctatccacactggcctccttgctcttattaagaaaacacttcaagcttgctcccatcttagggcccttgcactagacatccctctaagagtatctagtgatattcttccctcagatctctcatagctactcccttatctccttcaagtctttgagaaagtgagatcagggctgtcctaccaccccaattaccatatttaagtatacatacagcctgtccctacttttccctgttactcttcttttctccataccacttaccaccttcgaacatactgcaaaatctatttgattacctttttcagtccttgtgatgtggggaggggttgtcttgtttccaaagccttgtcagtcattgtaattcattcttctggccaccataaaaaagatgagaggtttattatttgtttttttgagacagggtctcactctgtcacccaggctggagtgcagtggcatgaccatggctcacaaagcctcaacctcgggggctcaagcaatcctcccacttcagcctcccaagtagctgagaccacaggcatatgccattattctcagctaatttttgaatttttagtagagatgaggtctcactatgttgcctagactggtcctgagttcctgggctcaagcaattctctcacctgggtctctcaagtgttgggatcacaggtgtgagccacagtgcctggccagaataatttttgaccaaatgttttggcactatggcctagccaaattgacatgtaaaattaaccatttcagttcctgtgggtaataggtttaaaacaaaatgagttcctgcccaatccaaaatgaggaattggcgttgtgtacatgtaccctaaaacttaaagtataataataataaaattttaaaaaaaaagaaagtcacttcaaaaaaaacaaaaaacaaaatgaggaatcggagccttacaggcccttttagagaaagcctagtcccttccttttctgaagagtttgcagcagttaaatggctttcccaagggcatactgtgccttggcattagtctagaggagactcctgaaagttagggctctactctatgtgactgttctcttgtcctacaaattagcagagtgacatgtgggtacccatctcagtttcctgtgcactttaattggaccaaatatcttaggattgaatcacctctgggcagggtcagcatcatgggtacatgtgcagtcacccagggcctacgctaagaaggaccttgtacttggtttaatgtcctgctgttgccatcttgaaattcttaatatatttttttaaacaaagagtttggacctatattggaaagtcatggatgcaatacatgactgatattacacccttttcaggtttgagtcagatctaaatcatctccaatctaacaactaggagtgttactaaattgcctgctggcctttattctttgcaggcaggagaaaggctaggtaccccctgcctcattgcaccaaagtggccaggcatccaacttgctgtacttgagccatgcaagaagtcacagaatcattgtacatgttttacagaaaggagcctaaagactaagtcaacttcctagaatattaaaatccagatgagtgacttgcctagggttactcagtgagaggttaaatgagttgatacatgtaaagtgcctggcacacagcgatatacagagttgcttatgaataagagtactgaccatctgaggcaggaggatctctttagcccagctgttcaagaccaacctgggcaatatagtgagacctcctctctatgaaaaattaaaaattagccagccacggtggctcgtgtctgtggtcccagatatttagaatgctgagatgggaggatcgattgagcccaagaggtggaggctgcagtgagccatgatccctccactggtctccagcctggatgacagagcaagactctgctgaccagacttttcagcttcaggttcttagcatcacacatgctggttgtctactgattacaaaaactcctttgaagggctgtcaaatttaaaattttcacttgtgtaatgaacatcccttaaccctgaatgcgattttaatttacagtcttgtatgtggccacttggtgcccttttttttttttatggctaaacgtgtacgcaaattcttcttttggattcagtaggtttttcaaagcttttttttttttttcctggtacaactgttccatatgaataaacactatccttttcattttatggagaaagctgataatagggttaaattatagggggccattgttttgaactaagttcctgcactaggtcccaacagatcagactaagaatcaagagtcacccatgctaaagttccaagtcaccaaactaaaactaagttgtatctgacattctgagaagtcaggaaagagagacaacagccaattttccaaccaggccatttcaaaatgcaatcgtcatgacaattaagtttcctgttttagtccttaacctggtgtaacctaatgttaaccaatccgttatttctctgttgttgtttccctgtccccgcctcgcaatgaaagtaatttgaagtgaccaatccgctttttgttctctgcttctgctttcttcagccctttttctgtctataaagccaacttcctccgctcgactctttggaacacttattctattttacagaataaggtgttgcccgattctattttttgtttgtttcctcagagaccccgttctgagtgttgcccgataatggaaccacaaagtcaatcaagatcgagttgtaaaaaattacaactaaatttattgtaatttttttgccttttgccaatagaaatccctttttcattaagtattcctccctagagtaagcgaccacgatgaccccaatttcacaagtaaggatgaggaaaggttctgcccacaccgccgcccagcctggcagactaggattgcatcctgcgggtgccactgcgcatgcctgccggggaatgacgtcaatccgagctcgtcccggcctcaccagcgccatgctgggctcgcgagccgcggggttcgcgcggggcctgcgggctgtggcactggcgtggctgccgggctggcggggccgctccttcgccctggcgcgtgcggcaggcgcgccccacggtggtgacttgcagccccccgcctgtcccgagccgcgcgggcgccagctcagtttgtccgcggcggcggtggtggactctgcgccccgccccctgcagccgtacttgcgcctcatgcggttggacaagcccattggtgagtgcgggcgggcgggcagcccgggaatttgcaagtagcagcctccgagtcggctccgcggagctgtccgcggcggccggccggggcgtgatggaaatgagaacctgaaagcttgggcttggctgccgggtgccgtgcgccctggggcgaatcacctcgggacactttgaaatgagagcctgaaagcttgagcttggctgccggctgccgtgcgccctggggcgagtcacctcaggacacgcagtcgggacagtctcctaaaggacccgccagtttcacgtctgtctgcatcctgagcacctgaagcgggcaagataattctcattccacaaacacttgtttaaatggtgactcaagcggaaggttccgttctcgtggccctccttcatttattagaatgtttgatcctccccgcaatcttgtaaggcccacaaagacaatccttaagacagttaagacgctgaggaaactaaggctcctcgtcagagccagaccagaagaactctgtgttttgatgctgagtcggagctcttttacctgcatcacccataaggcaaagatttaattcatttgaacgcagcagggacagcgcttacggactgcctgtcagcttacaatcgcccccgacagaaagattttcctgaccttcctatcttaattaacacctaccaacctcactttctatcgctttatccgcaatttttcttaatagcactcaccactaactaaccttatgcgcttgttgattgattg

SEQ ID NO: 10102 - DNA, 6000 bp, Homo sapiens
tgatatttttaaattcattattattattattattattattattattattattattattattttgaaacagagtctgtctctgttgcctaggctggagtgcaatggcgcaatcttgggtcactgcaaactctgcctctcgggctcaagcaatactcctgacttagcctcctgagtagctgggaccacaggcacatgccaccatgccagctaattttttgtattttgggaagatacggggtttcactatgttgctaacgctggtcttgaactcttggagtcaagtgatccacttgcctcagcagtgagattacaggcgtgagccaccaccatcctgtgatttttaaaataccttctacttccccagtaagacttcagagcacaggaacaatccctgcttgctgcttacagttgcctagctcagtgcttggtacatagtaggtgcccaataactacttgaatgaatagatgaataaacgaatatgtgaaagcacattgtagaacaccatgcatgcaatagatgttaacttccttcctttcaccattcagcaaaaattttctcttaatttctccttgctttgaaatacagtttgattggcaaataattaaaagcaaaacttaactttagaaagtcataacccaataactcaaaacaacacatttgtaactatttatttgcccggagataactacaaatgcctaaaagtttgcccacattcagagatttctacattagaaaagtcttaattttctaaacagacaagtgataagattatcattttctgaaaatatcctgaaatcagtctgttgttttacaagtgtttgtaattgttgaccaggtaaaccttgtgtgaatccctaaaaacccaatgccagtactgaaaatcaatccacagaccacatggaaatgagatcacatgataattattttttgtatttttatgcatttattttttatttattaatattttttgagacagagtctcacattgttgtccaggctggagtgcagtggcatgatcatggctcactgcagtctctatctcctgggctcaagcaagcttcccaccttagcctgtgaagtagctggtactacaagtgcatgccaccacatccagctaattaaaaaacattttttttttttttagagatgggatcttgctatgttgccctggctggtttcaaactcctgggcccaagcgattctccctcctcagcctcccaaagcactgggattacaggtgtgagccactgcacccagccccataattaataaagcgttcacataaactttctagttcatttaaagttttttatttctaaatcattttcatcacataatttgtgagtccctaaatctgcgtgaggtagtggaaaaactctgggcttggaatcagaaagctgtaaatctactttacaaggttattgcaaagattaagtgggggtaataattttttaaaaaataatctctcatctgttaaacacatacctcacattgtagatggagctagctgtgttacattattgtcaattaattctttaaaaaaagactatgggccaggcatggtggctcatgcctataatcccagcactttgggaagcataagtgggtggatctctgagctcagcaatttgagaccagcctgggcaacatggaggaaccccatctctaccaaaaatgcaaaaaattaacagggcatggtggggcacacctgtggtcccagctacttgggaggctgaggtgggaggattgcttgagtgtggaggtggaggtttcagtgagccaagatcacatcactgtattccaacctgggtgacagagtgagaccctgtttcaaaaaaaaaaaatcttatgaaatatgtattattacccctactatatagatgaagaaattgaggctcttggaaattgacgatctggcccaagattgtacatcccatcaagctgcagggctaagatgtatgaaaaagggctctagctaggatgtatgtagctgtaacttgctataaaaattaaggtgtcttattataaaatatctctgaaatgatagttcctattaatattcctatatgttcctccttcctatgtatccatatcatacatccttatcagacattgtaaatcaaaccaaattagaagcaggagcaagatctcagccaacagatcatcatgtgtgcaaattgcttctctgccccctcgtttttgttttcccagtttcttttctttttcttttttttcttttttttttgacagggtcttgctctgtctcccattgtgcagcggcatgatcttggctcactgcaatctctgcctcccatgcaattcttatgcatcagcctcctgagtagcttggattataggtctgcgccaccactcctggctacaccatgttgcccaggctggtcttgaactcttgggctctagtgatccacccgccttggcctcccaaagtgctgggattacaggtgtgagccatcacacccggccccccgtttccatattagtaactcacatgtagaccacaaggatgcactatttagaaaacttgcaatggtccacttttcaaatcacccaaacatgttaaagaaattggtatgactgggcatggcacagtggctcatgcctgcaatcctagcattttgtgaggctgagacgggcagatcacgaggtcaggagattgagaccatcctgacagacatggtgaaatcccatctctactaaaaatacaaaacaattagccgggggtgatggcaggcccctgtagtcccagctactcgggaggctgaggcaggagaatggcgtgaatccaggaggcagagcttgcagtgagccgagatggtgccactgcactccagcctgggcgacagagcgagactccgtctcaaaaaaaaaaaaaaagaaagaaattggtatgactgttgactcacaacaggagtcaggggcatggggtggggtgtaagattaatgtcatgacaaatgtggaaaagaaacttctgtttttccaactccacgtctgctaccatattattacactcttctggtagtgtggtgtttatgtgtgaattttttttcatatgtatacagtaattgtaggatatgaacctgattctagttgcaaaactcactatgagcttagcttttaagttgcttaagaataggtagatctatgcaaataatgataattattattattattttaagagagggtctcactttgtcacccaggctggagtgcagtggtgtgattaagggtcactgcaacctccacctcccaggctcaaataaacctcccacctcagcctccccagtagctggaaccacaggcacgggccaccacgcctggctaattttttgtattttttgtagagatggggtttcatcatgttgcccaggctgttcttgaattcctcggctcaagcaatcctcccaccttggcctcccaaaatgctggcatcacaggcatgatggcatcactggcatcacataccatgcctggcctgatttatgcaaattagatatgcatttcaaaataatctatttttatttgttgccttattggtggtacaatctcaagtggaaaaatctaagggttttggtgttatttgcttactcaaccaatatttattagactcttactaagcaccaacatgatcacatgcctgagctatggctagcatagcgtgtgagacaaacttaatctctgttttggtggagcatataatctagtagatgaagccaatgttgagcaacatcacaatactaacaaattgaggatgctacgagagtgtctaacaaattgaggatgctacgagagtgtctaacaaattgaggatgctatgagagtgtgtcatggagagctgcctggagattgagagaaagcttccttgagggaagttacatttcagctgaaacacactgccatctgctcgaggttttgtaactgcattcacatcccgattctgacacttcacatcccgattctgacacttcacccagttactgtctcagagcttgggtccgcatgtgtaaaacaaggacagtatgcacttggcagggttgtgagaagggaagagaacacaagtaaagcacctgtatcaggcatacagtaggcactaagcgtgcgatgcttgctatgattatacatcagtgtaagcatcaaggaaaagctgaagaaaagtctgaccaacagcgaaagataaatgcgcagaggagaaatttggcaaaggctccaaattcaggggcagtccgtactctacactttgtatgggggcttcaggtcctgagttccagacattggagcaactaaccctttaagattgctaaatattgtcttaatgagaagttgataaagaattttgggtggttgatctctttccagctgcagtttagcgtatgctgaggccagattttttcaagcaaaagtaaaatacctgagaaactgcctggccagaggacaatcagattttggctggctcaagtgacaagcaagtgtttataagctagatgggagaggaagggatgaatactccattggaggttttactcgagggtcagagggatacccggcgccatcagaatgggatctgggagtcggaaacgctgggttcccacgagagcgcgcagaacacgtgcgtcaggaagcctggtccgggatgcccagcgctgctccccgggcgctcctccccgggcgctcctccccaggcctcccgggcgcttggatcccggccatctccgcacccttcaagtgggtgtgggtgatttcgtaagtgaacgtgaccgccaccgaggggaaagcgagcaaggaagtaggagagagccgggcaggcggggcggggttggattgggagcagtgggagggatgcagaagaggagtgggagggatggagggcgcagtgggaggggtgaggaggcgtaacggggcggaggaaaggagaaaagggcgctggggctcggcgggaggaagtgctagagctctcgactctccgctgcgcggcagctggcggggggagcagccaggtgagcccaagatgctgctgcgctcgaagcctgcgctgccgccgccgctgatgctgctgctcctggggccgctgggtcccctctcccctggcgccctgccccgacctgcgcaagcacaggacgtcgtggacctggacttcttcacccaggagccgctgcacctggtgagcccctcgttcctgtccgtcaccattgacgccaacctggccacggacccgcggttcctcatcctcctggggtaagcgccagcctcctggtcctgtcccctttcctgtcctcctgacacctatgtctgccccgccagccgctctccttcttttgcgcggaaacaacttcacaccggaacctccccgcctgtctctccccaccccacttcccgcctctcattctccctctccctcccttactctcagaccccaaactgctttttggggggtatcatttaaaaaatagatttaggggttacaagtgcagttctgttccatgggtatattgcattgtggtggcatctgggctcttagtgtaactgtcacccgaatgttgtacattgtatctaataggtaatttctcatccctcatccctctcccaccctcccaccttttggagtctccagtgtctactattccactaagtccatgtgtacacattgtttagcgcccactctaaatgagcctttttgtttcattcattctgtaagtgttgaataggcaccacctaaggtcaggtataagtggaaatttgaaaaagaaactgcccacttgccccagtacttccctagccaagaggagggaaaccaggcaggtgcacctgaaggcctgtgagtgcttgatttgctgtgcagtgtaggacaagtaagattgtgcatagccttctgtatttaagactgtgttaggaagatttctctttcttttcttttctttttcttttttcttttctttttttttttttaggcagatgaaaagggcgtcacagaacaggaataaaa

SEQ ID NO: 10103 - DNA, 6000 bp, Homo sapiens
tctagtctgtctaattcaaaccaaatgaatattttctctgaaccctaagatagcctctagctatattcctttctctcaccttccttttatactgaaatctttaggaagagttttaaactgtttccattattttatttacaataactgtttgcaccattatagactgaactttctcttgccatattagtcaaaggccctgatagctgtgagctgggctgtgggggaatactgtgcacatagcctctcttccactgttattttcttaacttggagtggtaatgaaaatagatatactcggactgaatacatctgttatatatgtaacccaaatgtccccaggcccatggtgaatcctgtctgaaacctgaccttgccagggaaaattgacaattctggagttcacctttggagtaagcactaagaaatgtagcatactggggccttaccagctctttgcaactggtgcacaggcattcagcaggagtctcaatatggggccttataaatactgggcagtgactcttgcctggtaaaataaaagaaaggtcctgtggtggagggcagagggcaatggcttggaaggctgtgagtcacttaacctttaaccttgtgcaaatcagtctcctttgcactggtgacttatctgtaaaatgaggaaagtcatctaacatctgacctaatgaggaaggtcctttttctctaaaattctatggctagctccaaaaacaatgctaacttacaagttaaaatgactcatttctatacagtgcaatacatttataaaatgctggctttaatctgaacttatcaaatagaatttgataaaatattaggatgaggttaggaactaataaaactttattttgaatttttatttgatttaccactgcctcccaatgtaactttagttagcaaataaaccgacctataaatatgaaacatcacaatctaaaatatttttaaaattagactaaaattaaggaaacttttttttagttttagtcctatttcaagtgaggactctattgtcatgtgtctttatatgtatattttatcagtttattttacttttaaaatccatttttcattataaaatttataattttctaaatttgttacataaaatttagaaaattacactaaaatacaagataaaagacattccatgttactacccagaacaaatgaacactttcctgctattttctttctttctctttttctttagagtggggtctcactctgatcatggctcgctgcagccttgaaccccggggctcaagcaatccttccacctcagccccccaaatagctaggtccacaggcatgtgccatcacatccagctaatttttaaaaaattgtttgtacaaatttacaagaaaaaaacaaacaaccccatcaaaaagtgggcgaaggacatgaacagacacttctcaaaagaagacatttatgcagccaaaaaacacatgaagaaatgctcatcatcactggccatcagagaaatgcaaatcaaaaccactatgagatatcatctcacaccagttagaatggcaatcattaaaaagtcaggaaacaacaggtgctggagaggatgtggagaaataggaacacttttacactgttggtgggactgtaaactagttcaaccattgtggaagtcggtgtggcgattcctcagggatctagaactagaaataccatttgacccagccatcccattactgggtatatacccaaaggactataaatcatgctgctataaagacacatgcacacgtatgtttattgcggcactattcacaatagcaaagacttggaaccaacccaaatgtccaacaatgatagactggattaagaaaatgtggcacatatacaccatggaatactatgcagccataaaaaatgatgagttcatgtcctttgtagggacatggatgaaattggaaaccatcattctcagtaaactatcgcaagaacaaaaaaccaaacaccgcatattctcactcataggtgggaattgaacaatgagatcacttggacacaggaaggggaatatcacactctggggactgtggtggggtcgggggaggggggagggatagcattgggagatatacctaatgctagatgacacgttagtgggtgcagcgcaccagcatggcacatgtatacatatgtaactaacctgcacaatgtgcacatgtaccctaaaacttagagtataataaaaaaaaaaaaaattaaaaaaaaaaattgtttgtagagacaggggctccctgtgttgcctaggcttgtctcgaattcttgggctcaagcaatcctctggcctcctcccaaagtgctgggattacaggtgtaagccaccacacccagtgtaatttaaaatattttttttttgtagagatagggtctcagtatgttgcccaggctggtcttgaactcctgggctcaagcaattctttggcctctgcctcccaaagtgttgggattacaggagtgagctgtcactccttgcccagcaattttctatgtataggttttttttttttttttttttttttgagatggagtctcacgttgtcacccaggctagagtgcagtgacatgatcttggctcactgcagcctctgcctccctggctccagcaattctcctgcctcagcctcctgggtagctgggattacaggcatgagccaccatgcccggctaatttttgtatttttagtagagaagggtttcaccatgttggccaggctgctcttgaagtcctgatatcaggtgatccacctgcctcggcctcccaaagtactaggattacaggcgtgagccaccgtgcctggcctctatgtatagggttttgatttgtttttactttgcataattacagaatgctatattcaactaagtatccatttttaaaaatgtgcttcatatcagtttcgtgtgtgttttctccatttttgttcagtctcctcctgtagtgccttcagatcttgctggaaatgttttcattttttctggtatcataaaattttattcttttcacttatctgggtgagctaaaaagaaaattaaaataaaatttatttttcggagatttttcagtttttgcaaacagtcgttaacggccaggtctgaaaactttatcttaatttttttttttttcttgagacagagtctcactctgtggcccaggctggagtgcagtggtgggatctcgggtcatttgcaacctctgcctcctgtgttcaagcgcttcttgttccttagcctcgcgagtagctgggattacagcctcgccaccacacccagctaacttttgtatttttagtagaggcagggtttcaccatgttggccaggctggtctcgaactcctggcctcaagtgatctgcctgcgtcagcctcccaaagtgctgggattacaggcatgagccaccgtgctggccttaattttgtcttaaaatgaagtatgactaacatgtatttctatatgggcctttaagggtcttgaaactgacagaaattaattcaaaagaataattttacccaaatgtttgggcgcatcatgaatatataccttaaaattcttttaaaaagcatgcggtatggtatatttaaaattctttttaaaaaattatgtatagtcaattttcttatctaggcttcctagctaaaactttcctgcattgggtgaaccattaatagttattcctagtgttgatttaaacaacttaaatgatactatgatttttgtttgtaaatgcaaaccagaaaatatctgcatgcaggtactaatttcctagggtagatgcagcaggtagatgttgggatggctacactcacaaagcctgatggcccgtttcctgaacatgcgcaatcactttctagcctttccacaccatcggaatattgcacagaagtatgtcagtcacaggagtgtaaagaataacatttaaactatggtaatattttcattcagtaagtttctcccctttccttccttgggttagattcagtgcctgatttttttaggccctggggcgcaagcatccactttctcagaatcccattcaccagaaaccacccatttaacttgctctgggtgcgagcagcgcttgtgactgggcaacctgtgcgtcagcgtccccggtgcttcggcgctccggccagtgacggcgaccaaacccagctaggtcagacgaggtactgatcagcccaatgagcgcctggtgattctcgtagttaatcactctggttcattccgttcgatcccggaggcgggagtgtttggcttgtccctgcgtgtcacggcagggtgaccctagccccgagggagggcggtggtaccagtcctgctggcggctcagcgcggcaggacacgtgtgcgctttcagccgggtcgcagggcgcttatcgcggcccggcagtcggggccacgcctcacccccgcccgcgaaccccgacctggggaaacccggggcgctggggaggggccactgcgttcagctctggcggtccacagcccgaagcgcggcttaggaagttcgtgtcagcgctgcctgagctcgtcccctggatgtccgggtctccccaggcggccacccgccggctcccatcgtgacctccagccgcagcgcctcccacgccggccgccgcgcgaggggagcgctcgggcgcgccgggtgtggttgggggaaggggttgtgccgcgcgcgggctgcgtgctgtgcccactcaaaaggttccgggcgcgcaggagggaagaggcagtgcccgccactcccactgagattgagagacgcggcaaggaggcagcctgtggaggaactgggtaggatttaggaacgcaccgtgcacatgcttggtggtcttgttaagtggaaactgctgctttagagtttgtttggaaggtccgggtgactcatcccaacatttacatccttaattgttaaagcgctgcctccgagcgcacgcatcctgagatcctgagcctttggttaagaccgagctctattaagctgagtgagtaaattgtaaaaccagtttcgctgagagtgtgtgtctggaaaggttggtgggcgttgtgtatatatttgttagaaaatcggtaaccgttcaaacgagacgactgagttttttagcctttcgcagtttcatttgaaagtgggtatgcagtttaaaactgacagttcaaagtggtttttcagaaaatgatgccctggtgcaaactgattctgggtcccatagtgtgttaagtgtgggttggtaaaaactcttggcctttctccaaatgtatgaaattaaagttgatattggaaggataaaaacccactgagcacagaagttactataggtggaggaaacatttgttgatgttaatattttaaaggggttgaccaatataggaattggtcaatgacaattgggaataggtaaatgacaaattattggtcaatccctttaaagctttggatggtttgctaaagaattattgaactcccttttgtaattttctgtggatagttgagtgctcttactcccttctcagtcctagagatatcccctaaagcttggtttttaggaggatcttacagctctcttatcatttgaatgtcagctagtcataaataaatacaccagagtagtaaggaagagatgttttttattgatattctttacaaaacagtgctttcagagtacagctttgactggattgtatagatcttgatgagatcttgatgagaaaggtttcaacgacaaagatggcatgttaagtctaacattacccttccattataaacattgaaagatgttggttattttattatttattttataataacttttaattgtgaaataatttgagagttactgaaaatttgcaaaaaatagtacagagagttcccataatatcatgcataacaagggccaaaactaataacatgggcatgctactataatacaatgaactaaactacagactttatttggatttca

SEQ ID NO: 10104 - DNA, 6000 bp, Homo sapiens; identical to SEQ ID NO: 1117

SEQ ID NO: 10105 - DNA, 6000 bp, Homo sapiens
tcaggatactttcagttgtatgaaacggaaaacccctgtcaaagtatcttaaccaagaaatttgtctcatctgacaggaagtcgtgagtaaggccaccttcaaggttggttaagtcagccatacaacaaaggctggaaggccctggttctttttatccttccactctgccatccttggtgtggtctttgtcatcaggctgtagaggatcgaggcatcacatccaaacccaaccaagtccaagggcgaaagagaccatttcttagatgcaaggaaacctctagcagattcttctcatggcttgttgaccagaattgggccacctgcccattcctgaaccacacattagcaagaggaatgggactgccagatgtgacgcagagggccagtcttcccagagcatgtggctgctttaagagggggacgctgaacacagctgctagggttctgagaggaaggcggcaggaggggtgtggaggcaaccagcagggcggctacagagaagcaaaagaaaaacagagaggagcagagaggcagacaatgacagagcccaagaggagggaggcaggaaggtgggcaggaacaataaagcacaggtggagacagacaagctcgttaagtttggtgtcttaggttaaaacgctgttgtcatatcttgctcctcagccaggcaactattagaagaacacgctttacctgttttcactgccacttgaagagctgattaacttgtcagtagttaaacttattaaccatttttcaacctcagagttataagggaggtggccttagcagtattcagacagaaaatttttctccttttctccttaaaatagatcagcatttattgagttgtgaaggagttgcgtgaaataaatatgattacttagttactttcttacatctttatgtataattttatcttcttaattgtaaaagcaatttaaccacacttaaaaattgcaaaccagaaacatgaaaacaaaatcacccagccttataactgttcttatttggcaaaaattaactcctaactttttttcatacaactgcataccgttttgtagactgctttatttttcaaaacgtgtatcatatacatggtacaaatttcaaaaacagactaaaggggttatttaaaaataaaacatgtctccttcctatcagtatctttagtcccccagtttgccccccattccaccctaactcgctgttaccagtttatttcgttttcttccatagatagcctacccattaacaaggaaatatgtgtatggatattcttttgccaacagagcttatcttttcacaaaatgatagcctactgtgtacactgtttttgttccttgtttttaaaatttaacaatattacttggagataattccatatatagtgcctttaaaatttaacattataatgtatccatatattgccacatactctataagcagtatcttcaagagctgtaaaaactgtgagcaaatgactcattcattcctttaataaatatttatcaagcacctgccatatctgcagagctctggtgattctaagattaccaagggttaggtcacaccctagaaggagtcacagcagattgaggagacaggtaggtaaacaagttcttacaggcagcctttaagtgccgggatggaagaacacagcgggtgttgagggaataaagaaggagcctccgagacattgaacaaaagtagtgaagaataagagaaatcagctcacagacaagagacaaggagaatgccccaggcagaaactctaaatgacatgtgcagaggcacagaatgtgaaggaacattgtggtccaagtaactacaaggaattggatatcacccctactctttgatctttaatttctggccaagtcttcaatataaataatgctatgatatacatcttgcagtgtataactttttccatctgctggggtatttctttgggtagattcccagaagagggactgctgagtcaaaatgtaggagcactctgacctgatatatacagccaaaatgctttccaaatggacatattatttcataaggacaccaacaatgtatgtgctaaccagtgctcattatttttgtatctttattagttttaatgtatacttcatttattactagattaatttccccatatattttatttcttatatgatttattttctgtttatactcaaccactgcgattctatattttactatagctctatgagccctacttataatatagacattcaggtttttatttttcatgtttgctgccaattttttttctggtttagcttacactaaaaaaagctggacacgtagaagtgtttaagatattacccaatcatatccattgattatttccttctattgcctctaagttgagaaatacttctatacagaggtttgacaaatatttttccttctggtctgctttaaaatatatttaactccttaatcctcatagaacttattttggatatacgaaatgagataattcaattagtttttccacccccccctccaaattactgattagttatcttacctttcccttctccattgatttttctttttaagactttattttcttagcagttttagtttcacagcaaaattgaaagaaagactgcatactgtatgattccttatatatggcattccggaaaaggcaaaactaaggagacagggatacagtcaaacttcagtggctgccagagactggggggaggaagggataaataggtggtgtacagaggacttttagggcagtgaaaatactctgtatgatactatgatactatgagggtgggttcatgttattctatatttgtccaaccctatagaatatacagccccaagagtgaaccctaatgtaaactatggactttgggtgataatgatctggcaatgtaggttcactatttgtagcaaatgtgctactttggttggggatgttgacaatgggggagggtgtggggtcgggtatatgggatatccactgatttttatttcaaagataaatccacttagagatcaactcagtcatcaattgcatctaatttctggtccttttgaaatgtgtcacatcagcttaggacagacctttcttctgactcatccagtattcctgcagcgactgttctatttatatacagaattacaacatagctccaataggcttaggtaaagcttgtcagtaccttcctgttaacaaggaaatctgctgctgaaagaccttacttttgaagtctaccagattggtggtagtatggcctgtgttttgagtgggtagagagcacttttgagggagtgaggattatttcatccaaagggctgaagctactgttatcccgtgtcatagcttctgaggtactgaatgagtaggatctcctggccctcccatctctgtgggtacctcgttcatacttgcgacctcaatatagcctcaatcctgctgaagcccagtactatctctaaatgtggtttattgcaggaaaaagtagcttcttgactagccaaaacttgactgccggttgtcaactagccagtttttgagaaaagtgagaggttgttacgtaggaaaccttataactagaggctctcaaactcaagtatttaagtatcatcttttagatttctgtgtccaggatcgggttgcactgggtggtgctggaaaaattttttgatctcacctccttctagccttttgaatccttaaaaatattcccatagacatttatacacagtcctgggcggttcttccttctccttccgtgaaatactggtacctgctttgccaacacctatgaaagtgctccaggaggagggcggataagcaactaatgagcacacctgctcaggtagggttctaaaacaatttccagccacctgttctattcttccccagagttcaaaagcttaatggttcgtgatccaaaaacccaattcagattccccagaagacctccctggaatccgttgtggattccttcctagagttaggaggcaagcaggtttcttaggcactattctgtcggggtaggggggagcgtgcgctgtccgggtttgtgtggttgcaatagaccctagggcgaggatcgcatcccgggccaggactcccttgagccatctctttttcctcgtccccatttctaggataaaacccatttctccggtaggtggggaggttgggttagagtcacacagggattcaggaagctttccttttcaacgtcccatcccttcatcctttcctcccacttcccgtggctcttttctccaccttccccaactacccccttttccattcagcgaagtccacgacgactttccttccctgtccagtggcatcgcatcttctctagccacataagcctgttgtggaggagggggcgccagtgtggctaccctggaaggggtgtcgggggtggctcgcaggtcctcactcacccagccctctccccgaggagcgaccctctcgcccgcgtccctccagagctgcgccgctcatcaatcccggtcactctgccagcctgctccccgggcgcccttccttctccctctcgcctgcggtcctccaccctcccaccccctacctaccccgcagcgacgttcggggtcagcggcgcttggggttggcccgagaaggggcggggataaagcgagcggtggaaggaggcggctacgtggtgccaccgccgcccgggagcgcccgaccccgtgcgcgcgcgcgcctagccaaggcttgggcggcgggcggagctgcgggcggcgcgggcggaggagcagccggccgggcgggcggagcgagaggcgggcggagcgaggggtgggagggcgcgcgcgaacgggcgggcgagcaagcgagcggcgtctccaccagcatctgccgcggccgcctttgcccgaagcccggggacgaaccgacggaccgaccgcctggcgcacggacgcgggcgctcgctttgtgttcggggctagcgtcggcgaggcttgagcttgcagcgcgcggcttccctgctttctcgcggccaccccggctccggcggcctcggcgcgcgaggggctggaggtgcgggagccgctctccgccggtcggtccccgcgcggctgagcccaggccgccagcgccgcggccccgtgcggtgtccctgagctcctgctccccgccgggctgctccgagcaacggtgcttcggagctccaaactcgggctgccggggcaagtgtcttcatgaacccagaggatgtccgggaagcactacaagggtcctgaagtcagttgttgcatcaaatacttcatatttggcttcaatgtcatattttgggtaagttggagcgctcctgggattccaactattgtggccgatcgattcgcgacgatttcccccacgttgttcgttgcctttacttttcgcagccccgcaggcgcttgccggagcagcatagaggcattcgccttccgcctttccagcttgcgcgttggagagataaacatttaatcctttcgaggaatgggaagaggtgaaaagagaaatcgaggcggaaagggggcaccgaggccttctggtggctttttgaggaacgaatagcagggatgcagataaaagaaagggttcggcagtttgagaaatgagcaaccacacgaattggatttgctctcggtgggatatagatgttgggcagagcgtggtgtcataatagggaaggctaatcgggcacggccgaccctgaggtccaccttctaacaacgatctgattggacgagggcttggctccgtgttgccgcggctggtctgtgccatgctcagcgtgtatcttcttgcaccatctcgggctttgtgtaggatgcagatgccgtggtatatggtcctgtaattgcacgtaaataacgtttcctgcacgctctcctcttcagctggaaagcgctccctgtgcgtaatggactggtcagtgggggtgcggggtagagggatttatttgtatgtatat

SEQ ID NO: 10106 - DNA, 6000 bp, Homo sapiens
tgatgtattaatatatactaggaattataaacttcttggaaaaatcttatttttcctattatgatttacataattaatgaaaattatcctctgcagctcagtttgtataggaagaattcatttatgacagtgatttccagagcttcttaaggcagatgagtatgaaagaatggtacttggactttttaaaaaagagagttgtccagtaggacaatggactgcctgacagagtaatgagcctcaatcatttcatctgttagcatggaggctcactcagcatttgcaggggtgttcctgtgttaggacaaattcgtactaaattaacttttcgtatgtctcatctctgagccactgtggttttataatttccctgtattcatgtccttatatatcaagagacttattcaaggttagggagttgatgtgaggtatgagaatcatctttacatgctgaggagtaaaactgggatggacagttggagaatgtgagagataagctcttgagaaacttcaagaatcaatttgctatgatgctttcttttcacataagcaataacaaaataccattggacctgggtcactgggagttgattaataggaatgtggtaggtgagaaagatagtgattttactggcataagtttggccaaatggctgggccctcccactgttgatgttcattatccattttggccctgaggaagggagacttaatatctccacaatcatgggctctaaatatctctttggtttcagctctgttcccactaatctttaggagatcacccaattcccatttcaaataggcaagtaacaaaaataagctgtttgattgcatctccattgaagaaagcacttgatatttaaagtaccttgaagtagagcatagaacaaattcctgataataagagttgggattctgtataatcagtttaaaccaatattttgggactctcatcatctgaatatttcttaggacatttcttaatcactctagaatatgatggtttatataaaatcctaacaactgaaagattctagaagtttaaggttagtaggtttttttctgttttttgttttgttttgttttaatatgtacttttagaagactttctggaatctcacttagtcctctaaaccacattagaaagttggcatgatgtttatcctatttttctgtggggaagctaagcatggagaggccaaatagctcagcatagaggggccaaatagctcagtaagtcacataaaactaaggcagagacaggatttgaactcaagatcatgctctttgccagttcatgaaattacttcttggctttcctctcattttagataattttattcagggtaatgagctggctaagaggaagaaggcaagtatggaaagggagtttaatttggggccctagtaatggtgctatctgaataaatcttttcagtgccacataagctaacataaatcatgagtgttggagtcttcattatacaatttcttcagtgtcaaagatgtcaatgacaggccttgatatgcatttggaaagaattatgagattgctcttgcatgacctcctagcagctactttttctttcagcaagcaattcggaagatgaattgtgaaaaagaaacaaacaacaacaacaacaaattaaagagcaaagacatgttttcatctctcaggttagagtggttcagttctcttcacatattttcttctattaaagtgcttttaaattatacacttcctaataatgaaaacattccagcaggttagaatacaaaatgtttaataaatatatgtataaatatacactcaaaacattaaattaaacaaaatgtatcaggtcaagagaaatgtttttgttgttaagaggtaaaaacaatatgtgtttaatctggaagatcttttcatggaaaatttaaaaatgtgacagaaactacccataattcatttcagaagataagcaatattaacattttgtatcttactctctcttgctctgtatgtgtatgtatgtatatgtgtatttacatatacacacatatacatgtatatacatatatacacatttacatgtatatacatatatacatgtacattcacatatataaatgataagcatatgcatatatatgcatatatacatgcaacaaagtgtcatgaatatatttccacatctatgaaaagttatctaattagtattttgtggcagaacaatattcttcctcaataattaatgttttgacaaatttttgtaattacatggacttcaatgaatatcttcatttttagaataagttcctaaacatataattttgcaagctcagagtgtggttctttaacagttttgatgtatattgcctagtcacatctcagaaaggtcataccccaagaataagatagttactttatttgaacatttatcaaaaatgagtactgtcataaactatacctaattatatataaaaggcaaaacacgttgttgcgatgttgggatattcgtttctttggtctctggtgtgatgaatacagttttggattttactggccctccatttcttgcgagacatttttttgccgtttttcagttgtagagtcattgctttttagatcagaagttattttttaagataacttatcatgtactgttacaaaattttttatttgccttttaaattcatggtatgttatgccaaaaatcttttaatttttgtgtaagcaaatgtatgaagtctttcttttatgtgctttgcctttagtgtcatgcataaaatgtcccctttacctcaattatatatagtagcccatattctctcctagaattttgtgctttgtattttaaacttaaacctttaacatataagattaacatgtaagatttggtattttaagtaaaacagacacttaattttaaaattttcttagatggttaacacattgtcaaaaaaatcccacagtaaatatataccctattcatcacagtcactacatgttaaactcacctatatttaatctctctctctatatatacatgcatatacacacaagcatgcatatgcaaacacatatctgtaaatatatctgcgtgtatatttatgtagatagaaacaaatataaatatttctgtgtctgtactttctattctatgccactgatctgtttgtctcctctggcaatcattgctgttttaattaaatattttaccttaaaaatatcttctgatttagtaaagcaaggctgacccctcccctcattattactccttttttttttttcttttctgttcttatattctaaattttttttggctagcattttaagatgtttcttagtttttgtttttcatcaacaggccctttgtcttttaagtagccttaatattctactgtcaagcattcttagaataggtatctagtgtactaaatggaaatgcatagcacttagtgctgaggagtccaaatgccatggaatccctgaagaaattattgtgaccagcatcagtggtgactctgagtactgacaacttgagtacagaaggagcaggaagtgaggcaatgtgagggttcgactgtgatttcacatggccacaccccaatttatttatggaaagtgcatgtgacatctattcacatatgttcctatctttatattctccaggatatgccaaataaagtaacaacgccaaaggcagtctgttttagaaaatcaattagaagagggtaaaatgcaatcttatgcacaaaatagaaacttagctcttctgacccctggtataacgttggataaaacaagctaacgtttttaagtgttttgagcagttgactcagtctaactcgttttgtatgaagtattttccagcatggtgcagcagtgaaactgtgtgcccttcttgcaaacaggtaaaggtataatttttgaacagtttttgtttttttgtttgtttgttttttttgtggggaaaatgaatctacaccgattcattgacaatgttgtccagtaaagcctcatgagtaaaggtacgtaaaaggatgatcagctaaaatgagacatgaagcctgtggctgaagaaaaatataatgtcattggcacacacggggcttgtacccaggactatggcagtgttatcaccacgttttaatcagtcacaactgacatcaacgtgacccctgctatatagattatccagcctggttggcattccagtcttaaagagtcaacctctcccagcttcactgatgtgtgatggcatttcacccactgccattccaaccctgtcccctaaagaagagcattcatgaggtgttataagtaattgttccttattcatcatcaaagttctttagtaaaaaccaggagtgaccaatagacattcacatgtctttgcttaattctattaaaaaagactgaaaaacttctctgtacaccctttggaagtctttttgcttactcaagagcagagcataatctatttaatacaatttttcacttatatccaaaaggtggccttctctaatctggctttcaagttggaaagagaaaagttaagttgattcctgatggattttgctctaaaatttaaccctcgggcagtgaaagcctctttatcccaactgagtagctgctaaatgaggcccctttataaccacttcagaatgcactttcaaaacaaaagttagaaggccctatgatccattctcaagaaggatctgtttctgttcaaaaccagtcccgacctttctgttgaagaagaacaaaataatgtagtaacaaaaacacaagtggctgccaaaggaagagagagaaaaaaaaagagttcctgtaagggactgaaacaataaatctcctctctgctgaactcccaaagggagtgtgtgtatttcctcccgttctttatcagagcccccaaaataagtaggaatgggcagtggctattcacattcactacaccttttccatttgctaataaggccctgccaggctgggagggaattgtccctgcctgcttctggagaaagaagatattgacaccatctacgggcaccatggaactgcttcaagtgaccattctttttcttctgcccagtatttgcagcagtaacagcacaggtatttttgtctcttattcctctggtggtacggattggaaatcactagtaggtgactcagcctcagtttactttcagggatcttcccctgacacttagatgcagcaattcctttgatgagttgagtgtttggatgttgacttggagtgcgtggagaaggcttgagagagacggtatttgtttctactgaagggaaatgtttgcgggtacagcagcctgaaagcatgttcgatgaaatcacaaagtactggaaatatacaatggcctctttagagtataaaaatctgggaatagaatgctggttaaaaatgtactctctctcaaaaatgtattctttgcagacatagctcagaaataataagattggcatgtgtgggtgaaaggctgtaatcggagacattatattgcagatgttagcctgtatttttcccaactatttttcagctctgataaattgaggagttgagtaaagctgcctagggaagtgagtcctaatattttgaggtagggtgaatagagagagattcatttgattacagtctatagatttttgctgaagaaatatgcacatatctaaacatatacatacattttgcataacatttcaggaatttataaacataaaaatcctacctattgacttctggttaagaaactcagataaaaaataggtttgtatcttcataagccttgagtatatcaatggacaatttcaagaacgatttacatttgacttttaacccttcctgagtgattgaaaataaactgttaaatttaatcaatatttattaggttcctaccctgtactgcaaggaatataaaaacaagtaagacgtccttgcccaaagtggtagaagtactactgggagaaataagcatgtgattttaatataa

SEQ ID NO: 10107 - DNA, 6000 bp, Homo sapiens
ttaatcttgaagtagatattaaatatgtattagatgaatgaattatgaatatcctaatcccaccaagctgatctgcataaataaagcctgtccattcctctcttcattagacttctgttcgagccctatccaccatggctttcacctctattcaaaactagtttaatattcacttcttctaaatagccttcaattttatgtcaactttgctttggttaccctatggtgctgtattcctttaatgtttatgctcttgatttggacttgattaatttataccaaaggtcagataagtgttttgaactgaacttcattggttaggtgcactttgctgggagcaccataaacttaatgatcatctggtcctctatttttgcaggctctaaaagtagatgcatccaaaaaatacttactgaaagcttttgagatccaggcacatcatcaagaataatattgtccctgtccttaaggatttaacagtccaatagagaaaacagacagttaaacaagacattgcaaaacaatatgataagtgctattatgcaggaactacagggctgctagggagctcatggcaggagcactcaatcaatccaagggtggtggagtttaggcacagcttcccagagaaagtagggcattggctgagggaagattaggacttagccagcaaaagggatgtaagaccaaaaagtgttacacttcatgctgtttcccaggtcatcagtggcattttctccaagtaacaggcttggaatatttattaacttatacataatacagttagtataactaaatcagaatgctattgaatatgtttagggcccctaggaaaattagaaatggaagtccacagagtacagaaatgattgaagggcacctgaagccactgccaatacctgttttcattttgaggtcatgcagcaaactcttttctacctctaagagggtagccaccatctaaatctctgtgactgcccagtgctggctttttgacttcctctattggatctctgaaatttgtgcctattcctggaagctctttgtaggaatttattaattgctataagactatgttgctgttatatatcatggagatggtgaggtcaagaatgacagaggctgaccattcagcagggctcaccatgtgaaggccggggtttgtcaccacattgaaagccacatctcttgacttggttggtgaacttagggttaacctgatagagtactgaccaactcaacctatcccctcttaaaccacagatagaaacaattactctaacttttgggtcccttatacatacttatgtcagagcacatgtaacactttttttcactttatttacatgtttgtctcttattaaatcagctccctatgggtaggaaccttgtcttaattatccttgaatcctcagcatttttcacagggcatggaacacagtagacatttaataaacatttactgactaaatctgagaggaagaggatcctctctcaatatcagaaaactacttgccacacgacagttcggatcttagtccacttagtctatcttagtcagcttgggctgctataacaaaataccatacactgggtggcttacacaacagaaacttacttctattaaaggttggaagttcgagatcaggatgccagcattgttgggctctggtgaagtctctctccctggcttgccaatggccacattctcaccctctcactcatgtgtcatcacttgatgccgagagagagcaagcaagctctctggtgtctcttcttataagggtactctaatcacagcatgagggccctaccctcatgacctcatccaaatctaattgccttcccaaatcctcatatctaaatacatcacattggaagttaaggcttcaacatatgaatgtgtggggaaggacataattcagtccctgaaagaagtgtcatatttccaaggacagtatatttctgtctggtattaactcccaatcaccttgattgatcttgatgtcctcaaaatttcctcaggtaaacatttgcaaatgatctcatccactacattctttaaaaatagtatttttttctgattataaagtaacacattttcattgcaaaaaatttagaacacagaaaaatacaaacaagaaaactgaaactaatataaacatgtattttatttttctttaaaattgtactgcagttttgggggatgtattattttcagaaagatatatcatcaactgaatttgttgggtgaaaggcaacataagtatttcatatttggcttttatgatgctatgtagattgaagaatttttttgtatataatgaatgctaagccttcatgtttatattcagatattcattttgcaatgaataaaacagacaaatccctgccttcatggagcttgttttaaaatccatttactccctcactcagaatatattataacatgcctactgtgtgccaggtcttgtgctagatactagggaatacagtgatgaacaagatattcaagggcttggttttcaatagaacttgattctagtggaaaattgacaatgtgaggaatacaaatatgaataagacatgatacttgcctttaagaaccttagaaggaaataagatatgtacaaatagctataatccaagtgaataattcaaaagtgtttttagtgtagaagttgaggaaatcttagaggaactgatacttgaactagaccttcaagaatggagaggatctggatggatggggtaatattagggagtaaggtgaagatgggaacaactagtgtgggaggctggcatattagcaaagttttgaaaacagtaaagcctggagcatagaaagtgattggcacttgagattgatgaagagaattagagataagactagaaaagaaagttggcactgaaatcatactaaatagatcattggctaaatatttttattgaagtactttcagaagtatgaaactatgtagaaagtgttaaaactttttttatcatgtcatgtatagttttaaaaaattgctctcagttaagattctccttattcctcaaaagcttttgctttccatgactttgttgcaaatataatcaatttacttatttttaaaacttaatttttataagaaaggttatcagatgattgtttaaatgttttttattagtaaattttcattatattgtctcccaaagaaccactgtatttttttaatgtctcagaacattatatttttatatgaatcatttatgtacctctctgtaacaagtgggaattgcttcatggcatttggggagtacgtaatattatatttatagttgactgactcaaatccagcctgagccctctggcctggtgagaattccaaaactccatttgttgatgtgcgctccatcttccttacatggaccctaaagcacttacctctccaggagcccattccttctagagcataagagtagtgccttggaggcaaacagactcctagcaaaggtcttccttcccaggtttaccatttgtcccaactcccattatctttagggatctacctgcttttcctgtgagtacaaaacatttccttttcatgagtacaaaacatttccttaaccctataatcatgaaaccctgtctactctcctgaaacgaggaagaaaaataaatccttgctgagatgtctataacacgttgaaggagggaaggtgttaaaaacaataaaaagggcagggctgtggtggctcacgcttgtaatcccagtactgtgggaagccaagacgggcagatcacttaagtccaggagttcaagtcctcctgggcaatatgtgaaactcctctctactaaaaatacaaaaattagccgggggtagtggtgcccacctgtagtcccagctactcaggaggcaggaggatcgcttgaaccaaggaggaggaggctgcagggagcctagatcgcactgcactccagccggggtaatagagtgagaccctgtctcaacaacgtcaacaaaaccaataaaaagataatttcgtatttaagttacccaagaaggaacggtaatttggatcagatcttagatgatgactaagaaaaagaacactccggtagaggaattaactttacagaacgcactgaggcaaaaaggaatacagtgttcaagagtaaacattgagtgtcaggagaaacattagataggaaagggcagtttgtctttctaagaagtttacactttctccaataacagttgtttttgtcttttataggaagcgcggattctattactggaaactttgggactgaaaggccaaagcttctgggcccaccatcaacgcagctccgctttcatttctttcacatacaactttccacataagatttcatgcggaaaaaaaaaaaaaactcacaaaggttttatactgataacagtatattaagtgtttactttgtacacagcgtctttgttccagacacttgccatgtctcatttattctcacaccaccaccacagcgtcctttacagatgagaagacaacctcagggagacgatgtatttgcctaggtcccatagctagcaagtgacagcgctgcagtttaagctcaggccgtcttggggagagaccgtgctcttctaccattgcactttaagctgactttaggggaaacacaatctgagttttgacaagtttacttctggcacatgcagtcccgagcactgctttttggctaaaatgcccagtgatgtcaactctgtccctggatttctacaacccgatgagtcaatattcagaagagacgtcgaaaggaaagggttcaatagacagaaaacacaccagacagtcccagaaaccccagaaccctcgcctctgccggcgcggacagccaagacgtcacttaaacgcgctgccgcctcctcgccccgccccgcccctgcgcggaagtctatccgggctttcgcgtcaccaccctgcccacctgggtggcgcgtggcttacgcaacggtcactgggctcctgggccgctcccgggccagcgagggctgcgaaagaagttgtaggtacggcccatttttcttaacgccgcccttccaagccctttggcgctagtcccgggtctgccgcgatcgtttccttgcggtaggccgcaggagggcctttcctccccctcagttcaatgggattcttgggctcttctcccagacgctgagggaacagccacagacattgtctctcctctccgtgactcctttccttactccgtcatcccacatctctcttgtttgttctcttttcctcctgtttttcttattttacaaatactcgccagtaagaaagaagagatctgtcagttaagattgacctcaaaattaattttattaagcgtgtactattttacaaacggtggatccctgcaaataaaccttcacatacatgctcctgcgactggagattctgggattggttgccgatcctgagaaagctctcttcccccacccacccacatccacgccccttaatcctgtttactcctcttggctttaacccaggggacaagcacttccagcagtccccaacctttttggcaccagggatcagtttcatggaagacagtttggggtggggggcaagatgggatgacactcttctatctcagatcatcaggcattagattctcttgagaaggcgcaatttagatccctcacatgcgcagttcataatcaggtctgtgctcctatgagaatctaatgcctttgctcatctgacaggagctggagctcaggcataatcctctagccctgctcacctgctgtgtggcctgttcctaataggccacaaacctgtacctgtctgctgcccaggggttggggatccctgctttagaccagtgcttttgaaggaaaaaggaaagttgcacacatactgtgtctgtcacatcaatcagtagtgttacaagagctcttcacgggaccataccaggtccctcactccccctctatgggtgtcct

SEQ ID NO: 10108 - DNA, 6000 bp, Homo sapiens
ttttattaacaaataataactttacatattcatggggtacatattttgatatgtacaatgtatagtgatcagttaagggtaattagcatgtccatctcaaacatttacaagagaagttggaacaatccagaatcagtgggcaccacattctcttacacagttaaacactcatttttctccataccttcctatttctttttacatgttttttatttatttatttatttatttatttatttttattagtaagctacattcaatcatattttaatcatatttttaaaagataatacatcatgaaaaagtagaatttataccaggaatgtaagtatactgtaacattcaaaaatcaataaatgcaattcaccacataagtgtattaaaaaacaaaccatatggttgtcccaatagatacagaaaaggcatttgaaaaagttcaccttcgggccatgataaatatagtcagcaaactaggaatagaagggaacttcctcaaattgatgagggccatctacaaagaacctatagataacatcattcataatggtgaaaaactgaatactttcccactaagattggaaacaaggtaaaggtgtccattgttaccatttctttttttttttttttttttttttttagtatttattgatcattcttgggtgtttctcagagagggggatttggcagggtcataggacaatagtggagggaaggtcagcagataaacatgtgaacaagggtctctggttttcctaggcagaggaccctgtggctttctgcagtgtttgtgtccctgggtacttgagattagggagtggtgatgactcttatagagcatgctgccttcaagcatctgtttaacaaaggacatcttgcaccgcccttaatccatttaaccctgagtggacacagcacatgtttcagagagcacggggttgggggtaaggttatagattaacagcatcccaaggcagaagaatttttcttagtacagaacaaaatggagtctcctacgtctacttccctctacacagacacagcaacaatctgatttctctatcttttccccacatttcccccttttctattcgacaaaaccgccatcgtcatcatggcccgttctcaatgagctgttgggtacacctcccagacggggtggctgccgggcagagaggctcctcacttcccagacagggcagccgggcggaggtgccccccacctcccggacggggcggctggccgggcgggggctgccccccacctccctcccggacggggtggctcctgggcggagggggctcttcacttctcagacggggcggccaggcagagaggctcctcacatcccagagggggcggcggggcagaggcgctccccgcatctcagacgatgggcagctgggcagagacgctcctcacttcctagacgggatggcggccgggaagaggcgctcctcacttcccagactgggcggcagggcagaggggctcctcacatcccagacgatgggcggccaggcagagacactcctcacttcccagatggggtggcggccgggcagaggctacattctcggcactttgggaggccaaggcaggcggctgggaggtggaggttgtagctagccgagatcacgccactgcactccagcctgggcaacattgagcactgagtgagtgagactccgtctgcaatcccagcacctcaggaggccgaggctggcagatcactcacggttaggagctggagaccagcccggccaacacagcgaaaccccgtctccaccaaaaaaatacgaaaaccagtcaggcgtggcggcgcgtgcctgcaatcccaggcactcggcaggctgaggcaggagaatcaggtagggaggttgcagtgagccgagatggtggcagtacagtccagcttcggctgggcatcagagggagaccgtggagagagagggagagggagacggtggggagagggagacggtggggagagggagagggagagggagagggagagggctaaagtactttcatctcaggacttctcagatcctttttttccttcctatttcttaatgtgaaaaaatactgctagactctaggcttcaagaatagaattcatatataactgcttcattgctatactcccagtatctggcatagcacctggaaagaagtatgctaatacatagctaagaaatgatagacaatgaattatcactgatccctcttgtggtcaagggagattctcagtaggtaaggcagattgagaaggaaagccatgccctgaatgcctcccttcctctgaaaggaataaatttttaaacttctttcattatatctaattccatcattatcctttttttccttgtcatatcccctctactttgtataagcccaatgaaggcaaaactgaaaaattaaaatgtttgttgtaagtattacaaggaaagcaacagtaaaatgagtgtatttctacacaactaagtaatttttcagcttcaaaaatctgatcaaaacatgcttaattaccaaaccaccacataacctattttgtaattttgagtaagcaggtgtgtcatatggagatatatttttaatgtctttctaattgcattgggaaaggaagaggctttcatttgtaacaagcaatttctagatgatgaattagaacaaagaagtaatctttcaaaagaaaatagttaaattaaaccattggaattagtaagcagaaagtgctaatcttattgactttgcctatgatttatcacatattttcacaggcctctcagaagaaaagggaaataacatttgataatcatcatggtctgcatgcatttactttgaagcaggattgtgtcaaggctgtgataataactatcaggttgcttaaaatcattgttatacactagccatttagtcataataactgtaagaaggaaaacactatttatcactacacaccttaagtccacttgtccaatcatcacagcaggttctttgaagagtatattttaaactggaaaactaaagaaggcagaagggccagacacagtggctcatgcctgtaatcccagcattgctggaggtccagccttttgggaggccgagctgggaagattgcttaaggccaggagttggagaccaggctgaacaacatcgccagaccatgtcgcaacaacaacaacaacaaaaaatttaaattagctgggtgtggtggcactggtggcacatgcctgtagtactagctactcaggaagctgaggtggggaaggatcacttgagccaggagttgaaggctgcagtgagctatgattgcaccactgcattccagcctgggtgacagaactaggaaaaaaaaaaaaaaaaaaagaaaaggaaaaagcagaatatgtacaaatcacaagttaccttctcttgttaaacttgttgatcaaatccctttcacctaaacatgtttagatgtaatacacaatgataactagagggaagagtgtttcctccggcctgctgttgttgagggaagtctgtagaaactatcatataattatactgtaaatgagatttctttaaaaactcatttttaaatgacaagagaggttcaaacagttcacgtatatccagtaggttgctaaatatatatttaaccctaaatttatacacatgcccccaggatgctaacaaaggagtttcggctctggaacctcttgctaaatttcctgagattggtctaagcacagactatgtccttccagcttgcaatccaccgagcactttagctcacttattctcaagcaaagctcagaaatcaggtcctgcctgtcttcccggaaaacccaagtatttgttcagttacggtattctcatcagtgtgtcctcatggtcaagccctgaaaactaaggcaccatatatccagaaccctgtaaccaagagcgtgtattcacagtgcttactggctacgttcaacccagggaaatgtagagatctgtctcgttgtcgtgtttcaagaaaatgtactccttgggatttgcgatttacccttagtgtgctatgacattccaacctgagcagaatcctccaggagaatccagagtctccagctgcctgctgggaatggggtcagagggacggatttctagtgatagaggtacaggaagagagaaaatgggtggatatggaaagtgggagcgagaggaaaaggaatctgagatgagagaatataaacaccagagcagaaaagttgaatgaaattcaaaacccagggacacctaaaaacgtttgcggctgactgtgcccacagcctgcagcagtctacactcatgcactctccgaaaaatcaacaggatcttgcccttgcctcatgagtgaatggttaatttgtgcaggaaggaatggtccccaatacatgtttgagaacagggacctcagcaagatatcctgaagttaaaagaaggcaaacaatcttggaaagattttaattacagctgagggagtgcagccctcccttgcgcgggtcagcttgccaagctccagctgcttgcagcgaatgaatgaaatgcgaagggcgggatggagggagcgagtgcaatcacagccagcgaaggggatagtcagctccgcggcccctgcaacgtcaccgaagcgtgggaccccatgagtataaagagagcctgtagcgcaggacgctcagttctccagcctgtgccgggcagctggcaccctccctacgtgtgatgtgactcgataacccttaatctcgggaggatctcattctttctgcctgccagagccgcaagcgcctctgagaaagtgcagctgttgccccttagccccagctgcatcccctaaccagcagggattgcagtatctttcagcttccagtcttatctgaagactccggcaccaaagtgaccaggaggcagagaagaacttcagaggagtctcgtcttgggctgcccgtgggtgagtgggagggtccgggactgcagaccggtggcgatggccactctcccagcagcagaaacctggatagacgggggtggaggcgtgggtgcagacgccgtgaacctgaccgcctcgctagctgccggggcggccacgggggcagttgagactgggtggctgcaactgctggaccaagctggcaacctctcctcctccccttccgcgctgggactgcctgtggcttcccccgcgccctcccagccctgggccaacctcaccaaccagttcgtgcagccgtcctggcgcatcgcgctctggtccctggcgtatggtgtggtggtggcagtggcagttttgggaaatctcatcgtcatctggatcatcctggcccacaagcgcatgaggactgtcaccaactacttccttgtgaacctggctttctccgacgcctccatggccgccttcaacacgttggtcaatttcatctacgcgcttcatagcgagtggtactttggcgccaactactgccgcttccagaacttctttcctatcacagctgtgttcgccagcatctactccatgacggccattgcggtggacaggtgaggagaggacagacagagaggaaagagggagaagggaaagaaaagaactgggcggtgggataagattacaaaggaaatagtaacgtaacggggtctataaaagtaaagagactaagaatttttgctgaaaggaggacactaacccatttgtagccctcgagtggctgaacaagtttctgcttccgtggcctccaacactcaagctctaaatcattgagccttattaaggatatctagagggactgaagaaggtgaatgagggacaggtgaaaatgcccttccaagtagggcaaacttagctagaaacgtttaagtaccagcaaactttctcaaatgacttttgaacaaaatttatgtcatctgtaaagtgcactttttggccttccttctctctgtcagtcactattctggcagagaaatggtaaatgagtcgcccctccacccttccctct

SEQ ID NO: 10109 - DNA, 6000 bp, Homo sapiens
ttctatcggttctgttgtcccagcccccaatgtagagatgtcgactataacactctagaagtttatgtatagaaggatctatttacatttgtgtaaaatgagaattgtattatacaatacaactgaggtgatggccaatccatgggcagaatattatcataagcttctgatgatctttcaaccttctttcatgagtgagcctagttcatatgacagtcgttcttagggccacttgacagtctgaaaattattgtggaccccaaggagtttttgttatataggttatttctttcaatagtcaacctatgaattacaacagaaatctttaaaatatttattaattcatttaaataactatagtaaacctactgcacattaaagtaacattattttccaaagaaatgttttacatttttgttaatctctttaatgtctggcttaataaaagacagttgaattctcatatcatgtctgttttcaatctgttgcaatttattttgtttgaagtatatcttcaaacaaaggaaaatccaatttttcacagatatgtagttggaaaatgaagaaacatttcaataatcttttcaaacaattctggatattcttctttaacgtgacaccataactcaacaaatggtagtttcttaaaccttataattgcagtatggaatatgaaaccatatcagttaacttttcatactgtgttacattaaaacccgttcgtctattttgcattttgaatggatccttatgcgtgattttagatcatgatgcattattagtcatttggaaaatacttgttcattgagctatgcagttcttccaaatgttgatatatgtcattgtacgatatctaaaaccacattcatttaaatgatcacgatcttactaggaaagactttaagtactgggaaactgtcaagctcatggtgacaaaaacaagttttaaaaattctaattttttactcaaaagttcaagtttttcactggaaataaatattgctgtttgtttgccttgaaatgacaggctgacttcattcatttgttaaaaaatttttttaaaaaagtgtttgctaagtatccaagtctgagtaaccatagtttgtctgtcagttgttctttcaagtaaaaatatgtcacataaaaaagcaggtagtttagctcacaaatcaattacataaatgtcttcgttcaggataaacaactgcactttagtatgccacagaagagctttatttgtgcctcccagtttgccatacggaatattaaaaagacatagtcaagagttgaaatttaataaaataagtattttttactgcttcatcaaagacattcttaagcgaaactcatatttggggcagtaaaaaatacaataactaccaggatagttgggtgccactgctttgaacatgctaaggtgctagcaggtttacccaccattgctttcgtatcatcagtgcaaatgtcaacacagtcaaagaaggcaaattatgtcttagaattaatatgaaactagctttgtccttgcagacctcccctgaaaggatctcagaaacccccatgggtctacgaaccccagtttgatgactgctgccttaaaacataggtttcaaccagtagttctcctaaatagacttaaattcactcttggttttataatagtttttggctttttcctccaattgcatatttaagaattgcctggtttaaaagtaaatgcagatataaatatgtaaatatcttgcaaacacttgaatatgttatactatccaatcctcacaaaacatctgtaagtcaactataatttattccatttttatatttgaaaaaagccactgatgctcaaagaggttttgtcctacagcaaataattttcagagtctagaattaaatataagcctgtttggctaaataacatatgttctatctaatatggcacattacccaagtctctcaaaacactgaagataacttacatatatatataaatataaatatatacaatgccactggttttatcggtggcttgtttttttagaagacagagtatactgatatatgcaaatcctgatgttcaaaacacagatattttgatgaattttatgaaattcacagagtccttacagaactttcctacagactcaggtctgtcattaattgcctgaattaatgatgtctctctaacatcattagcactcagtttcttcctaatggcaattttaaatcaataccccaatcactggttcatttgaattcccaatcaaccctgtgaaatgcatgggggtagatagtgttgccccaatgtaccaaagagggaagtgatcctcatatacatgcagcataaactaaaattgcattggtcaagaataccaagactttttgtaaataagagcagcagcttttcagtctagttgtctccatctgtctgcctctttctaccctggtcactagccctgtcctcccttggcttcattggtcctactctgttgcccttcttctctggtgttcatccctttcttttgcagggtcctcttccttcatccatgtctaagacattggtgtctgccatgtcccatcctaagtcttctcttcctggctgccttactcctcccccatgcttgccagacacctgaatgtatccttccagctcctgtctaccctcctaggaactttccttttggctgcctaaatggcagggcactcagatgtcacagaggcacccccaactccacaagtttaagacagaactcattacattcctcctaaaactgctcctctctgtgtgtttctcttggctagtggcaccatccctgccttagcgcaccagccagaaaactgggagtcagtctagactctcttctctccattaccctctatgtccaatcaatcactaagccttgtctattctatttcctaaatatctctagagctgtcctaacctcccaaacagcatttctgctgccttggttcagacctaatttttcctctggaaataacctcactgtgatctctcttctatttgtcttgcacagtgaaaccagaggaaaccttctaaaacacattatctaataatacttacaaaccttagaatctgtcctagcttaacacctttaacagtttcccaactactcaccacctccaggcaagttctggctccttacacccagagagccttgtgtggcttggccttgcttacttcacctgcagtctagccgcacctagtctcctagtttccaggacacaccatgtactttgacactttcctaacctcttcacttgcttctgtttgtggaatgccctcccccctccaccacatccttgttggccttgtatttcttccttgtctttcagaactctacactgaaatctctaccaagagaagcttctgaaggggagttagctgtttccttttccatgcttccacaggaccaggtacctgcacttattatagtgctaatcacattttcatttatgcctctgtctcctcaccaggcggtgagttccttaaaggcagcaccatcacctctaaatctcagcacataagacatacctggtacacagcagggacttcgtaagctttgttaatgaatgacccagggatctgctctagatcgtatctcctaagtggagatacaatgaggacttttctcacctcattgtctcatctgcaaaaaatatgcttgcacagtgatctgaaatgtccttttcagtgtttaaaaattttacaaaactattttatgtcgtgtaaacggttttataaatccatttcctgcagtgttttcatctaggaaccacaaaactttaggagctgcattggtccaccctctgtgaccaactgtttagcaaaaaagatcatagttcttaatatgaccgggataaggctgattttcatcctacctaccttaatttcattgtggcaataacagaactagtgttttcaatactgacactatatcttaataaataattatatattattagaacttatataaaaccaggtttgctggaaatcaggttctcagttgcaaaaatgagatcaccaaatcattcggtactttttttttcttggttttcctaagcccaggccaggttgctaattaggtaactttttatcataattacctagtcagccttaatggcttcacacactctgctccgtttcactggtcctgtagggccgctttttcaattgttaaaacagctgctgagtttcaaatcggaggaggctcggtctgcgccgagggggaagcgctccctgagtgaaggctgtgataggcaggcgttcgggtgaaaagtgggacatgaatgcacagtttgcacactctgctttccgcctccaaccaccaaccttctggatttaacacgtccccctccctgcccccagatcaaccccagagtttccctctattgtgcaccccggtctgcttgacagtgtgatggtcccgcgtgcgcgtctcctgggttttgcagctttgtcgggggctcggtgggcctccttcattctccccgagtggcgctaaggttaggacagcagcgtgtccctcgcgatgccgcccgcgagggtcctgtttggggagcgctgggtcgctgagcagggtggtgtgtgtgtgagagaaagagagggagggagggctacagggagagagaaaaggagggagagggtgtctgtgtgtgagtgtgtgtatgtgtatgagtgtgtgtgtgtgtgtgtgtgtgtgcgtgcgcgctggcgcgcagcgggagggagagaaggagggacggagggggaggcaacgggcagaggagggagggggcgggcgggcagcggtgaggcgggaggggttagggctgggaggggaagagactccgggcttcagcagtgacactcgggagcgaacacacactccccacttccagccgcgagagagtggagctaactgagcagcgcacccgccacggccgctgccgccccgtgcgcccggctctcccagcaccccgcgcggcgctccagccaggcgcctgtgcgactagcggcggccggcgaagcccgcgccagccccgcgggtcgctgcggcatcctcccgccgcccagcccccgcacgctccctgcagtttaaaaggacctcccgccgcttctcggcgctgccccgggattccccagccccgcgcggctccctactccacttcgcagcaacttcggcgaccgcgcgccgcccgccctcgcccgcctttgaagtttgctgtgccgaccgcaaagttgggacacttcagcggattgaatttttctcttttatctgcctccgtccccgccctccaggcttctcgttcctggatattggtgcttagcatcttggcagggtccggggacgtggactatttcgcacaccacaccacggggagggatttttttctattttccctacgaaaaacagatctttttaaggtaagtggggagaggaaagcaatgccccagagacccgacgccttagcccgccaccctgagacctagcacaaggagcgttcacgcccgaagggtcatccgagatgggggctcgaggcacgcgcccccaaatcttcaaggcccaagaagcttctcaagggcgccctatccgtaggagctgagggcatgaggggcaggagcaggtttccctcgtttttttttttttattgttgttgttgtttgtttgtttgtttgtttttaatttagctgctttcgaagctgggcggcccggagagatgtgaggaggtggacagacagcgcaagggcggggaagacctgggacccgggagctcggggtgcagtggggtctggggagccgcggagcctttatcccggacttagcctggacacttactttgcccgcctgccaagagggctgttgcctccctttccaggttcatgccctccgcccgccgctagggaaagtctgcgggactggggttttgcagagggcgtctgcgtgtagggcgaaaagctagaggtccaggcagcgcacgagttcttggtgggcgtctgggagc

SEQ ID NO: 10110 - DNA, 6000 bp, Homo sapiens
tttgggacgctgaggagggaggattgcttgagctcaggaatctgaaaccagcctggtcaacatagtgagacctcgtctcttaaaaaaaaaaaatcctggccaggcgcagtggctcatgattgtaatcctagcactttgggaggccaagacgggaggactgctcgggcccaggagcgcaagacaagccctggcaacacaatgagaccctgtctctacaaaaaaattttgaaatctagccaggtgtggtggtgcacacctgtagtcccagctactcagtaggctgtggagggaagattgtgtaagcctgggaagttgaggcaacagtgcacatcgttgcaccactgcactccagcctcggcaacagagcaaaatcctgtctccaaaaaaaaaaaaaaattccaacacctatattttacagtaagaagaaaagtaatatactgctcatgagatgctccattttcctaaactttgatattcttctagattggtagataaaaccaagataaagcaaaaatatagaattagaaagttgcaaaggaagcaagaaaggacctaagaacaatgaacttttcaaatattttgtaaagtactatatttattgtttgcctaaattatttacttatttctagttttcaacccaaactagaaaaccttcccagtagctcatgcctgtaatcgcagccctttgggaggctgaggcaggcggatcacctgagtttgggagttggagaccagcctgacccatggagaaaccccgtctctattaaaaatacaaaattagccaggtgtgatggtgggcacctgtaatcccagctacttgggaggttgaggcaggtgaatcccttgatcctaggaggtggaggttgcagtgagctgatattgcaccattgcactccagcctgggcaacgagagcaaaagtccgtctcaaaaaaaaaaaaaagaaaaaagaaaaaaagaaaaccttcccaaatcactttaattccctgcataacaggccacaaaagtcagcactccaaacttagacacagcatattccttactatatttacctactaataaacaactaataaatgaggaaaagaaagtaaatcaaacgcacatataggttagtataaatttggttctggggtttggggtcatacaaatcttcttaaatcccatttcagctccaagaacaacataaaagacagtttttgtggaactctctaaacacgtaagtctttctagacagggttggctgggtccagggtatctagtgccaccatgaacagataaaaatccaagcccagggtgaacgtaactccaaatcaccaaaataaggcaccatctggagtcatgccagatacttaaaagtccccacttcaggctggacagacaacaatgagcttctgcagaaatagaacctatttttgaagtatatatcaagctaaaatgacacagttatcaatgtgaaagggaaaagcaaagggaaacaaaaatagaagttctagtacagtgccaagaactaaaaagtctttcctagaaatgagttctattgctaaagtgacactcatcatttattatgctatctagtgcttttatttcctgtcatttgggtacctaagcatttaacaatgcaatactaattttttctggacttttatccttacattggtgatacatatctcaaaggcataaatgaaaatttaaaaaatatcaccatgtacaagaacttattcccttacctaaaaaagaagactttaaattttatcttgtaatttcacttctaaataatgtctatacaagtttaagtagctaagaaagggtttagatacctcagatatccactgttaaaatctacttccctagcttcacaaatataattcaacaaatataattccttactcttacactgaacaagagtaagaaaataggatgtttgtttgtttattttttgagacggagtctcgctctgtcgcccaggctgtagtgcagtggcgcaatctcggctcactacaagctccgcctcccgggttcaccccattctcctgcctcagcctctccgagtagctgggactacaggcgcccgtcaccacgcccggctacttttttgtatttttagtagagacggggtttcaccgtggtctcgacctcctgacctcgtgatccgcccgcctcggcctcccaaagtgctgggattacaagcgtgagccaccgcgcccggctgtttgtttgaaaggggtgtgggtaaatatcctgggcagtcacctaaggaaatgcaccaaatggagtctcatattcttgtgtgaaacattcgggaaataatctaatctcttcaaatttagctcctcttttccatgggctttataaaaaaaaattacatatatatatatgtttaaatgtttactttggatgctatgtgtgtgttcctaagagacattttctttttttttttttcctactggtacaatacactaagcttacttagatttcaccagctgtatatgtactcattccatatgcttttgtggtctgaagtcatcacttggaggcaccaatggaaaagagcagtgtcagagggctgggattcctctaccagctgtgtgaccttgagtaagccaccttaacctataaacagaaagtaatatctgccctgatacatgatagccaattatttcacttagataaaaactgaatatctactatatatttttatgagatataaggaaagattcttcttgccgctttgccattttttcccataagaagcctggtggtaaagagcacaggcttaggatcaggagtcctgcatttcttgaattctagctctgttgcttgttagtagtatgatcctaggcaagttacttaatctccctgccttccatttccttgtacacatgagacaattcccccctcagaggattgttgtaaggatgagatgaagtaattcaatgagcattcatccaacatatatttatctaggagccattctgcttactgctatactggttaaaaatccccttgtccactatatatgtgccatacattgctagcccccaggaattaaaaaagacaatataataaagcgacattatggcaagaaaatactaacttttctacctatgtgtctttttggaaccaataatacaaatctgacttgtttttgtgagctgttacaaatgaatctgcaagactgaatccaagtacaaaatatcaggtcttgatttagaagatatttctgaatagcacgtttcaaggtttttggttttttttttttttttgagacagaatctcactctgttgcccaggctggagtgcagtggcgtgatctcggctcactgcagcctccgcctcccgggttcaagggattctcctgcctcagcctcccgagtagctgggactataggcgcccgccaccacgcccggcttttttttttttttttttttttttttttttttttttgtatttttagtagagacggggtttcaccgtgttagccaggatggtctcgatctcctgacctcgtgatccgcccgccttggcctcccaaggtgctgggattacaggcatgaaccatcgcacccagaccgcacgtttcaagtttaggtgttcaccagtgaactgcgcctggctgatacacacaaggtcacaaatgacacaaagatcagaagtgatggcatataccatacatgactgtgtaactagtataggacctagcatagggtaaatgctcataaatattaatttaaaaaaattaagtttggtttccaactttgccacttccacacagagtgactctgggttaacttgtctggatcttaattttcagtaaactagcaatgtgtctgcttcgcctatctcataggatacttgtgatcaaatgaaattacatgacaatgtatctggcgctaataaaacggtaatttatgagacacagaatgactactgacgccagctagcctacaagcctaatagtagagataagatgttaatacataaccaccaagaaataaacatggagatctagtgaaaacccatgacatgttttctaaaaatgtcatcttccttgtgacgaaaggagctggtcattgctaggcaggtgctgtacctttttcaactcccacgtttcagcagcaggctctgctgagtgacattttgcaaggctgaggcccccgtaggcgcaggcgccgttggggtgcgcatccggggacctgcaggttacaagcagcagatcccaccttcagtcctggctctgacaagccctccaggtaaggcgcctttgcatttagccgagctagagaagagagctggaagccacctctacctttcacggggggaagggactgcccgcgcgctcgcccccattatctcagccctccgaagcgcgccacggactccagccttgtctctcacccccagcctcaccccgcgtccctgacccgcgagtctcccgcccagctccgcgtccccggtccctgcctccaggcgcgtacacggcgcgctaagaggcgcggggagctcttagcgcacctactacttaaccggaccggctacttactggccgccaggtggaagcctgcgatcgagctggccgggcctcccagcaccgccgctctccaggctccctttccaggactcaactttggtcccagccccaatcgcagctccggtaacctttccaggaaccgaaatgctagatacagcggaaggagaaacggagggaggaagacaaacccggagcagggcggcgcggcagtttggacacgccccgagctctcctgggctctcagtccccgtcaggatgggaggcgcgtgccgagggaggaggctgaggacacagcctcctttcgccctgcgctgcccggccttccgcgtgaccccgcctatgacctcggggcgttccgcctacgtctgaccgtcaggtgcgcacgcgcacttacaggcttgttttgccagcttcacgccacccgggatgggagaaagcaggtgtcgcgagagttgggcgcaagacgccttgtagggagtgtaactatggccggcctgcggaacgaaagtgaacaggagccgctcttaggcgacacacctggaagcaggtgagcggatcctggtggagggacccctcagtctcctgcgctgttgggactggttcctttccgggcgtcacccgcactgggacaaaccctcgctgccagaggggttccagcgcggtgggagccggtggctgggttgtgtgagccgaggagattcgctcccaacgtaggagaaagggcgtctggccgcaccgtgcggtgatgagcccgtgggttcgagtgacggggctggagaaacccaggctgctgctttgcctgttgcagcacccaagctgagaggtgacagcgtgctggcagtcctcacagcccttgctcgctctccaggcctcctctgcctgggctcccactttggcggcacttgaggagcccttcagcccaccgctgcactgtgggagcccctttctgggctggccaaggtgggagccggctccctcagcttgcagggaggtgtggtgggagaggcgtgagcgggaaccggggctgcgcgccgcgcttgcgggccagctggagttccgagtgggcgtgggcttggcgggccccgcactgggagcagcaggccggccctgccggccccgggcaatgaggggcttagcacccgggccagcggctgcggagggtgtgctgggtcccccagcagtgccagcccactggcgctgcgctcgatttctcgccgggccttagctgccttcccgcggggcagggctcgggacctgcagcccgccatgcctgagcctcccacccactccgtgggctcctgtgcggcccgagcctccccgatgagcgccgctccctactccacggtgcctagtcccatcgaccacccaagggctgaggagtgcgggtgcacggcgcgggactggcaggcagctccacctgcagccccggtgcgggatccactgggcgaagccagctgggctcctgagtctggt

SEQ ID NO: 10111 - DNA, 6000 bp, Homo sapiens
tcagtaccaacttcatgttaaagtccaaatcattaatggccaacattgaactcttttactctgtgaattaaagttcaaacaggctttgtcactccctggaagtgaacttagctccaaacctgaaatttcccttcccccggggagctgatgctgtttggcttaccccaagcctcccctggcaggagcaagctcctttgaaacttgtgtgaggtagcagaggagaaagcacactttccatgagcaggatggctcccaagagaaagtggagaggaagaaggtgggctgcccacgagccaaacttaaacatcgggaaactcactggtggcactcaaacagagcatcaaatgatatgttcgtggcactccaatgtttcaagaaaaatgtgatatggaaaaaaaaaaaaagtttttccctaaaatagggaaaaattacaagaaacaatctctcttatttaagaattatttattgaatatcatggtgcaaacttctgagctaggttcactgggaaatgcataagtgagtcaaagctggatgctgcctaacaaccaaccactagtatttctaactcaattattatatatgtcagtgactcatattttagatttttgttatagcaccaccctatttccagtaccaatttttatattagtatgcaaaagttgataccaaacaactccaaatagctaagtgactcaggacagcagagatgtatttcttattcatatacctaggtatgttatttgggagctgttttccactttgtcctgtctccgagaccctggctgatggaagcccactcaatttgaaacatcgttggagtagtgattaaagatggccacattttcctgtaactctgtggttgacaaaaatttttgtaataaagatggccacaaattctttgtcactctccctccacccctatcaagtgtttatttcctctccccttaaaattgagctggccctgtaactgcttttaccaatacaacatgtcatttccagacctaagacttacaaaacctcgaagtttttgcttttattgcatttgagaatcctaagccaccatgcaagaaagaagtcaggctactctgctgaagaagccatgtgaatcagagagtctttggaacggcatgggtaaatagaaaagctcagctactctagcaacctagttgagcctccaaaaactccagccccaaacaataccaggctggaaccacatgagagaccctgagcaagattagacaactgcccatgagcctagtcaacccacaaaactgttacacataataaaatggtgactgttttaaaccattaagatttaaggtgctttgtcatgggacaatagataattaaaatatttcatcactgttggcaggaagaaacagcgcaggataaatgtccacaggctcttaaagcttttatttggaaatgacacaagtcacttccaatcacatttcattggccattcttgaggtaaaaggagtagggaaatccaaatctacgtgtgtggaaaaagaaatagaaatatttggtggctagtactaatatcttccagagatttacaagtaaatcagtaaatagatgaagtgtcaggggaaaaaagctaacaacaggagaaaagaatgtacatgacgattcttgtagatgtcctctaggcaaagcagggatgtaagaggaaaaggagggtagaaagaagtcaaaaataaaaaaaataaaaaagcatccgcagggaaaaagtagaaatcttgggatctaaaggacagtttcaataacagaatagtcaagaagagcataaaataaaaggccaaaatgggtggtacaggtaaggaacacacagaaattcaaagaaggtaggttaatgtgggctgatagaggcctcaggtggaagtagaattgaaagaatggataggtcatggaatttgtatggttagaaataagaagggcatgctccgtgaggaaacagcatgagtcaagtcctagactgtgcaatacacatagcatatatggggcaagggactaggtattgtaaggggaaacgtatcatttaatagagggtatccaagggattgtttgctggggaacgggaaggcagggaagccactcagggacttatggaggcccttgagtgctttctgagttgtcctcttcaaattacagagcacccctggagattggtgtctgagcaaaggaaatcagaacacagttctagtctcttcgtgtaggaatgaaataggaaaagactgacggcaagtcaccaattggaaagttattgcagtactcaaagcaagagtatcctattgggacaagagcttgttacttagggtggaaaataagaacttccaactagtccagttcaaggggcttacaatgagaatcaaaaaagctggggttttgggaaggcttcaagtgtgaagaagtcgagacactattttatcaaggatataaaggaaaacttttttacttcacgtggcagccaatgttggttagctacccaacattccccagcccacttccttgacagcagaactttaatactgtccaattcctctcttccctccaaaccaactggaaaagaaacctacacacactaattcagccccaaggtaaatcctgagggtctaagctactggttctcaaccagtaccacacctctggggggtgggagggaaaaacggttgatttacggtgtcacaatgcctgaggtgtggtactgacatttagctggaaggaaccagagatggtaaatgtccagcaatgctcaacacagtcctgaataagaattaaaaaagccagataaacactaggcaatcatggatgtcccatgctccttgtctgttactgctttagggacagctaatagcccagttctggtcaataagatataaggagtggcctgcttctggggtgctttcttccttcctatcaatgttgtctcaactgtatacagctcttgggactgctacagctatcttctcctcaaaaccagtttcttctttatcttcctatttccatcactggcacctcccattttctgttaccaagtcctaaagcaattttgacttctcctaacccttaaccttaaggtgactattcctttaggtttgcctgggataaaactgatataactcctggtctctggctataattattaatgccctactttacttccaaaagtgttccatattgaaggatagagtatatggtcatttactaccaattgtgtcgctctccctcaggtacctctaatgcagggctcagcaatatggcttataagttgtttttgcacctctccagaactaaaaaaaaaaaaatttacatatttcaatgattttcttaaaaatcaaaagaatatttcatacctgaaattatattaaaaattcaatgtccatagttttactgaagacagctacactcattcaagtattgtctatggctgctttctcgttacaaggtagagctgagtagttaaggcagagacttaaaatatgatcgggccctttacaaaaaatgtttgccaacccctgctctaatgtctcccctagctctgagtctcctcacctcacgcacaaataccctagcctactaactgctttcccactctttccccagcctctaatccttcagacacctggttgctatacagcctctctacaagagtgtcgaccctgtcacttgcctcgtcaatatcctcagtgactcctacaaaaccgacagtgaaaggttcaaacctattctatgagactcaagacaacagacaacaaagggcaagagagaacacgtcaaacgagttcgtcaaacgagttgagtgcgtgagacttcagaggtcactttttcacactagaatttcaaggtgtgagaggctaaaagacgtccaagtacatgaaacagaacctgcaaataagagtgaatgacgaatagaaagaccacctcaacctgtccacttccctacggccgcagaagttatgattcaaggaataatgagactctaaatcctttaaaattctacaagagcagcctttgccaaacccagcggggagtggctgctcggtgccagcgcgaggagcacgtagactgccgatgccagagaagcccggtgcgggttccgtgctttctctccgttccaggaagaccccagctcgtggccaaatcttcttgccgcttcccggtctgcgcgcctacgctgccggtttcccgacaaaagcgacggcgccctggtgaaaagcagacgcccctcatcggtttgcgccttgcagctcaactatgccccagcctcccacaagccacctgcccgcgtcctccgccaggcgtccagcccggacctgcccccgcggccgccaaggcgcacgtgaagctcccgggcggggggagcgcaaggaggcgggagtttgcggacgcgaacgcaggcctaggaagggaagcgattccagggcgcacgcgcagagcctggagactgggcggggcgtgcctcccgcaggggttacgaacgaaaggcgagcgcgtggcgctcaggagcccgcgcacgcgctgtggtctcgccccgcccatgagcgtccgcgcggccgtcgtagcatcttttcttcagacccgcccggctcgtctacttaacctagcggaggcttggagtgagagcagggaagtgtggggcgaggtgggcggggcgttgcacgcgtgcgcggccagcgaaagaagggagggggcgggagatccgagacaacgttaccccgtcaacacccaatcaggagccggcctgaccccgccccctcttctcacgttattggctgagaggcccccagatgggcggggccggccgtggggttggggagggcagggggcggggaggaggaggaaggcgctggcgggcagtgatggcggctggtgatggggacgtgaagctaggcaccctggggagtggcagcgagagcagcaacgacggcggcagcgagagtccaggcgacgcgggagcggcagcggaagggggaggctgggcggcggcggcgttggcgcttctgacggggggcggggaaatgctgctgaacgtggcgctggtggctctggtgctgctgggggcctaccggctgtgggtgcgctgggggcggcggggtctgggggccggggccggggcgggcgaggagagccccgccacctctctgcctcgcatgaagaagcgggacttcagcttggagcagctgcgccagtacgacggctcccgcaacccgcgcatcctgctcgcggtcaatgggaaagtcttcgacgtgaccaaaggcagcaagttctacggcccgggtgaggagttggaaggggaggggaaggaccccctgcagctgaagcacaacccccttcggacagggaggcctctgggcaccgggttagtttgcccagccttctcgtctccgggacccccgcgcctcggccgccgcacctgggacggcccatcccgcccctacacacacaccgtccccccgcagctacgggcacctccagttcttcccccgaaaccagggtccccggtggcgccccagagaccagctctcagcattcatctttcttccatcccatttctcctcgcagccttttttttttgtttctttggctggatttttcaaaatcgttttagttgtcacaggtcaacgctggcccttaaccttttttgagtctcctgattcctgggatggatggggcaccagggaagggagatttctgaagttgggacctaaactaaagttttgggctctgtaattcaccgttttcttttccttgccccctttttttttttttttgccactgatctccttttttccctcgctgtattactccgtaaggccacgtttaggggcatgtaaagtcccaaccctccagtctctgaagtccagacgtataagcaacacctcggactctctttaaaccagttttagttcggagttgctttccatgattaacaaggtatgtgggatgagaacagaccagaatgcagagcttattaaagactggtaaggatattcacct

SEQ ID NO: 10112 - DNA, 6000 bp, Homo sapiens
atcctgaatttcataacctgccttgtttggaagtcctgaaggaagtcgtattgtttggaatagcagctcacctacatgcctttcatctggactcaatagattgccttttgccagaccctaagtcacctgctggaacttggcatattacctttggcagaacatcctaaatactgattgcccactaagacaaaattgacctagcacctgtcactgtatttcacggactccaactcttcttggcccctggtttgtgctgcctcacagccctagcacagctatgcttccaggtgcgtgggcctcctgtgggtgcttagcacattcagttttgatcagaattcaactaaagtctatttctgttacacacatctaaagatagtttgggatctattttcatttcccaacctttgatcttatgttgataaattttgtctcataaagagttcatattgtttggtgacttttcattattatattcttaaatctattagtaaatggaataaaggaagaacaacatagagagatgtaatgtgattgacaaaaggcctaaggttggtttttaaataaaaatcttatttgacaaattttatatttccttgtcactaccacgatacatcaaatcatatccttttgtcttcctgctacagtttcacatgaaatttaaagaaacaactgtttagtgcaaaagccttgagaacaggcaaatagtagatgtgtatactatcaaatataaaagaaaaataaacacctggtagacttctaattgtatttgtagatatgtttctatggtttagggcctggaggtatagttgagtatagttggtaggtattggaattttattcaggaaagcagcaagttttcaagaccatcacagttcaatactattatttttgtcaattatgtttcacaggtgacctttataagtcaagatgaagagagctttatcttttcaacataaaattatgtatgcatctaaaccaaaagtctgagaagtaccaagttctgcggctataatccacattttgttcttcttcaatgaatgttaggaggaaaacagacacacacaggttaagaaaaggaaactaacctttgttgtgtgtttactgggccagcctttgtggaaagccccagtcatcgaaattcttaaaagaattttttagagtaaattattactcccacctcatggaggattatacatttgcagagaagttaaataatttgtccaggattacataactgccaactggtggtacccacagttgttgggctcatacaaaaagccaagcaagctctttatcttaagcaggtctatagtcttggaattccttaactttactaacctttgtctggaaaagcctttgtccctaatttcccaggatgcagagtaattatttaagcttgttacagccatatggtgccaagcaggaccatgattttcttctatgtttcacaacaaatgctgtgaggaaagattgtgaactataccaatcaatcagaagattgtaagtctcacgccattattttgacatatagtgagataaaagtgaatatttattaacctaccttttaatctcatatgctctaataaaatataaattaatagcaaaaaatcaaaaaacaaaatacatatctgcgtgtaaggaattttagtgactttcatcttgtattccagtaccaaaagagacactttgcttcatgtaatgcagataaatttgagccttacaattgagttctatgttttccttcctcttgaataggaacaaaatcattcaaaatttagaattataaagcttaattttccttagaacaaaagtaataaaagtaaatggcatggtgaaagtgttattagaggtgaaaggatgtattgtaaatgccggttgatatcttttatctaggtttagcagttttctgcccaattaaactgaagtggtaaaaggagcttcatagataaaatatgcacaacaggatggatgtatctgcgatttgcctctagaagcttagaagcactttgctgctgtgcttaacatcactcaagagggcacagtcttcaagaggacccacttcctttctttggcaacaaagactgccatatcaaaagagggtggactttaagaaacattcaatcaactctcccttactggttatctgaagttgttttagagggtctacccctttttcatgacttcatcaaattccagaaggatgaagttcaaccaggtcatcattagataacagctaatagaagtttatcagtttttctcccctgatataaaccctttcatggatagtaaatagtttgggagatagttttatgttatcttttcagggataccaaatgaggaaaatttaaattgttagaactagtgatacaatattacaaagaaaagatttatttttaattctgtacttttggggaaaaaaacataaagaacagatcagtgcataacaaggataaatcgaaagcacatcacttttgagtagatacatgtgacttctcaggaagagattgggaagctgaaaaggaaataatatgtggtaaggatgatattgcaagtgaaaaaagccactgttggtgaaagaatgccaagttctttaaatacttactcatagaaacatatcattttggaggatatattattttacaagttatttaatatttcagtaagttacagtgaagctctttttcacaatgattatttctgttcaagcccactgtcagaaataaaagagctttttattatttttactttttaagcataaaaaaaatccgtatcaaggtaatcaaatcgattgctcttgaagttttttggggggtagacttatcaaattctgaaagaaaattttcctagaactaatggaattaggttacctttgaattctcaccccaactttgaatagtcactaattcctttctttgctcttttggtgtttgcaaaggggttcgctaaagcctgaattgatataattattggctcagattgttagagatctaggccagatggctatgggtttctaaagtcccccttgcttgtggtagttttcctagtttgcctatagggtttggggatcagcaatttgaaagggctacaaacttgtaaaacagtattattcatgggggcagaatgttcatcagcgtgacccagtactaaatacattcattataggcatttctattctgcacaatttgccacacagcactgatttcaggagggggaaaaaaagacaatggcttataaaatgcttttgaatgcctaaaaagaaggagaattcacgctgagactcctctgctttcttttttggaaagagccttcttagtgactttagctgagctctgctgagagtaagcaaagtggaaaaatcagaaaattactttttttatatgtttctggggggcaaaatagacagtgagaaaaaataaatggaaaaaagtgacaatgacattctgtgaaacagcaaatatgcaagcggatgaagacagctgaggaataaggaaaaaggtatgaaaaaaagcagcaaaaatggagccacgatgataaacttaaaaggaattgcagagcagaaagaacatcataaataatcatattttcaaataagaataccgtatcagtttctgtgacctggatagagcacaagcctcccatgatatttcctagcattttgatgcatacaaaatgcaattttcagctcaggcatttgatttgtcagtgtaaacaacctttggggtttttaaaatacatatctgaagtgttttcataaataatgcatatattataaaaatttgacttgtaaactattgagtccatgtcccccctgtattcactgcaaagactagccatgtatagatagtgccttttggtagaaattggcatgctaaagcttgcagtgtcttttacccaagataaataggatttttttgaagtacaggacaaagaaatattacaaacaattttgcccaaactcaaggaaagaaatcatacaaggtagaactatattgttaattagttccaaattctgaggtgttcccttaagtcttgctaattaagagaaatgaagagtgcaagatagccctttttttatcttcaaagaataaagatgaaagaaaacagaaaatgaaacctctttacttgctccgttctttaaaaacagagccccaagaaaatctgcttgtgctcctggaaggagaaaggcccaagtatttacagagggagtggggaaggaggtggtctgagaagcataattagaagcaagttttcaaattgtattaaattcctccaccaacaaaacgcacttagaggtattttaagttaaactagcacttaaggactatgaaaagcaagatgattacatgtctgtggcagaagaaagggcaattaagaaaacaagaagaatttaacgtgccatataaataaaggcgaccagaagttgatttaaagtttttcttctgtaatttgtctcccctttgtcatggcacgctcagagaaagtgaatgcagtagattgaaaggcggagggggagtggggaggaagaaggaaggaacagggaaggactggctcccatctcctcccccagcccccaccagcccatctccccttctctccctcgcgcacccacccccgccttcctccttctccgtctctttctctctcccaccctccactctcgccctccctccttgggtgactccatcagcttttgatttggaagcacgctgattggctggaagcgattcaacacacgctgggcaagagctttgtctgagttgaagtgaagttgtacagattttagactggagtcagcaatcacgggtgtttagtctgcagccgagcagctaaagggagaaagaatcgctcaggaaagacacactgcagactccaccggcaccctgcaatagatggattccgactacacaagggagaaaacgcggaggtgacactctcctgcctggaaagaggacgaacgaccaaacaaacgcaaggactggactccatgccgaaggtatctggaagtcgtgacacggtgtgtataaaacaaaagtttgcgagctgttaattgctgtgctgtgttattaagagacgctttcaagtttcaagtaccaaatgtagctttacgttgccaaaggaagttgaggcaattgctttgctgttttaacttgctctgtgagggaaatctcataaactgaccaatgcaccaaatgaatgctaaaatgcactttaggtttgtttttgcacttctgatagtatctttcaaccacgatgtactgggcaagaatttgaaatacaggatttatgaggaacagagggttggatcagtaattgcaagactatcagaggatgtggctgatgttttattgaagcttcctaatccttctactgttcgatttcgagccatgcagaggggaaattctcctctacttgtagtaaacgaggataatggggaaatcagcataggggctacaattgaccgtgaacaactgtgccagaaaaacttgaactgttccatagagtttgatgtgatcactctacccacagagcatctgcagcttttccatattgaagttgaagtgctggatattaatgacaattctccccagttttcaagatctctcatacctattgagatatctgagagtgcagcagttgggactcgcattcccctggacagtgcatttgatccagatgttggggaaaattccctccacacatactcgctctctgccaatgatttttttaatatcgaggttcggaccaggactgatggagccaagtatgcagaactcatagtggtcagagagttagatcgggagctgaagtcaagctacgagcttcagctcactgcctcagacatgggagtacctcagaggtctggctcatccatactaaaaataagcatttcagactccaatgacaacagccctgcttttgagcagcaatcttatataatacaactcttagaaaactccccggttggcactttgctcttagatctgaatgccacggatccag

SEQ ID NO: 10113 - DNA, 6000 bp, Homo sapiens
aatctcagctcactataacctctgcctcccaggctcaagcgattctcctgcctcagcctcatgctgggattataggcatgagctactgcacgcagctggtagtatgatttttaatttccagacatataagatttattttattagttttataactattaatttctaattttgttgcatgtttatagtaagagtgtatagtttacacaatgttgattctttggaacttactggggtttcatttttgtcttcgatacggatagttttgttaatgtttcatatatgcttgaaaataatctttattttttatttggtggatgggaaattctctataaagtaactctattgagttgattaattatgctctccaaattttctacagttttgcttatttgtctgcttgagcaatctgtttctgaaagaatatcacaaattttcaactattgtgctttttttttataattgagttatggcataaatacagaaaggtataacaatataaatgtaggccaggcgcagtggctcatgcctataatcccagcactttgggaggccgtggcgggtggatcagttgatgtcaggagttcaaaaccagcctgaccaacataacaaaatctcatctctactaaaaatacaaaaattagctgggcatggtggcacatgcctgtaatcccagctacccaggagtctgaggcaggagaatcacttgaacccaccaggcagaggttgcagtgaaccgagattataccactgcactccagcctgggcaacagagtgagtgagactccgtttcaaaacaaaaataataaaataaaataaatgtaaatctcagtgaattgtcagaaagttaaaatattcaggtaattactacccaggttataaaatagtacaataccaggactctagaactgtttttgttccccctcgcaatcactagaaatgcttatctccaaagataaccagagagttctcagactatagaatcatttcacttgtttttaaactttatataaattgaaccatgcagtatatgctttttaattctgtcttctaacattatgtgagagtcacccatattgtttttttatatcactattgttcgtccttttttttattgcattgcagtatttcactaaataaatacaatgatacatatatccgttgtactgttaatggacatttgggttattttcaaatgaataaaggtactaggaatgttctcatccaagctttttggcatatagatgccctgcatttttactgggcatattcccaggagtgggttttttttgttcaaagggtatgtgtctgtttaactttaaaagataacaccaaacagctttccataatggatgcaccaatttgtgtccccccaccagcagtgtaagaattctggttgctccatgctgtcagtactcctggtattgccagtctgtctcatgtgagccattctcagtgggaattgatggcttattgtggtttcggttttaattgccccaatagctaatactgttgagcagttttttacaaatgaattgactattttattgagcatctgttcaaatttcttggccattttttattgggttgtctgtcattttcctatttatacaaacttattatttattctggatatgagacctttgcaaattgcaaatattttgtcccattttaagattcacttttataatcaaataatatatttcaataaactcaaaatcttaattttaatgtattacactgtatttttctcttttttgtattagggctttgtgtgtcccttttaagaaatccctgcttacacaaagtttagaaatatattctgcattttcctctagatcagcaccgtccagtagaattataatggaagccacaactttgaaccacggatatgattttaatttttagtagccataataataaataaaataggtaaaactagtatgaataatacaaattgttaataacttttttgttatttttctttaagacttcaagttctagtcatatttcaagggctgataaccacatgtaactaattattatcatatcaggtgacccatttctagaagcgttcatgatgcaccattcaaatttagctccatgatccacgtgcaattgacttttgtgtgtgttattaggtagcatacctagcaaggaaactaggtagcttacagaagcaaatgaaggtcttcaggatcccgagccaatctgggtcccttaggaactaacatagggcatgatagtactaggactttctgaatatctctaatttctgcacattctctgttattctgtgaggatatttgcaacacgccagggaacatggccaccagttgttgtcagatcacatctttacaatctccaacaacagatgaaaaaagctgattctaattctgtttagaaatatcccagctcaggtaatattccaatactctgcagccagagcactggattatttttggccaggcctagatgatatgcctgtatttataaccatgggacagaaattgttactagaaaacggtagctaccagtatacattatttctatttctattacgagatgctgtgaggaagctaggactatttcttgtgcacaataagcagtaaataagtatttgcgaatagcactaggatagtctcataatttgacagctatacttaaaataaggcctaatacaggatgaaaaatatgtattcatttgctttgaacacatttttatgatacacaagtatttgaggaccatccaaactcttagtttacaagcttagaactggcaattttaagagttcaaggcaattcaacattttctttataaactgcattttctacagattttggggtgcttagaagaggtacactggtgcccttagcagcaatgtgcagctttgcaaacattctgagtggtggcctctatcttacatgaaagtacaatccttttggtttttagtctaacatcagccatttttcttcataattaaaaaaaaaatactgtgaggaggaaaatgttatttaatattgaaagaataatcgtcctttataattcattcagtttcctatctgagtggggtctttggctcaacttatgagttcagttatttataacaaaatttaaaattaaagtgtgacactgtgttaattagagaaagttgctgttccctgagattcctagtgtcctacttttacctcatatttcttcagagctaatatgtttctcttactgggaaagaagagctgctccttaggtccattaatcaggaaaattgtgtgagtgaaaggagatgtaggaggaggaagagaattggaaagaaaagaatctctatttagcttccttctttgggagttttagcaggattgcatgaggaaaatgatccatttttgttttttgaaagacattaacaactgagaaaaagtatttattttggttttataaaaactttaacttggtgtagctgaaaccaattatatagaatttagatagataatttaaaaaggagaaaatgtagcctcaattatttggatggcaaagcattgaggtggtgtcattttctcaggtgtcaacataacagaaaatggttctgaccttttccatgctactttcctaatggcgatttctcatttctttctttgatcatcctcaccatacttgactcccttctttccctgccaacctctcgcacacaggctttttgtttgtggtttttgttcaaaggttcagaagcttatttaatggtgcgtataaaggtagcttcagggtaatgataacattcaattcttctcactgaatccaaaaccacatgtaactatagccaaaaatgatatctaggatttcttttcttttcatatttgttttttcttgacacttggttgagaaagttagaagggtttaaaaatgttttgcctttttgactattgcaaagtaaatattttaatttagcttacatttttaatgcattttaaatttataataataacaatagtttatataatgtggaaaaaagtcatacataatatcattactttctataactaccattctgttttcctttacaggcttttgctatatacatatttttatgtaattgtaattgtgtaattttgaacttagaaattttttttggtaattcaaaggaacaacatgacaatgaaggatatgtatcttttacatagttcaaaaaaatcacctagtgctaatgagaatcagaaaatgactattttctggagtcatggtgaattttgtattagtcacactcggatggtgatttaaaatactggtttattatgagtagtaagaaataattttatcttttaatgttgaggaaggcttatagttgtgtgtatgtgacagaagtataaagtgtagaatctttaattttgtaaatattggatttgactgtattgccttataaaaaactcaaaataaaaaaataaaaagcattacacaaattatgaaattcaaactgtgttgttataaacaatgtagctttaggatacattctactcacaaaacagtcgcatgtaaaatgtttttatacacgcattaaagaaaaagaaactccttaaaatgaagtaactatttcctgtttcattttgtttgaacagcttttgttgctcactacgagttgctttaaatctctgggaaggtctgttccgaatttactacttctggattggctaaaatctctttaaagtgtgtgctttgttctctaaaaagcttaggtcagttgagcaacaagctcctcctgtttttttctttttttaaaaaaaagagctgagtaatgctggaggcttctcatgtggctgatgcaaacctggagaatttgcatcatcatttagctgtagtaagttggtgtgacaggcaggcgcttaaatacaagcccatgaggaagctgagctggtttgtaatgatagggcggcagcagcagcagcagcagcagtggtggaacgaggaggtggagaattgagagcacgatgcatacacaggtgtttctgagtagtaattagatcgctgtgaaggaaaaagcacacctttgagttttcacctgtgaacactatagcgctgagagagacagtctgaaagcagaggaagacatcgatcagtaacaccaagagacaccaaagttgaaagttttgttttctttccctctgttttatttttcccccgtgtgtccctactatggtcagaaagcctgttgtgtccaccatctccaaaggaggttacctgcagggaaatgttaacgggaggctgccttccctgggcaacaaggagccacctgggcaggagaaagtgcagctgaagaggaaagtcactttactgaggggagtctccattatcattggcaccatcattggagcaggaatcttcatctctcctaagggcgtgctccagaacacgggcagcgtgggcatgtctctgaccatctggacggtgtgtggggtcctgtcactatttggtgagtgcgactttttctctcgtgggggcgtggctgtggggctggaaagcttgctttctgggaaagcaaatggtagtttttgaggagtgaatggatggcaaaggccacaccaaatttttaaaatttttgttcgggtacgtgaactacccagatgcagcatccgctgttggtgtgatctggaacaccctcaaattgcttcctacaggctgtactttcttttcctgactaagacaggctatcttctgacttttctctgtggtgatgagagcaaaggctaactttcatgacccagtaaaaaacatgcacactttctgtgccgggcagttgtacacttagcttgggcattctggcagctggcatgctgaatgagacacctgtgaagtggaacctggcatgggctatttagacatagaacggagtgttcagcagaagtcttactgactttttattagccaaacaaatgggtggcagtctttataaaaatattttttaagttcatgtgcttgtcacctcttaatatcctttcaaaagtccttgacatgggaga

SEQ ID NO: 10114 - DNA, 6000 bp, Homo sapiens
agccaaaccatatcattctgccctgtcccctccaaaatctgatgtcctcacatttcaaaaccaatcatccctttccaatagtccctcaaagtcttaactcatttcaacattaactcaaaagtctgcagtccaaagtctcatctgagacaaggcaagtcccttccacctatgagcctgtaaaatcaaaagcaagttagttacttcctagatacaatgggagtacaggcattgggtaaatacagccactacaaatgggagaaattggccaaaacaaaggggctacaagccccatgcaagtctgaaatccagcagggcagtcaaatcttaaagctctcctttgactccatgtctcacatccaggtcacgctgatgcaagaggtaggttcccacggtcttgggcagctgcacccctgtggctttgcaaagtatagcctctctcccagttgctttcacaggctggtgttgagtgtctgcagcttttcctggtgcacagcgcaagctgtcagtggatctaccattctggggtctggaggatggtggccctcttctgacagttccactaggtggtgccccacaaggactctgtgtggggggctctgaccccacatttcccttcagcactgccctagcagagcttctccatgagacccccgcccctgcagcaaacttccacctgggcatccaggcgtttccatacatcctatgaaatctaggtagaggttcctaaaccttaattctcaacttctgggtacccacaggctcaccacctggaagctgccaaggcttggggcttccaccctctgaagcagcagcctgagctgtacgttgaccccttttagccatggctggagcagctggaacacagagtaccaagtccctaggctgcacagagcagaggagccctgggcccagcccacaaaactgtcttttcctcctaggtctctggacctgtgatgagagtggctgacatgaagacctctgacatgccgtggagacattttcccattgtcgtgtggattaacatttggcttcttgttacttatgaaaatttctgcagtggagattttcatttctatcacattgtcaggctgcaaattttcaaaccttttattttctgtttcccttttaaaacggagtgcctctaatagcacccaagtcacctcttgagtgctttgctgcttagaaattttttacaccatatatcctaaatcatctccctcaagttcaaagttccacaaatatctaagacggggcaaaatgcagccagtctctttttttatatatgctgtgtggtatggattgaaaaatgtacttattacatgtgaatattcaattgtaccaccacaatttgttgaaaagactaggctttctctaccaactgcatgtgtacctatgttgaaaaccagttccccacactgtcttattctgttttgtgttgctataacagaacacctgggaatgggtaatttataaagaaaagagatttatttaactcacagtctggctagctgggaagttcaaggacatggctctggcttgtggtgaggcttttgtgctaggccaaaagatggcagagaaggtcaaaggggaagcagacgcatgcaaagagggaaaacctgaggggcacccagctttataacaacccattctcatgggaatgaatccagtctcgtcagagcaagaactcactcactactgcaatggcatcaagccacctacgaggacaggaccttcatgacccaaatacctcccattaggccccactttccagcactgccacactggggaccaaatttcaacatgagttttggttgggacaaaccaaccatatccaggccataatacatacacatgtaagtctatatagaatctattctgttccattgatttgtttgccttgatactaatactctttgataactctttgataactatagctgtatatcattctataaatcctaaagtcgggtagtgtttctgaggggggttatcttgagacacaagaaaaaaactcagcatgggctcattctgccaactatatagtttaaccagacgaattctgggaaaaacaatgatgactattgtcattactattatttactattgtttgatatttttgttaaagtaataaggaaaaaaacctcagaaaataagtataaatataagaaagaaaagatcattttctgccatagacataattatacatcttgaaaataaaagtcaacccactggaaatacttgtggaatactttgtttccttttctctattttctgcaccattaaaaagcacattcctaaacatatgaaaatatacaaacatttttaaagtattatttgaattatctaggttctgagtccactcattgtatttgagttaaaacttcattctgcatagctctttaatcctgataatcgaggcatttcctatattctgcatttttcaagtggcaaggtgttgtggaaagggcacaggctttgaatcctcactctgcatcttaagatctgtgtgaataagttatgtaactgatctgggtctatttcctcataagtaaaataaggatgatacctgtgggtcaattgcatatagcaacttgcacatagtagaacattaataaaacacagctctgattttgattacaaaacaggcttccaacaggacatcactctgttccatcaaggagcatgaacctttctgcttttttttttttttttttttttttttttttttgacacaatgtctcactctgccatccaagctggagtgcagtggcactatctgggctcactgcaacctctgcctcctgggctcatcccacctcagcttcctcccacctcagcttcccaggtagctaggactacaggcatgcaccaccatgcccagttaaattttttgtatttttttgtagagatggggtttcatcatgtttcccaggctggtctcaggcagctcggctcaagtgatctacctgcctcagcctctcaaagagctgggattacatgcatgagccaccatgccaggtcacctttcctgctttttatgtttttctagatttctgattactctagtccctccaatcttgattacattgccttggtctcttcccaaatctctcttcaactttgatgtgtcagaacacttcacgactctaccattcagcattacattctgggactcctccgcttgtattattaaacactacatcactctcaaaagccataccccttgtcttatttgcagattattctttctcctctgacattatcacattgtattattctgatgaaaagttgcctattaaacaaattataaatattatattcaatcatcctttcaataagtggcaaataattttggagatatgttaaggccttaaatttcaaggttagagattagatttcatgctgtgggtaatgaagggtcattggaaactattgaatgagctgaggattaaactacgaagtgtaggtgggaggctctgaaggggggcaactagttaggtaactctgaacaacagtttctaaagtagtgagaatctaaactagagaaatggcacagggactggagggggtgaggacctcttttagatgattttatggagttagagtttaatttatggaggcagtgaatgtagcagccaaagagtaaaaaaatgttctcaaggttttgagtactatgtgaccaagaagatactactaaatcttgcaaaaattcactattcttacatttttagttttcagcttcctcactgcaaactttgaatggatcctttaaaaaatccctctctagcagttcaagtgtatttgttatgggccacagaagtatgttgaataatagaagtcagaaggacggaagaaagaaataaagggtataatattgttacaaagtatctcaaacaaaatgtctttttaaccagtaaattttaacactatccaaacactctcccagagatgacaaagtcaaaagtttagaaatgctggtcttaattagtgaagcaatgtgaaaaaactcagtgatcttgacccctagccaataatgatacgttgtgcacggaatgccaccaaacccttaagattgaaactcttcaacaagggtcttagactcacaagtcaattaaatgttgttaattaatcttccaataaaattaaattgttataccaaattcaaagtcaagatttactataaaatattaagtagtaaaattaatattgatccaatatataaaaggcaaagcagcttgtgattgcataatcatagcataaactacgtttatgctaagatttatttcaatgtgtttgaaactacaggctctgagagagacaggcctgatttacatcccgtttccactgtttacatgttgtgtaacttcgagcaagttgccatcagtttcatcacctgggttgccacgaaggttaaacaatgaatgtaagccccttagagcacaatgaacacaataaatgttagcagctcttattaatagtgttgttcgagagaaaaagaacatattgttttatatacaatgtatttattaacacttaacgcatctgtatttgtcatatacacacaccagacaggaaagctccttattaatcaccatgactgcagatctgttaacatctagaactctggagaaaacctagagccctaatcttgctgcacttattactggacgttgttcataaatatgatttacataaaattcaggacccaatcattgcgcaacaggaggtagcacggtctgcagagagggcgggagctcagaggaggaaaagtcttcggacttgcagggggaattcctcctgggctaacccgggagcggggtccaggccacaaccggccggcggcggcacaggctccatgtgcggctccccctggaggcggttgagcccctcggagcaggagcgcgtagcacacacctcgggccgccaccgcctcccgcccgccaccgcacgcgcacgcgcggttagtagtcgctgctgcgcggccgccggcgggactggtctgaagagacgcggggaccaagtggcaacgacttggacatctgagctgtcactgccgaaaacaggccgcaagagaggtgcgtgagcagcaggccgcgttcccgctgtcccgctgccctttgcgcgcagattggggtgaggaagcggagtcgttgctgcttcccccaggcaccccgttactttgccgccagagggctgaaccggtcggggccaagtgagggtggatgttgagtctggcgatggggctgcagcgagctagggtcttgactgggctctggcggccccgtgggtggacgcaggaggtggtgccacctgggaccctttgtgtcttcagcaccgccgcatccacctgctgcgcccgggctggggcggacgagcacggggacagctaggtgcctagcccggccggcctcccctgcgggcttgaggagccaccgggagccgaggccgttattccagcggttgccattgcagccccgttccacgcttgagcccggggcgctctcccaatggttgtagagggggcccggggcgcgtctgggcgctgctcactctgctgactgctccttacagaaacccaaacgagatcaaaataggctcggctgtctcagtctccacctatgtggaagcgaagggaccccacttcacggcggtggggccagggactgttggccgctccctcgatacccgcgcagagcccattgtgcgccgccggggggcgggcgaaagggctgggttgaatccagagaggccctaattactagactcattatcgccccaggcctgtttaccatcaatcagacactttcgctgattttatttatagcatctgcccaagcaacaaagaggaggtgtttgcttgggagttaaaagcaaatggcaaccaaagctcaggactgggagagaaaaggtaaataacgtggccacaggaagaagtctcaaattagaaaagagttcattaacgtataaactttttgttgcttaaaagcaggcaaaatcccg

SEQ ID NO: 10115 - DNA, 6000 bp, Homo sapiens
aggttggcattctcactaatttgctgttataaatattaagctatcataagcgttagcctacatatgactctttcatatgttagttaattattttagggtagaaatccaaaagtggagttaccagaagtggatatagacattctggctgggtgtgatggttcatgcctgtaatcccagcactttgggaggcagaggcaggcggatcacttgaggccaggagtttgagatcagcctgggccaacacagcgaaaccccatctctactaaaaattccaaaactagccaggcatagtggcacatgcctgtactcccagctacttgggaggctaagacacaagaatcgcttgaacccgggagggaggtggaggttgcggtgagctgagattgtgccaccgtactccagcctgggtgacacagctagactctgtttcaaaaaaaaaaagaaaaagaaaagaaaaaaatagactttctcttggctcagtgtatactgccaaattgttttccaaaaaaattgtgtcaatgtataacaccatcactaatatagtattgatattatggttattacattttaaaattcataatttgtaattataacattcataatttattactatttataatattaatgtaaatgtatattatatataaatgttatagtaattataactttggtagtgacaaagtattaatttattaggtgaagtatatgcttttttattagtgataataaatatatcctctctcccattataaaagtttgtatttcttcttttagaaattgattcttctgtcatttgcacatttatctgtataattataacagggtatttcccagtggtggctaatgagagaattatgggaaagtatagaacactattcaaatgcaaagcactgtatgatttttatttaataggaagacattttgtgcagcgatttctgattgaccacagtttgatcaagtgcatttgttaatgtgttctacattttcaaaaaggaaaggagaatttgttacattcagaacttgctgccactcctttgctacgtcataaagggtcagttgcccttgctcatactgacctattctttacctctctgcttcttctttgtgccagaagagtagaaatctgaccctttggggataccaccctctcccctactgctctctccaacctgaggcaaactttctcctacttcccagagcctgtcagaagtggtgaagccagcctgctccttggaatccagaactactttcagaatcttgaacttctgtgacctctcagggtccccttgtgtgaagtttttgacgtcagcttctcctgtgacccttagaagtcactcttgtgtctagcacatcccaggtgctcagtcaccattgaactacagtcatactatctcctggcaaaggctcttaactgtccatgttagcctgatattaatatcctggaagcttatactgtcgttcttccttccaggtttaaataaggcagcccctttatcctgtcacaggtcctctctccctacctatccttacctgttttggataacaacctttcttatttctaatagatttatttatttctcacatttccttcccttatcatagttttcctctcactttctcctctagtttgtcatactctggctttaaaacatgcaaacatgtgccttatggggaaaaaaagacaattttaatttaccttgcttcttctttacaaatgtattgtggcttcttcttatagtccaaatctaaaactctttacccacccactgccttgaactccttcctcgttgtgaaagtaggatggggcaaagagagaatgcatgcccctcccaactgctcaaacaagtaaaggtgctgttacagttatcttttgctaccttaatacaataattattttattatatctcacaattttatggatcaggaatttagactgggctcagctaggcgattcttctgctttactgacatcataggagatcacttggtggtattcaactgtcaggtaggcttatctggagggtccaagatagctgtactctggtgcctggtgccttggtaaagagggatgatgatgtggggcctctccagcatgaacagcctcagagaagtttgctttcttacatgctggcccagggctccaagagcaaatgttgcagtgagtaaagcagaagatacaaggacttttataatctggtctcagaagccacatggcatcagttctgtattattctattggtcaaaacattcataagcctgccagatgcaaggggaaggcatatgtaccctcatcttttgatgggaggaatgtgatggatttgcaattatgttttaaaactactacagacagaaccactgagaaagattcatgggtagctttggggtgaggactgggaattaacctgttgatagcagaggttcactagagtcaacaaggaataaggtctcctcttgtacactttagtcatactataccaacattcttaaccactgcttagccatcagcctcacaacataacaactccatcatagttgtactccctaagatcaccaacaatgttagagtcaaatccggtaggtttttctttgtttttgtcctcctgacattttttctaaacttgacactggtcagacccaatctttctttaatcatattcttaaataccagttctatcactggatatgttactgtttcttgttctcactctacctttgacaaagccattctttccagactataactctgggtctgggtccccctatggtttggcccttgaattcttttcctagtcctatttgactagccccattttcccgtgaaaagcatgcccctttcattgcatccatatcatgactaccaaatacctcctctatttcttcctcttttagcatgttaaatgcagcttcctaagctctctatctggatatcaacagtattctctccaaataattctaagactttaaaaattggtttaatcttcttacccctaaaatcaccccccttaccaactgcctcatgacaatcattggtactgtcactgagcttgcaacccatgttcttaaacatagagtaatctttgactccacatctaatcattcataaagctgtattgtctatcaaattaaatctgacatttatgtgagagcacttcatagtctgtaaagcactacacaggtgataacatgaagctacactcataatggatttgcaggctctgcttctcatttggcttctacagcctcatccctcaccaacttcttgccctacctctctctttcttccccatcacccaatttcccagtcagtcaggccaacagaatgcattctatatacgcgacttgctttccccaacatctttgcctgtatgcatgccacttatttgcctcagttgatctttatttcaacaagtgtttgcagaggagaaacctcgctggctccttctcctttctattttttttcagaggctacccgtcaggtcaacattgcctttttcagggaagctctgcaagcctgacctcccttggaagtgccttaggactggcttcttgcacagtacacaacctttacttatagagggtttggagattattctttattcatgtcttatttctcctgctcctggaggagatgactctgacttccactgactcttttggggggcttaagtcagggttgagtaccagaggccctaaatagctggacgtggattctggtaatatcaaatccatctttggcttaactgagaggttctgaaagctgggacctgaccttgtccatttccctctttctccagtttcctattatttcccactgttttttttaaaagttttttgttttcttaagttttcacaagaataaacattgaaaataaaatttgcacaaagatcgaactaggaaaggccacacaaccaacacatattacatcattataggtaagttagcagggagatttcagacctgggctagctctggaaccacattttacactgttgaaaataaaagctggagtacagatgactttcccaggttcacagagttggtaagctggagagctgcacctggagccaagcaacctgccctgtcctttccactgcaccctctaagaaatctaattagaaggaacaggtggtatctcattttgtacggtgctttagcaatgtactatttgctttctagtgtgtctattgtctcgtttgacatcttctctcaaaaagtgatgaaacgaaacgctctttttgacaagttcagagtgctcttggttcctgtgtgggattcttccaagtctgaatttggtagtgggaagagaaggaatccggaggaaggaggatgagaagtttaaaggagaggaaagggaagcagagaaggccgcaaggtgcctgcaagatgtctggggagttggaggaatggaagagtgccccgctcttccttctgggagagctccagctaggcagaacctttcaccaaggctctgatatcgtgctggtttccgaaagccccagccgaaggtgtgcagccaaagggtgacagaaggtgaggcacgtgcgggggcgcgggtgctgaccgccgcggtgcgccctccctccgacgtgcggtgtgcggggcgcagacaaccagcggccggcccagggctttcggggagcgaagcagggctcccgaggcaccgagcgagaatgggaatgggagggacccggtgctcccggacacgcccccggcaggtcccacgcccgggtcttctgagacctcgcgcggcccagcccgggagcggcccagctatataagtcccagcggaagaccggaacgcagagggtcctgctggcgcgagggtgggtaggaggggacgcggggactcggcccccaacaccgcgctccgtctgcagccgccgcctctgcaccgccgctgcccggcggtcggttcaaaaaacagaaatcgggtttgctgcccggcggacaggcgtgaagagcaagggaaaggaacttcctccaccttcggggctggagcccttttcctctgcatctccagtctctgagtgaagatggggggcctgacagcctcggacgtacacccgaccctgggggtccagctcttctcagctggaatagcggcgtgcttggcggacgtgatcaccttcccgctggacacggccaaagtccggctccaggtagctaggcagaggggtaagacaaggggtctcaggacagaggggacgctgttgcgtgcattccatttattctctgctttggtgtaaccactgtttctaggtagggtaggtgaccttccaaagcagtctggccttgtcccagggctggtgctttaggatgggaaactggaactttttctgggattagctgaagaaccaccagggccacagagaatgggttgaccatgactactaccaaattctcccaaaatttagggtgcacttagtattttaagagctgagaatattggcctctcctgagtttactagtcaggtgctttttcctttctttgattcttcgggggttctgtcctatcctactgccctaggggttctggagagttcctggggagggggatattcaaaatgtgcattgtagccagcctccctccatctgcgcgtgagcgaacacacacacacacacacacacacacacacacacacacacacacacacggtagagggaggtggatggaagaggaatgttgctgagaaaagaaacggaaaataggaacacagggggaaatcttggcttaagagtgaactcaatttcgctcccttctgttctgcacctttcttatttccaggtccaaggtgaatgcccgacgtccagtgttattaggtataaaggtgtcctgggaacaatcaccgctgtggtaaaaacagaagggcggatgaaactctacagcgggctgcctgcggggcttcagcggcaaatcagctccgcctctctcaggatcggcctctacgacacggtccaggagttcctcaccgcagggaaagaaagtaagccgtgagcgt

SEQ ID NO: 10116 - DNA, 6000 bp, Homo sapiens
cttatttgtggaaacaaaaccaatctatacacaatagtcacagaacaattgttacactttgtgatactaactgtaagtgcaacagggaatcagaagagagatgagtataggctggaatacttaaagagatgattggaggacttggagtgggccttgagcttggcctttagattaacaggggccagaagaaggacattttacatggaaaattgggaatagcacaatgaaaacagagtaggcatggtttaaatataaggaacagtgtagttctgcctggtttgaagaaataagatgtaaggtcgagtggagatttgtggttcaacaataggcttagatttgagtcaagtggaagctcttgcacatttcagaaagacaagtgattttatgaaagcagtgtttaaagattagttttgtactagaattaagggtagattcctagagaaaagaggattgcaggtaccagtgggtaccagtggtaataggaaaaggcaaatctaggatgctttggaaggaaaaatgagaattagagtttaggagaaagcagatcactgaagttttaaaaataatgtggaatagttggtaagaacaacttattttatgaaagctgacatcggagtctcactggaacattgtagaggagaggttttctaggcatgtggaaatgcagtaagaggcatgggtaaaagcaccttttagtttttaaggaattaggttaaagaattagctgcatgcttgtgtttattttggttatttctgatatacagttctgaacctcaggagtaatttgttatctaactaaaatagtaagttttaaaaataaagctcatttatattttcttctagaataataactgcttattacgggaaatttgcaaaatgcagtaacgtaaaggcaaagtacctgtccaccagagatcctcttagtatgttattttcttcatctttttccatgccaaattctttttttacatggatgtgattatataatattttgtacagttttctgttctttttacttgaatgattttcttcatgttgtatactttttatgagtggttttaatgactgcataatcttccatttggtgcatattcagtggttaatgaggacttgacctatacttcagaaatttggaaagaggagaagtgggacatgcccaaattaatgggacttggccactaacggggtttgaaggacaaaggagagggaagagtcagataggattagcatagcacatgactgcctaagagatgctcacaaaaataaatggctgaatgagtgaatgaacccagcggttttaaatctggaggcttaagacagtttttggtagctgagggagaacagaaatagctatgtttactgttaatatagaatatgtgttattctttgcactcacctttcccacctatattgcagacgccactgatagcttgtaatacttttctacctgaggtttaagtatgtaaacatgaagaattaataacaagttaaactcttgttttgaaaatctaatttgccaaatataattgaggaaatactataagaactaaatctctactgatcctctcttaggagcaatttgacataatatttgtaagtttaaagacagactttaaaacaactttccggtcacaacttcaaaataaagtacaagttaattgcaaaaaaataaataaataaaaataaaataaaataaaataagaatgctaatatctgttctgcctctctaacagggttattttgagtgttagatttatcttacttgtagttgtttttttattttaaaaaaattttgaaatgataaactaacaaaggtcagggaaagttcttagactactctggcaaggcaggctggacaattctaaggcgatgaggtaccaaggaggctagtagtataaaccacagtgcctcaactttcctgcccctcccctgttctccactcctccatgcaaaacatgaaaagcacacttctccactggcagatcagactagcatgcaaccatcttcaggaataatctaagcctgaaatagttgagaggtaagtaattgacaaaaatgaatggttctctgtcatgaaacaagcaaggtataagtttgtgttgatcgatccaagttgcctttcctagattataacattgaacttcatccttcttaactacgtcatagaaatgactcgggcaattcaaaaaatagcttaaagacatgtagtatcaagaaaattggataagttttttatgtttgattaaatgcctcaaaagtacttgttttattttatgcaaagattcaaaattcttaaaagatgtggatttgtctaataatttgcatgatatagctcataggtagaattttatgataattatgaatgtgtacttcagtaaaaatatttctgaaaaatttaaagaagattaaggaatgcctgaaagagaaaaatgtaatctgatgtattttttttgttgttgcatttacggggctcacattttttccttccattgtgcagatacgccactagagagcactgtacggcactgcttcctcacaccctgtgtgaggtgctgaatctgacctctgatttcctcattgagaaccctccaggttttgacttactttaatagggccaggtactctatagggcattgtgccagatgctggaaacagaacaacagagacaggacccacaaatacaaaggaacagattgttcacaacaacctgagacaggtgttaataaacaggcctgtgtcagcactacaggagtttagagaattgctaacgatgtgattctgcaggaaaggaaagtgggaggtcatggaaaagaaagcactctcagactctgaccagtccaggctgaagaaggtatgaaagctgaattttaggctgagtttccttttcattttccccttcctgccttagcaatggacctccatactggagggaacctgaagctaggatatgacataggttacccgcaggatatataaaaaatgatcagcctatacacccaggactgcccgtgagaagttgctttcctctgcactgcaatattcatttgtcatttattgatttgagaaatatttattgtcaagtgtgccccaagcactcattggtaaataagatagccatagtcagggtgtgtccacttaaaaactgtagtccagtggagacacaatgattgcaacgtagtgtaataagtcctgtgataagggaagaagatggaaccacacaagtatagagcaggggcacctgacaaagacaggaagtcagggaaggcttcgtggaggaagtactattcaatgaagaccctaagcagaattggaggccacctaaaaaggagtaggtgtattccaggtgaagatagcacaacccaggaaaaaaagaatccaataggattttatttgtgtatatacaattttcagatcttgctgttttccacttatccattttatcctgagtctccatatctttatttttgaaaacatgattttaatagttgctctaatagtccatcgtaagaatagtgacatttatttacccattttcagaaatagcatttttaagactcatgctaatcgctctccctttgtcaatataaaatcatgtgaattaattcttactgcttatatgaatatcaacaacatttcctttacttggttgactcttgagcacaattcctgcaacccaaactgatatccagccataacaaacactgaatttatggaaggtattaaattattatgtattgtttaattttaagtttttaataaaatttgctgcagttgttttacatgaattggcagggccttaagaggcactctggattcttttcctgctgctcagattaccccgtctgtgtcattcattcttccgtctctcccaagtctgcatctccactccctccatccattagtccctcaatctcaggctcctccctctctgggatgctctgctgatacttatctccatcttttatccagtaaatacttttttttctctgtggtccagtttcctgaatctgcaaacattagcttcataaatgatttttttaaaccacactttgggtaaatatgtaagtatgatatatgtggcaaattgcttacatagcaaattgattttctgggtcaggcaggaaagactttcacaaaaatcttacaggaagtaagatgatttagatggagtatccagtcaccttctgttgaaccatttcagacctaatttatattttttgttctgtctccctttaaaattgagcttcctcacatttccatacctttcattttaacctactttaatgataaggtttttggtttgttgggttttgtttctgactgttttcatttattgtcttggtattcatttatgcttacttagcaaggtatatttcagacagaaacagctcactggtttcatagctgcacagcactagctcttcagttcaaactctattttcactgaaagatttgttgcatctcatgtctcttacattgctgtgtgactcaccatgagtttgggagtctttcagaacctcagaacactcaaatgatttaaatttctcaaatatgttcatttcacatataggaagtcactttcatctggaccaccgggtcttgacattagaaatgagaaggtctatggctccacaacagctacctcagcctggcacgtgccctggcctcagagattcacagtccagttctttgtccagttgggtggctcctgtctaccaccttaccatgcccacttaactgatgcaaagttaatatcacaagtagccacctgttccttgcagtgaaaattgtacttaccactttcatagccccaagatatccatgtatctttattaacaggcgcttaacaacttgcatcatttaaaatgcctcccctgcctatcagctgatgatggccacaggaaggtgggcctggaagataacagctagcaggctaaggccagacactgacacttgcagttgtctttggtagtttttttgcactaacttcaggagccagctcgtgatctcaggatgtatggaaaaataatctttgtattactattgtcaggtaagtgattttatttcatcttggttctgttatattgggtatgagatcatagaataaaatgtaaactaccctattttagttctatcttatttaaatgcataaatgagtagtatttcctcttccagtctggtggatggattttactggaactcagctaccaatgtgggggaaatggcacaagggagcccagtatttatggccgaatccagttttctagtatgagaagcttacttcaattctaagtctagctagaattaaactaattttatcaaatgctatgagaaatagctctctgtgaataaatgtattgctttgtttgagttataaggagattcatttccaaactaaagagttattaacaaaggtgttatatggcttttagttttaaaaaggtataatttcctatttctgccaaatggtgagaagccaaaagcatgaacactgaaaccgtggggagttgttcgcttctctgtgggtccattactaaagtgtcacataggaagaaacaaaaacaaaaacaactcttactggcttagatgtcatgtgaattttaggagaaatttaaatccattaaaataaatatcatagggtcattattaaattgtattcaataatttgaatttaacttagtttaaatttaattattaatttagtgtattaaataaacatgattttggcctctttctgagaatattatagttaaacatcctctcaagtgcagtgcttatgtgttagcaatactagtgcccagcacacagggggcaggcagttgcttgaaacattctgagtctattagacattgctgtaatccaagtgagagcaagtatcaaggatctactgagcatacagtagcatacagggaagagaggatctactgagcatactctgtagcatacagggaagagagatcagcattttctaagataccctaggggaggataaaatagtgc

SEQ ID NO: 10117 - DNA, 6000 bp, Homo sapiens
atttgagtgacagtttcacacatatactcatgtatgtgtgtgtgtgtgtgtatgtgtgtatatatacatatgagttatacacttagtttgtgagtgttacattttaataaaaataaatcttagaaatgactacatatttgttccttttcttttatcagtatacttcctctagtattcatatagagaaccagggctaaattcatctttacaaaggtaaacggcagaatgaattgatatactagacattgaaaagaaccaatgtgagattaaaatttcaaacagttttgaaaactactacattgtgtattcttgcactatctctctctttcttggtatcagaccattgctcatgctgttttctctgcttaaaatgttcttacttctcccgtgacttgtctactcatcctttaggtcttgcttgctctggaaaacctttccagaaccccaagtctgagttaggtacccctcttatgtactcttataacaccctttgcttactactatcatccacttgacactccataatgcaattgccttcttactttatttgtttcccaattaagctgtcagttcctgaagggaaacttgagttactgaaggttgtgtcttccacacttggcacagtgcccggtaggtgctcacaaatcatttgttgaattattatttggatgtagaacaagctggacctatcaattctcagcagaaagatcatgtatgattcctgattccagcagtatagcacaatggacttagaggcaactgggaacagtttttcactgtctacatcaccattgtagtaatgagagtttctcacttctggggtttcttcaacgcacatcacatctcattataatcttaaagaaaggaaactgaaaactgggttaaagaaatctcatcactagaaggtgttgaaggagactcctaaataaattagatttccaaacccaaatgccaaaagcttagaaagagtataaatgaatgtgatggattgtgttttcgctcccaattattagggcccttcctgtaagtgttttatatatcctcaccattgacctatgacttggaggacttccatttggaagaattatatttacttgtcccgttgaggtcagcttggccactgatttactttggctaatagaatatgagaaaaaaaaataacacataccatgtctgagaggaagcattaaaagccattccttatttggcctttttcccccagtttgcaacaagaacagcatattccaaatgggggtggctccttcagtctggatcctggaacttgtcaccgtcatagaccaaatgtaatgtgagcaggaaatgaaccagtgttgctgcaagacactgagattttgaggccttaccacagtagaacctaatctaagaaatggaagcaagcatcaggtggagcacttaccagactcaagaaagcctatttgtcccaagagacagccagtccttagctctcatggattgtcacaatgtagaactgcatgctaactcttgccagatcttccggtaacaggagccaaatttttaattaaatcaattcctgatttttaattaaaatataccttctttttaaatgttagcagctaaatccatacgtttaaaaaacacttagggcaaatcaaatcaagtaatacactcatagtctcttttccattccatagtttgctcatatttaaaataagaatgctaatatctgttctgcctctctaacagggttattttgagcgttacatttatcttaccttgtagttgtttttttatttaaaaaaaatttcaaatgataaacaaacaaaggtcagggaaagttcttagactactctggcaaaggaggctggaaaattctaaggcgatgaggtgccaaggaggatagtagtataaaccactgtgcctccactttcctgcccctcccctgttctccactcctccatgcaaaacatgaaaagcacacttctccactggcagatcagactagcatgcaaccatcttcaggaataatctaagcctgaaatagttgagaggtaagtaattgacaaaaatgaatggttctctgtcatgaaacaagcaaggtataagtttgtgttgatcgatccaagttgcctttcctagattataacattgaacttcatccttcttaactacgtcatagaaatgactcaggcaattcaaaaaatagcctaaagacatgtagtatcaggaaaattggataagttttttatgtttgatcaaatgcctcaaaagtacttcttttattttatgcagagtcaaaattcttaaaagatgtggatttgtctaataatttgcatgatatagctcttaggcagaattttatgataattctgaatgtgtatttcagtaaaaatatttttgaaaaatttaaagaagattagggaatgcctgaaagagaaaaatgtaatctgacgtatatttttttctgttgcatttacggggctcacattttttccttccattgtgcagatacgccactagagggaactatatggctctgcttcctcacaccctgtatgaggtgctgaatctgacctctgatttcctcattgagaaccctccaggttttgacttactttaatagggccaggtactctacagggcattgtgccagatgctggaaacagaacaacagagacaggacccacaaatacaaagcaacagattgttcacaacaacctgagacaggtgttaataaacaggcatgtgtgagcactacaggagtttagaaaattgctaaggatgtgattctgcaggaaaggagagtgggaggtcatggaaaagaaagcactctcagactctgaccagtccaggctgaaggaggtatgaaagctgaattttaggctgagtttccttttcgttttccccttcctgccttagcaatggacctccatactggagggaacctgaagctaggatatgacataggttacccgtaggatatataaaaaatgatcagcctatacacccaggactgcccgtgagaagttgctttcctttgcactgcaatattcatttgtcatttattgatttgagaaatatttattgtcaagtgtgccctaagcactcattggtaaataagatagacatagtcagggtgtgtccacttaaaaattgtagtccagtggagacacaatgattgcaatgtagtgtaataagtcctatgataagggaagaagatggaaccacacaagtatagagcaggggcacctgagaaagacaggaagtcagggaaggctttgtggaggaagtactattcaattaagagcctaagcagaattggaggccacctaaaaaggagtaggtgtattccaggtgaagacagcacaacccagaggaaaaaagaatcaaataggattttatttgtgtatatacaattttgagatcttgctgttttccacgtatccattttatcctgagtctctatatctttatttttgaaaacatgattttaatagttgctctaatagtccattgtaagaatagtgacagttatttatccattttcagaaatagcatttttaagactcatgctaatcgctctccctttgtcaatataaaatcatgtgaattaattcttactgcttatatgaatatcaacaacatttcctttacttggttgactcttgagcacaattcctgcaactcaacctgatatccagccataacaaacactgactttatggaaggtgttaaattattatgtattgtttaattttaactttttagtaaaatttgctgcagttgttttacatgaattggcagggccttaagaggcactctggattcttttcttgctgctcagattaccccgtctgtgtcattcattcttccgtctctcccaagtctgcatctccactccctccatccattagaggagcctcaatctcaggctcctccctctctgggatgctctgctgatacttatctccatcttttatccagtaaatacttttttttctctgtggtccagtttcctgaagctgcaaacattaacttcataaatgatttttttaaaccacactttgggtaaatatgtaagtatgatatatgtggcaaattgcttacatagcaaattgattttctgggtcaggcaggaaagactttcacaaaaatcttacaggaagtaagatgatttagatggagtatccagtcaccttctgttgaaccatttcagatctaatttatattttttgttctgtctccctttaatgtcctcacatttccatacctttcattttaacctactttaatgataaggtttttggtttgttgggttttgtttctgactgtttgcatttattgtcttggtattcatttatgcttacttagcaaggtatatttcagacagaaacagctcactggtttcatagctgcacagcactagctcttcagttcaaactctattttcactgaaagatttgttgcatctcatgtctcttacattgctgtgtgactcaccatgagtttgggagtcttgcagaacctcagaacactcaaatgatttaaatttctcaaatatgttcatttcacatataggaagtcactttcatttggaccaccgggtcttgacattagaaatgagaaggtctatggctccacaacagctacctcagcctggcacgtgccctggcctcagagattcacagtccagttctttgtccagttgggtggctcctgtctaccaccttaccatgcccatttaacttatgcaaagttaatatcacaagtagccacctgttccttgcagtgaaaattgtacttaccactttcacagccccaagatatccatgtatctttattaacaggcgcttaacaacttgcatcatttaaaatgcctcccctgcctatcagctgatgatggccgcaggaaggtgggcctggaagataacagctagtaggctaaggccagacactgacacttgcagttgtctttggtagtttttttgcactaacttcaggaaccagctcatgatctcaggatgtatggaaaaataatctttgtattactattgtcaggtaagtgattttatttcatcttggttctgttatattgggtatgagatcatagaataaaatatgaactaccctatttcagttctatcttatttaaatcaataaatgagtagtatttcctcttccagtctggtggatggattttactggaactcagctaccaatgtgggggaaatgacacaagggagcccagtatttatggccgaatccagttttctagtatgagaagcttacttcaattctaagtctagctagaattaaaataattttatcaaatgctatgagaaatagctctctgtgaataaatgtattgctttgtttgagttataaggagattcatttccaaactaaagagttattaacaaaggtgttggtagctatatggcttttagttttcaaaaggtgtaatttcctatttctgccaaatggtgagaagccaaaaggatgaacactgaaaccgtggggagttgtttgcttctctgtgggtccattactaaagtgtcacataggaagaaaaaaaacaaaaacaactcttactggcttaggtgtcgtgtgaattttaggagaaatttaaatccattaaaataaatatcatagggtcattattaaattgtattaattcaataatttgaatttaacttagtttaaatttaattattaatttagtgtcttaaattaacatgattttggcctctttctgagaatattatagttaaacatcctctcaagtgcagtgcttatgtgttagcaatactagtgcccagcacacagggggcaggcagttgcttgaaacattctgagtctattagacattgctgtaacccaagtgagcgcaagtatcaaggatctactgagcactctgtagcatacagggaagagagatcagcattttctaagataccctaggggaggataaaatagtgcaatagttaagagcacaggcatgaggaacagacagaactgggt

SEQ ID NO: 10118 - DNA, 6000 bp, Homo sapiens
tgatttgagtgacagtttcacacatatactcatgtatgtgtgtgtgtgtatatgtgtgtgtatatatatatatgagttatacacttacagtttgtgagtgttacattttaataaaaataaatcttagaaatgactacatatttgttccttttcttttatcaatatacttccgctagtattcatatagagaaacagggctaaattcatgtttacaaaggtaaacggcagaatgaattgatatcctagacattgaaaagaacaaatgtgagattaaaatttcaaacagttttgaaaactactacattgtgtactcttgcactatctctctctttcttgatatcagaccattgctcatgctgctttctctgcttaaaatgttcttaattctcccgtgacttgtctactcatcctttaggtctcattgcttgctctggaaaacctttccagaaccccaagtctgagttaggtacccctcttatgtactcttataacaccctttgcttactactatcatccacttgacactccataatgcagttgccttcttaatttgtttcccaattaagctgtcagttcctgaagggaaacttgagttactgaaggttgtatcttccacacttggcacagtgcccagtaggtgctcacaaatcatgtgttgaattattatttggatgtagaacaagctggacctatcaattctcagcagaaagatcatgtatgattcctgattccagcagtatagcacaatggacttagaggcaactgggaacagttaatcactgtctacgtcaccattgtagtgatgagagtttctcacttctggggtttcttcaacacacatcacatctcattataattttaaagaaaggaaactgaaaattggattaaagaaatctcatcactagaaggtgttgaagaagactcctaaataaattagatttccaaacccaaatgccaaaagcttagaaagagtataaatgcatgtgatggattgcgtttttgctcccaattattagggcccttcctgtaagtgttttatatatcctcaccattgaactatgacttgcaggacttccatttggaagaattatatttacttgtcccattgaggtcagcttggccactgatttactttggttaatagaatgtgagaaaaaaaaataacacataccatgtctgagaggaagcattaaaagccattccttatttggcctttttcccccagtttgcaacaagaacagcatattccaaacggaggtggctccttcagtcttgatcctggaacttgtcaccatcatagaccaaatgtaatgtgagcaggaaatgaaccagtgttgctgcaagacactgagattttgaggccttaccacagtaaaacctaatctaagaaatggaagcaagcatcaggtggagcacttaccagactcaagaaagcctatttgtcccaagagacagccagtccttagctctcatggattgtcacaatgtagacctgcatgctaactcttgccagatcttcctgtaagaggagccaaatttttaattaaatcaattcctgattttaattaaaatataccttctttttaaatgttggcagctaaatccatacgtttaaaaaacacttagggcaaatcaaatcaggtaatacacccataatctcttttccattccatagtttgctcatatataaaataagaatgctaatatctgttctgtctctctaacagggttattttgagcgttagatttatcttaccttgtagttgtttttttatttaaaaaaattttgaaatgataaactaacaaaggtcagggaaagttcttagattactctggcaaagcaggctggacaattctaaggcaacgaggtaccacggaggctagtagtataaaccactgtgcctccactttcctgcccctcccctgttctccactcctccatgcaaaacatgaaaagcacacttctccactggcagatcagactagcatgcaaccatcttcaggaataatctaagcctgaaatagttgagaggtaagtaattgacaaaaatgaatggttctctgtcatgaaacaagcaaggtataagtttgtgttgatcgatccaagttgcctttcctagattataacattgaacttcatccttcttaactacgtcatagaaatgactcaggcaattcaaaaaatagcctaaagacatgtagtatcaagaaaattggataagttttttatgtttgatcaaatgcctcaaaagtacttgttttattttatgcaaagagtcaaaattcttaaaagatgtggatttatctaataatttgcatgatatagctcataggtagaattttatgataattctgaatgtgtacttcagtaaaaatatttttgaaaaaattaaagaagattagggaatgcctgaaaaagaaatatgtaatctgacgtatatttttttctgttgcattttcagggctcacattttttccttccattgtgcagatacgccactagagggcactatatggctctgcttcctcacaccttgtgtgaggtgctgaatctgacctctgatttcctcattgagaaccctccaggttttgacttactttaatagggccaggtactctatagggcattgtgccagatgctggaaacagaacaacagagacaggacccacaaatacaaagcaacagattgttcacaacaacctgagacaggtgttaataaacaggcatgtgtaagcactacaggagtttagagaattgctaacgatgtgattctgcaggaaaggaaagtgggaggtcatggaagagaaagcactctcagactctgaccagtccaggctgaaggaggtatgaaagctgaattttaggctgagtttccttttcgttttccccttcctgccttagcaatggacctccatactggagggaacctgaagctaggacatgacataggttacccgcaggatatataaaaaatgatcagcctatacacccaggactgcctgtgagaagttgctttcctctgcactgcaatatttatttgtcatttattgatttgagaaatatttattgtcaagtgtgccccaagcactcattggtaaataaaatagtcatagggtgtgcccacttaaaaactgtagtccagtagagacacaatgattgcaatgtagtgtaataagtcctatgataagagaagaagatgaaaccacacaagtatagagcaggggcacctgacaaagacaggaagtcagggaaggctttgtggaggaagtactattcaattgagaccccaagcagaattggaggccacttaaaagagtaggtgtattccaggtgaagatagcacaacccaggaaaaaaagaatccaataggattttatttgtgtatatacaattttcagatcttgctgttttccacttatccattttatcctgagtctccatatctttatttttgaaaacatgattttaatagttgctctaatagtccatcgtaagaatagtgacatttatttacccattttcagaaatagcatttttaagactcatgctaatcgctctccctttgtcaatataaaattgtgtgaaataattcttactgcttatatgaatatcaacaacatttcctttacttggctgactcttgagcacaattcctgcaactcaacctgatatccagccataacaaacactgaatttatagaaggtattaatttattatgtattgtttaattttaactttttaataaaatttgctgcagttgttttacatgaattggcagggccttaagaggcattctggattcttgtcctgctgctcagattaccccctctgtgtcattcattcttccatcctccccaagtctgcatctccgctgcctccatccactagtccctcattctcaggctcctccctctctgggatgctctgctgatacttatctccatctttctccagtaaataattttttttctctgtcgcccagtttcctgaagctgcaaacattagcttcataaatgatttttttaaaccacactttgggtaaatatgtatgtatgttatatgtggcaaattgctcacatagcaaattgattttctgggtcaggcaggaaagactttcacaaaaatcttacaggaagtaagatgatttagatggagtatccagtcaccttctgttgaaccatttcagacctaatttatattttttgttctgtctgcctttaaaattgagcttcctcgcattttcatacctttcattttaacctactttactcataaggtttttggtttgttgggttttgtttctgactgtttgcatttattgtcttggtattcatttatgcttacttagcaaggtatatttcagacagaaacagctcactggtttcatagctgcgcagtactagctcttcagttcaaactctcttttcactgaaagatctgttgcatctcatgtctcttacattgctgtgtggctcaccatgagtttgggagtctttcagaacctcagaacactcaaatgatttaaatttctcaaatacattcatttcacatataggaagtcactttcatttggaccactgggtcttgacattagaaatgagaaggtccatggctccacaacagctacctcagcctggcacgtgccctggcctcagagattcacagtccagttctttgtccagttgggtggctcctgtctaccaccttaccatgcccacttaactgatgcaaagttaatatcacaagtagcaacctgttccttgcagtgaaaattttacttaccactttcatagccccaagatatccatgtatctttattaacaggcgcttaacaacttgcatcatttaaaatgcctcccctgcctatcagctgatgatggccgcaggaaggtgggcctggaagataacagctagcaggctaaggtcagacactgacacttgcagttgtctttggtagtttttttgcactaacttcaggaaccagctcatgatctcaggatgtatggaaaaataatctttgtattactattgtcaggtaagtgattttatttcatcttggttctgttatattgggtatgagatcatagaataaaatatgaactaccctattttagttctatcttatttaaatcaataaatgagtagtatttcctcttccagtctggtggatggattttactggaactcagctaccaatgtgggggaaatggcacaagggagcccagtatttatggccaaatccagttttctagtatgagaagcttacttcaattctaagtctagctagaattaaaataattttatcaaatgctatgagaaatacctctctgtgaataaatgtattgctttgtttgagttataaggagattcatttccaaactaaagagttattaacgaagatgttggtagctatatggcttttagttttcaaaaggtataatttcctatttctgccaaatggcgagaagccaaaagcatgaacactgaaaccgtggggagttgttcgcttctctgtgggtccattactaaagtgtcacataggaagaaaaaaaacaaaaacaactcttactggcttaggtatcctgtgaattttaggagaaatttaaatccattaaaataaagaaatatcatagggttattattaaattgtattaattcaataatttgaatttaacttagtttaaatttaattattaatttagtgtcttaaattaacatgattttggcctctttctgagaatattatagttaaacatcctctcaagtgcagtgcttatgtgttagcaatactagtgcccagcacacagcgggcaggcagttgcttgaaacattctgagtctattagacattgctgtatcccaagtgagagcaagtatcaaggagctactgagcactctgtagcacacagggaggagagatcagcattttctaagataccctaggggaggataaaatagtgcaatagttaagagcacaggcatgaggaacagacagaact

SEQ ID NO: 10119 - DNA, 6000 bp, Homo sapiens
caccactcccactaacatgctcacaagttcctccttctgtagttctcccaggtcttcccaaaactcactatatcactgtactgatttcatcaagaattcagaagaagacaatcttattaaagaaaatcatgaagacaataaatgaccagtgaacaccgtggacactggagcaaaactgggttcaggttccaattctactacctgtgggactttggccacatgacttgcaatgctcctgaacctcagtttcctcatctgtaagatgggaatactaattataactcctttcctaaaaggttgacgtgaggtgatttgaaccctgctttgagcacttagcaactacactatttaaattaactatcacaaagctgagggctacctacagtctgagggaaaatgtttctgaagagggacttcctgtgttacttaaactgaataacacaaagtgaagaaatgccttgagcctttttgtccaagtttctgtttacaatactggggattttttttttttttttttgagatgggctttcgctctgtcatccaagctggagtgcagtggcaatgacacagctcaatgtcttgggttcaagccatcctggcatctcagcctcctgagtagctgggacttacaggtatgcatcagcgtgcctggctatttttaaattttttttttttttttttttttttgtagagagaaggtcttgccacattgcctaggctggtttttacttcccgggctcaagcaatcctcctgccttggcctctgaaaatgctgggattacaggcatgagccactgcatccagccagatagtgggaattttatatcctcccccttcacaccttctggggggctaagaagtcggagtttgatattactgagaattccaaaataattcactcctaaaacatttcatcatacaaacaccagagggcaagaaaaatacaatttaccacatgcattctaggtaccaatccacatatattgcctcatttaaggcccatgacatccctgtaaattagatgtatcatccccaatttagaaaggaggaaactctaaggcttaagatttaaataacttgccccaaattatagagcagaataaggattttccaactttaaagctaaaactctggccagttacgccatgatgcttcgcttacaaggatcagaccttgacctatttcttgcaggctgttggcttctgtattatctaaaattatttttcacatatctgagaaatgctcttatttctcttactttacaaaattgaattcttaattctataattaaggatattcaggacattcaatgaagggtaattgtgaaatggacaggagaccttgaattgtacatgctggagatataaagctttagaactaataggaaaatagatgtctgaggttcttgattttccatttgttttccactgtttctaaactaaaccactgtttacaaagaatgtgtcagtgaaagatgcagtaaaagatgcttcttttcctttatttttagactcaagtaaatatttgttaacaatatggttgatatggtttggatctgtgtccctgcccaaatctcatgttgaatggtaatccccagtgttagaggtgggacctggtgggaggtgactggatcatgaggcagtttcttatgaatgctttagcaccattccctgatgctgtcctcatgagagtgagtgagttctcatgagatgtgtttgtttaaaagtgtatagcacctccccattcattttcttcctcctgcctacttccccttcactttctgctatgattgtaagtttcctgaggcctccccagaaactgatcccaccatgcttcctgtacagcctgcagaaccatgagccaattaaacattttttctttataaattacccagtctcaggttctttacagcaatgcaagaacagactaatacaatggtttacaaagtaagttgacgaagctgaaaaataagttcaagaagtcctatgaaataattaagatgagtaagattgcaaagacataattcattacagtgaagattctcatggccaattcattcttggttatggcttccaacttctactttaacagacaaatgcattcacttacccataggttcaaccaaccgtctgtccaacacatacttagtaaatagagacacactacatgctaggtactgttctaggtgctgagataaagcagaatgaaggttttgaggttgtaataatctaataaacaaatgaaaaaagcaagttgatttcagatgctgataggtgttgtgaatgaaatatactgaaaggatatagcatttatagtagaaaggctatctgaaatagggtaattagggaagatctttcttaacagagggcattggagttgagacctgaatgagaaagagctagctctttccaaagcagaaaaaagaactcccaggcatggaaagttctaacaattcaaaggtacaagatcaaaaagaaggcagatggctgagtccagagtggtggtatgaggcaaggtcagaaagatggataggatcctgtactactaaaaggagcttgattgaaggagtctgaattataatctaagtataatggaatcatttcaggttctaagcaggaggtaatatgatttgagacagctttaaaaacattaatccagatgcttgttcaagaattacttataggctggttgcggtggctcaagcctgtaatcccagcactttgggaggcctaggcaggaagactggccccaggagttcgagacgagcctgggcaatatagtgagacctcatctctacaaaagtaaaaaaaataaacaaataaattaataaaataatataaaatttgccaggtatagtggtgggcacccatagtcccagctactctggaagctgaggtgatggaatcacttgagtccatgaggttgcagtgcgccatgattgcaccaccgcactccagcctgggtgacagagtgagatcctgactcagaaaacaaaacagcaacaacaacaacaatagcaaaaacagaaaagaattacttataaaggggcaagagtgggaggggagggactagttagggtgcaaatgcagagactgaagataaaaagactctaaagactcataacaaatctctttaatggttaaagagagttcattgggggaaagaaagctgaatttattttaataatgtccccattttcggtaacatatatgctacaaagtcaattattttattgttatttggtcacaggtagagataacggtgtggctgtggattagcaattacatacacctccgttgcacatttaaaaaggcattttgttgttgctgcaagaaaccactatgcagggcttttggtcctccctaaaggagagaaacggtatctaggaaattaattcttctctcaggcccaaatgcaaaattgcagaaaccacttgctaaatatggtcagccatttttaagagtccagagagtcttttctcaggcgtactttattagaggccattgatcagtttctaccgattattatagttaattgaagggaaatctgcgactatggctatttattggcatttgcgttcggctcagacagaagctagttttgaaagtggtatccgtagagttatcccgcttgcacacttccttgcctaggggtggtgggggagcgctgagggcttgcggggtgtcagccaccagggctttctgctcatcagtcagcatcgtcagacatcctggaagtgttatgatggcgctgaatgtagaaaaagggttctcagggcggatatattgtcgtcattcctggtggcagaggggagtgacaagaggctcacacgtcgctgggtagtagcacgcataataaagtgtggtttgcaccatgtgtgccacagatttctcgggttttctggaaggcttttccaagttccgccttctcccctttaaagccatcctggccccagctatgcatcggcctttgactccatctgtccttccgctgcggacgggagtccctctcgccaaatggagaacacaagtttggcaccccaaagtgatgataacctctaccctcttggctcagcgcgagccaagagtcaggcctgcagagggacggtcaagcggatggagggggaggccgcggagaggccgctcctctcacctccccgcacccatcatcacttggcacttggccaagcccaggcagacgccccgcctgcgcgtcccccacccgccccgcggtgcacgtctcccagtgcttttgcatttgctcctcttccgccctgctgcagagcgcggctcgcaggttggagtttgccctcgtgtgcgccgcatcacacggcagggaggggaaggcaggcggcggaggctgggtcggagcaggagtcgcgcggtccctggcgcccggagacacagtggggaaccaccgccccgcccccggagcagcggacagggccgcagacctcccttcccccctccctctctccctcctccccagcgccctgactccctgcctccacgcccttactccaccccctactccggccagatccccatcctctccttgtgtgtgcgcgcttcatataatctcctcctttttggcaaaagaaataatgcacctgactttaccaggggggaacaaccagccgagtagaacaaggaacagatgtaaagggaataaaaggagagagaaaaagagatgagattcgtttaaagaaatccaggggcagaagaggtggctgccgcggcagaggcagctagagcttacttccctgtctgcgtgagctgcaggcagaggacgctttcaccagttgcagatgtaacctcgggaattcctgggccgtcggtttgtttgccaaacaaagtcttttcttctctggctcagacactgaagaggctcctggatttttctgcgatcctgccacaagctggcagttacccgagagccttcccaaggagctggaggagaaatgagcccttgtgggcggaagatgggcgaagggcgtcagcagcggcgggctccggtcgggaagctccttctgctccccgggaggagagatacaccccatgggcggtcaggcagcagcggcgccaggacgcagcgctccctgctctggctcttggtgcacgtgtggctgtgggcggcctcgggctcctctgcccagttgttcaacctcaccctttccgtagatgaggggcttcccccggacacgctggtaggtgacatccgcgccgggctgccggccgcgcagcagcaggaggggagcggcttctttctgtcggaggactccgatgactccccgctgctggacgacttccacgtgcacccggacaccggcatcatccgcactgcgcggcgcctggaccgcgagcggcgggaccactacagcttcgtcgccgccacgctgctgggcgctgtggtgcaggtggagattcgcgtcaacgacgtgaatgaccactcgccccgctttcccctcgactccctgcaactcgacgtctccgagctcagcccgccagggaccgccttccgcctgccagttgcccacgatccggacgccggactgttcagcactcagggctacaccctggtgcaaccgtccgacctgcccaaggaccccgcaggcccgttcttccagttgcgctaccggactccggggccactaccgtcaccgcttttgccaggctcctcgtcacccctggagcctctagatctggtgctgctgcggcgcttggaccgagaggaggcggcggcgcaccggctgcagatcgaggcatgggacggcggccgaccccggcgcaccggcctcctgagcgtggagctgcgcgtgctggatgagaacgacaacccgccggtctttgagcaggacgagtaccgcgccgcggtgcgcgaggacgcccagccgggcgccgaggtctgtcgcgtgcgcgccaccgaccgcgacctggggcccaatggcttcgtgcgctacagcgtccgcgcccggcaagtgcctggggcgggtagcggcgg

SEQ ID NO: 10120 - DNA, 6000 bp, Homo sapiens
ggacaggctgactcaaagcctggggttgaaacagctgggttggagaactattgccaaaaggagggacttgaaagttagggggtaaataccctatggcgtttaattatcccaaaaagaaggagtccgttgagactgagggtatgaggtaggaggctgggagaggggtggaatttcaaaatagcttctaaaaggagagagattggtaatcacccaagccaaggcatttctgggtaatatttaaggctcagtgaaggttttgaatttgtagttgcaataatctgcacagttgagctttaacctacatgctatgctagcggagagtggcagctaaacaatctcataagatcaggtgggtcatattataccattgaccatccttagatgtgtgtactctttctagatgtatttgtatctggggaaaggaagcaatagctagaccttaaacaaaggaatgaaaggaggatacttaccttagcaaaatgatgcctcagaacatttcgtgccatttttgcatgcacctgcttgtgctattatgtaggtgtacaaaaaaaaaacactttctcctatttatttgtttatttatttagagatgcagtatcactctgttgcccaggctggaatgcagtggtgcaatctcagctcactgcaacctctgcctcccagattcaagtgattctcctgcttcagcctcccgagtagctggaattacaggcacatgccaccatgcctggctgatttttatatttttagtagagacagggtttcaccttgttggccaggctggtctcgaactcctgacctcaggtgatccacccgccttgacctcccaaagtgctgagattacaggcatgagccactgcacccagtctttctcctttctttagaaaaaattataccttcatagcttttcttcataggcaaagtctgatctattgacattggccatctgaagtgttgtgctgtgagaaagtctaataccaagcttgagattttggggagcgggagtcaggggcaagacgaccaagtagagatgtttgtcacagatgatgagagctgttgtggtggcattcatacttattctttttgccagctatttttattttgtctcttcaaaagaatatatgaagggaatagtaataataattattaaaaacagtaatagtaacagtggcaaagctcctttcattatatcatatagtaaaaacataatgttatggttttgtaatataacattacacttttttttgaatgtctaaagggtatctgaaagtataaggcatgcagaaaaagatttggctatttactaaattttaagatcctacttgtctagagccttattgtgacagagtttttaaaaatgccccgaaatatgcagcccatgtaacaaaatgagaactttactgaaaggcattcacatttcaaatcaagatcaagagaaaatccacaaatagtattgtgtgttttctgcacaaaggagatcattgaattgtctgtgcacttgtatactcacatttttaactaaattaatcatcactttttttctgctagttaatgctctccaaaagtcagatgaataaaatgattgtactgactatttgattgtgctgattaagtcaaaactctttaccaactatatttcattggctttaaaatgtgggcttaaaaagcattttaatattttaatattcatttgctattgatggtatgccattgctttactgaaagcatttttttcttggtggtccataaaataaaattgtgctttacattcttgggcgtcaaagatccaaagaaatgcagcaggtaagtcacagaaagaaggaaaatcctgacacaaaatcaattcatagaatatgaactgattcactgacgtgcttcatcatagttctacccccatggaattacccccttatcaatgtcatatacatttcagttttctcgtgtagtattaatgcctattaagtttcttctgagtgacaattcatggtaatttacctgtatcaaggcctgatagcatttcagaaactttaactcttgtagcagaaattcctcagaagactagtaattagtgtgtttcaattccagtagcaagcatactgtcacacttttatttaagcagttactgaatcatggaatttaaaggctgagccaggccataagtttgttccattgtttagaatacaaaacttagatttacagaaatttaatgagtagatcctatccctcagtttatatcacagagcaagactgttgttcaagagagcatgagattaggtcattaacataattccccttggtttataggtcaggctgttatgaaactacagaaagaaatacacagaaataaagaaaaaattctccctagcaaagatgaagttttatctagtttgaatcccagataggaaagtaggcagctgattattcactgaagagtagaaaaatatatgatcttaaaattggaatgaggaaactctttaataagtattttctaagaaattcaaactactttgcatattttaaatcttctataagattacattattggagaattttatgttgtgtttggccattggaccatgtctaatttctctatttttcacattggaaagaatcctagtaaatggtattcctaaagaattatataattttgctgttgagcatttctttttttttttttttttttttccaaaacagagtcttgctctgttgcccaggctggagtgcagtcgtgcgatctcggctcactgcaacctctgcctcttgggttcaagcagttctcctgcctcagcctcctgagtagctgggattacagatgcgcaccaccacacctggctaatttttgtatttttagtagagacggggtttcactatgttggccagcctggtctcgaactcctgacctcatgatccacctgcctaggcctccaaaagtgctgggattacaggcgtgagccaccgcccccagccactgttgagtatttcagaacttctctttgtatcataaagttgtcatagaaaagagtccttgagaccaatgatctttcaaagattggtatctgacattaataactcaagaatgcagtttcacaaattttccttagggagaacacttcataaaaattgagttaataaaatgataaaatacaatggccataatagttcagaactctggcagacatgcctttattagtattcttgggaaatagagaaagcatagtacctgagtccaaattatattctcaagtccaaaatatttgctgacataataatagtttctacataaaaatatattcttagtagagaattaaattacttcatttgtaattcttatagcaggctaaagatagccaatttgatgatcaaaaccatggggaaaacttccttctaagaacagaatgtgacttaaggcaatagagtagacagaggatgcatagaaacctgaatgaatattagttattcttccctgaaagagttgaaattcctaaattgtgccttggtaaaaattattgtgccttggttaaaaaaaaaagtatgtgtgtgtatatgtgtgtgtgtgtataaatgaatctgttgtcattttactctgcttaaccattagagatttttatatgtatgcttatatctgttgttatacactaatagtacaatcattacataatcatgacattttaattcttaattacaatgcctttccaactatataaaaatatgtctagtgacacatattttggaaagctttcttggaaaaacatccagagattgtgttcatcactatctatataaatgagcttatactgaaccttaaatatgtttattcagcctaacaatcagaaaaagaaaacgttttttaacagtataaagttcagatgagtccacttgtcttggaattttattttgattttaattagaagaaagactgccattagaattgttttctaatgaaatctttataaattctctgggcagtgccctgtatctttattagaaagacttcttatttttaacaattttatttggaagaagttctactcatttgcatcagttcatcgtctacataatttgtgtgtgtgtgtgtgtatgtgtgtgtttacaactttgacttttgaaactagaatagaatcaggtaaaacatctaagatcagtgtgccagtaattggcctgaatcatcgggcaccatgatgggtttggccgccttcaacgtactcggtgtacattctatttttttcttcataatgttcagtactgtagtactaatcaccgagaaaattgcattgacgcttttcgaccaccagggaaatattcagctcatggttctcccctaaaaaaactaaaaagcagctaagcgctgggaacaaatctgacttaatgcattttctcagtgggccaaagaaaggagggccgattgactgctttgactttttaaaggtcttctctttgttcacttataaagtgaggaaaacaaattctcggcactggcgtgagagttatttgagcgtcacaaaagaaagcaaaagaaaatattagtgccattattgtggcgaatttcatgtttcccagcgagccctttgattcctggtttgggctggcgctcgagctctccagccgggtatgacttcggccacaagatggcactgacctgcaaacaaagaaaagcacagtggcaccgactttttcaagcctcgggaaactgccctgccttccccggagtcgaggactgtggggattagggcttcctttcccctgcgcgggaggtctgtgtcgaataatgtgtggcttctgttggattgcttttctttccaaaattcctaggcaatgcttccccgaggtgtgcacctttgtgaggtgtttgtggggttgggggagcttcaggcgctactcgcgggacgccgtcacgtgatccgggatgaggtggagttcggctttaaggaggcgtctcttcctagcttcatcaatctttaggatctgagcaggagaaataccagcggatcttccccactctgctcccttccattcccacccttccttctttaataagcaggagcgaaaaagacaaattccaaagagggtaagttgcgagtttatgcctttccagagacttctgcgaaatctctcattgacaaggtgaaggatgagaggggaagaaaaacgatgcgagtgtccgaaactggctctgggggaccaaggtggggtctccagtgcaggcaggtcgcaggttgctccaaatcaccggaccgttcgcgggctcctgccgaagggtatggggacgacgcgggtgaaaggagagggtaccctacgcggagttcgggctttcccaccacctgctcccggggaatttctggatggggatccaagttttcctttaccccggttctctttaaaaggccgaggcactgggaaggcgcccgagttcgcctatcccacacccgctcattttccttacgtgtcttgagctggctggaggcgctggctctggccgcaccggagttttcgcggagtaactggctgggatgagccggagaagggtgggcttggcgcgtcgcccagcgtcgcacgggtcccgcggcaggtgtcgggctgggagctggcggaggtgggagtagccctcggcgcggaccccagcgcgcaagcccacccccacttgcgggttccgcgcttctcggctgcaatcgagccgcgctccgcagtaccgggcgcttcgagtgtggcgctgcgccccgatagacacccgaagcttttaatcatcggagttctaatcagggaactctttagctctttcttttagaaaagtaatgatggaacgtggctgggttaggagattgggaatggacaggaggtggaggtgtcttgatagggtgtgccattggttcccaggtagactggagagataagaatgttttaaggtctgatgttgggccaaagagagagaattgacttcggtttgggatctgcttggttttggttgtttatatcttttctcttttgccagtctcttatcactgg

SEQ ID NO: 10121 - DNA, 6000 bp, Homo sapiens
gagtccaaacccagaatgaggaaggggaatattttcctaatactgtattgactcagccttttcaagaggccttgctctcctcaaccagcaaatcacaagactagagagaagtactgggtttctttcattcttcccctaaccctccttctaattgtgctgtttcaaactcccaggaataagggatagcctaatgtaggtagcatcatacacctcttattgtcctcttccaggaagagtgtgaggtcaaaacctccaatgctccactcactctctgttggaggggttagaatatagaaaggagaaactggagagtaccattgggcctgcatcgattacaaagcaaaatctctatgttgttcaacaagtgcaaaaacaagcagctactttactgggttactctcctatgttctccagaccctctaatataagccaaggctatgtaagaagcacagatattaacaacacttttattaatgggcagatacctctcccacccacatagatctctctgccaaagaaaacccaatacaggggctacttgaagtttttgaccaagagttattatttttccttttatccatgtgacttagaactgtttctcacatagagtgtgcagagtcaccaggaggacttgttaaaaatcactgcctcttggactactctatccagaggtctggaatggaaacttcatccaccaggtgatcctgaagctggtgatcagttcgcccatagttagtaccaggtgcccccagcagacattatgagctgatagaactgtaaaaaattatgctaattccaaaaaggctagtctgccctcctggggtgccatgctttcaacagaaaaaaataaactaaatctattctaaggagtaaccacataattagaaggttattaccacgttgtggaaagaaataaatacagtgataaagaacaatggaatttgtgggttaattagtaatacagtgctgggcttcatgcagttacagaccaataaaacaaggacatcagactggttcacaaaatacttcctgatttctgaagctgaagaaaattcattgggcttaaggaggtcaaatctgagagctcaattatcttagtctcctaacttattgttaggagcataaccattcagcaggttgcatatgatgtgactgttctggcattttttctttgcaatctgtttataattctcagcaacattttttttaaattaataaactttaaacattatatcagtccatatgttaagtatttatttattaagtaaaattctattgaagactaagaacgaagacacaaagatggctgagacacagcccttgcgatcaggttgcctacagtgtagcggaggagatgaaagaaaaatcaatcaaggttaggtgtcaaatgaaaacaggtgaagtactcaagaggcattcaccttgggaagatcagaggacatcctgcctgaactggatctccaaggctcaacagtttgtcaggtgaagaaaggagaaagagagacaaaagaactaacagatatatggaggtgtgaattcacacggcaggtaatttggactggtgaggatatgggatattaggggacacaggctggagactaatctggaaaggaaggcagcagccagttcatgcttaaagtttggaccttatcctgaaggcattatgaattcacttaaggatctttagcagacatattgtaatacaattggcttaaaaagaaaagtctgaggagctatggaggatggattggaggggacacagagagaggatccatctaggagtctgttgctctgtggttgatcaggaagatgatggggactggagtaagacaggcaatgaggcaaggaagggaggtgttcagaaatgaataaggacaggatagataatgccaggagaccagctggatgacacgggaaaggcagatgaatgaatctagggtaacgcccagattcatcatgtaagtgactgagaagatacgggtacccgctaaccaagctagtaaatacaagcagaagagcaattgcaggtcatcctgtttcttctcatcctcctcctccagattctcatcctttgcaccgccccattgtaggtgttctgtggtctcttcttcctgagagctgtcatcctctctgatgattgccgctgtcaaaggggtgttagctggtatgttctcacatggccatgcgaggtgttcatttctggaatcctttctggttgatcaggcagttgttctgataggtcagcgtcttccctttatccatactatttgtgtgtgtgtgtgtgtatatatatatatttattatttttgagatggagtctgactctgttgctcaggctgaagtgcagtggcgcaatctctgctcactacaacgtctgcctcccagattcaagcgcttctcttgcctcagcctcccaagtagctgggactacaggcacacaccactatgcctggctaattgttttgtatttttagtagagactaaaaatctctgtgaaagatttttgaaagattaatgtcatgacagactcaggaacagaaagcttcagatggatggaagtggcagtacagactgttgaaaagacatcttgtccacctttgtaaggctagactatttgtggtgtggatgtcaaggggtacctgggcaagttcaagggcactgctcagggcataccagcaacaatggattctcaaagcacaggaggaggatgaaggggacactccagcacaagctaggattccatggtggaagcagctaagtaaatgtattcttccaggagtgaccttccatagagatagtgtctctgaccacgctgaagctgaactggagctgggcaaggcagagaggttcaaatgaagggtgactcccactatcacaccaagccccactgggcagctgacctgcctgcccatcctcctcctccttagacagaaaacagcgaattccattcgcctttctgctctcaatgaaaggctctctttgggttctttactaatctacaatctgtaaaagtactttccctgtgacttttctccatttcagtactgtcttctctaaatgagaattaaaagcaagttccccacaccgacctcaagtggtttctaagatagcaagagtgcattttgcaggttgtctgagaatttaaaagagatgggggaggggaggaaatagagtcagagtgaatgcagaaatgctggagaagaaaacgggatataatactgcggaatattttaatagtggggacacaaatgtcataattaataaagcaggtggaaagttcgcgctgtggtgcaattgtaaagaatgcttattaaatacttaaaaacaaagaaaatttacgtttctcaaaaggacagctgaaaaattccttgagctaaaatgtgttgctattcaagatgccataaaactaatgttaaaatatgatatctcatttcaatctttttgggggaaaaaatcaggctttgactcactcatacgacagatcccacgcacccacccaccaacatggcccttggcatgggcgacctgcccacgtgtcgatgcaatcgtgcctctctagagccctgcttccatccgtttcccgagcttcgatgtcgtgacgagagaccgcggctacatcaaccttgggcaaccagatgcagccgcgtgcggcagcctggcactgcccggagcatgctcagtcgggtcctgacccacttctgcaggtccgacctcggggcgtggggtcagaggcactactttgccagtttgccaggaacagagaggagcagagagactgagagttgctaaagctcctctcttggcacagcaatgcctgacccggcggcggaacatgcccagtctggctgccggagccgccgggagcgtcaatgtggaaagtccacctttccgggttttcgcagcaacccaccgggaagagggcggtacgggagtaaaaaggccggagtggggtgtggccaagagggcgggcactaaaaagccgggggaaggagcctggtcccgccccagaaattgagagtctctgttctcttttaaaattaaaaaaaaaaaaaaaaaaagggagataaggaggagaagaagccactaacattgcaggatcgtgtagcgaaacttctgtaggtacttaataattttagagtactctactttttaattaaaaaatcaacttatggttcattagaaaaaacgtggaaattacaaataatatttttaaagaaaatgaaaaaaaaattcctggaaccccaccactcagaaagtcaccagggaacggcccgctgggtttttttccagactcttccatctgtggactttgctttaagagacgtttaagacttacagcgcagtcgcccgggaaggcctgagaagctttcggaagcaaggtggtttgctcgtgattgcatttgattgcaaggagacagggtaggcttgggggtgggttgactggttcccatttagcgccccaggatgggaccctaagaagccttttcctgggtgtccttgaacacgcgtgcgatgcgacgcccacagaagttgcggtggaagccccgggcgggagagagagcggagtgagagtcccgcgctgccgcggaggccctgggcctgcgggtgtggggctctgggggccgccgaggcccggcccagaggctgagcggactgaatgcgggactccccggcaactacagcctccggtggctcctccgcggggccgctccgcagcaccgactggctcgcgccgcaccgcccgccccgctgcccccgcccgcggctgccgcgaaaacccggcggctacacccgcgcctccgcgccgcccggcgagccgcactgggcatgctcggccccggccggcccaggctcctgtaggtgggaagctccgcgctcccggcagccggcggcgcagctcgcaacgctgtgaggcgccggcggaggcggctcgcccgcagtaggcgctaccgggcgtccggcgcagagtgcggcgcagcggccgctgtcgggctggccatggcgaggggtgcacggcggccacctgagtggcgcggcggtgtcaggttagcgggggcccccggcgggccggggcggaggggcacgggtgggagccagccccgcaccgggtcggcggccgagtcggcgccggggccgccgaactttcgggtgtttgggctggctgagactgcggcggaggctgcgctgcgagacgccgcagggtccgggcagcgggctccagggggtcgcaggatgcttcgagatccgtgcggggcgggggctggccgtttggggactgccgcatcctgggctcgaaccgtaaccttccgagggcgaggagcgcggaatccactgccagctgccggcgagcctcctaggtgtcgtgggggaaggggacgccgaacagccgtgggggctttcgctgggctctggatctctctcatcgctgtgcctcagtttacccggacagggaggagcgtgcgctggccagggctccggagaacgtgaatgcgggttccgcgtcgggagggcgccgtgtcctgatgccgcaggagtgcgggcggctgtgggtgctgcgagccgccgcctcgctactgaagctctcggagtttgtcgcatttgactccataacaagttgacatcgaattgcttcatggcgtggaatggggaaacgtgcttcatcggattaaaatacagagtgattgcagaaccgatttattttaagcttgatcattaagctgtcttctccagccctgaaaaaaaaacttgcaagctttataaagcaaggtagcaaaaaaaggtttgtaggtgtattatctgctcacattgtagaaaacagttaagatacgatcgaactgtcattatttttaaggatacttagcagaaaagtttggttactgtggcaatctttattttgcgttatcttcgatttaatgttaaaaacttggaaaccgagcattgcagaagctcagtgttttttgtagttttctcacttttgtttctagatgaaacacatttttt

SEQ ID NO: 10122 - DNA, 6000 bp, Homo sapiens
ggcgggcggatcacgaagtcaggagatcgagaccatcctggctaccacggtgaaaccccatctctactacaaatacaaaaaaaattagccgggcgtggtggcggggtgtagtcccagctcctcgggaggctgaggcaggagaatggcgtgaacccgggaggcggagcttgcagtgagccgagaccgcgccgctgcactccagcctgggctttgagcgagactccgtctcaaaaaaaaaataaaaataaaaaaaagaaaagaaaatgttatgaaagtcagtttctgacttggagcttaaagcagcagacaaaggggtcctttttctctgtcaaaatataagaagatcccaactaagacatttcattctagagataatgttaattctgtgtctgaaacatttgacgtagaataaaaggcagtttctaaaccgtgttcctgcctgttagtcctatgcactgggctaggttttcatgatcttcttttccacatctcctctctgttctctgacccagggactacgaacatttttccccctcactttttatagttaatgcgatatttggaaccacaacttctttaatctgttaactctccttacttgtctatattatgaacattgtatcacaaagatgactgcattacataatagaggaatatgtcgatatttacttattgtatataataatgtgtttatccataaagacaagatgaagtgttaaaggaagctccaaattaagattaagaaaaatgaaagagaattataatggttttggattgagtgagctcacataagaaaaaagtaatatacattataaacatttcttagacagtatttgaaagggaaatctgacttgataaaaatataatcatatttttaaccacctagttaacttatatttgttttattttattttttagaggcagggtcctaccctgtggcccaggctgcagtgcggtgatgtgagcatagctcactgcagcctcaacctcccgggctcccgtgattcccctgcctcagcctccccagtagctgggactataggtgtgcaccaccatggttggataatttgtttttttaaagtgtctgtaatggccaggtgtggtggctcacgcctgtaatcccagcactttgggaggccgaggtaggcggatcacctgaggttgggagttcgagaccagcctgaccaacatggagaaaccccgtctctgctaaaaatacaaaattaactgggcatggtgacacatgcctgtaatcctcgatacttgggaggctgaggcaggagaatcgcttgaatccgggaggcagaggttctagtgagctgagatcatgccattgcactccagcctggtcaacaagagcaaaactccatctcaaaaaaaaaaaaaaaagaaaagaaaaagagtagaaaatatttgtagtgatgaggactgtctatgttgcctaggctggtctcaaactcctggcctcaaaatgtgttttgattacaggcatgagccactgcctacagcccatatattttaaataaatgactaagagtagaatggggcaaatacaatacgatacaatggaaagagtattagatgaggcatttcagtccccataaggacacatcattgctagttattaagctttatatagtatattttataattaataaagcaaatctactataatgtgaaacgattttcttttctaactagtttaagatactggaggttcaaaatatttttacttccaatgagatccaaattttaaaaaataatcttaaaaccaccattagcaacaacaacttggctgggcttggtggctcacgcctgtaatcccagcactctgggaggccgaggtgggtggatcacctgaggtcaggaatttgacaccagcctggccaacatggtgaaaccaacccggtctccactaaaaatacaaaaactaactgggtgtggtggtgcatgcctgaaatcccagctactcgggaggctgaggcaggagaattgctcaaaccctggaggcagaagttgcagtgagctgagatcatgccactgcactctggcctgggcaaaagaacgagactccatctcaaaaaaaaaagagaaaatcatcaacaactcaactgccatcaaacaggaggaaggggaaaggaggagtgcgtttttaatgggcacagagtttcagtttgtggagatgaaaaagtcctggagatagctggtggccatggttacagaatgatgtgaatgtacctaatgccactgaactacagatttaaaaatgatcaaaatggcaaatttttcttttatattttaccccaataaatactgaaagcctactgacaggtgattgctgtgaggaggctatgtatgtgtatgcatctctcttaattcatttgacgagtccatttggactggctctgaggacttttttgtatattttaaaaattggtacaagttgatgttgacttatgttggtaacaattgtcacatgaaaaagcctgttttagacaaaaagtgaatggttatatgagtgtattctgctgcaaaatttccagaagaaaaagaaatcatgaatatttttaaaatttcctttccctctcatttccctcttttgctttatatgtgtggtgaaaaagaaagctatgaactgaggctgatttctgaagatgctgaagatactcataaaggaacagagtaggaaggaaaattagcttctaagatcagaacattaggcaagaaatcaacagacatgggttctaagacttacttggtgatttattagcccagtctctaggtgtccctgagcatccgtgttttttgttttttgttttcatcataaagtggggaaaattatgcttttcccatttgacttacaacgggttaatgtatgtaatcatgttttatagattgtaaagtgttctaaaaatttaaggtgacattattgtatctactggcactacaataaacaattgctttcactaatgatttccatggtataaaacgaatgaaggatctaaatgaggagcgttgctccgttctgtgttgattatatgccaggttatgtcagcctagggatgagttgaagcagagaggctgctacaatttggctttttgatttcccttatggtttctctctctcaatctgtgcactgagcaagcagctctctcaaaaacccttgaatacacattgatatatattccaaagagataggttttgagttatttgaactccagttatttttggacaaaattcatttgaaaagagaaaataataacaaatgattatacaagtaagaggactaaacattcatttatgagaaataaagtggaatgcagtaattgtgtttcctctaaatagctgcttttgtaatatttagagggtgatgtgcagcatgctactggcctgctttaaagaatgcatgtgaaatacaagctataatgcaagaaacgtatgctatggataatgaggatgtgagctatttttcattaaaggcagagagttacagttatgtctgtgtgtgtgtccttgtgtgtgtgtgtgcctctccgtgtgtgtgcttgtgtgtgtctttctgtccctctgtgtgtgtttctgtccctgtgtgtgtgtgtgctggctgatttggagatgaagacagaggcaaggatcctttctttctactctaggaaaggtttatgctccttgaaagagatactgtttattttcttgctataccttttgtgaagtattgagactcttggactgtgccctgtcactcagtaggctgaagtacaaatgctaattatcgccagactgcagcattgtgatttgcattccaaatcagcttgcagattcccattataaattgctatcctcttgtttcttatctaaaatttgttcctcccttacatcactcttctcattccctaacactgacctttaaagaaattccctttcaagagattctcattggaaaccagcagctttcgtgggctataatcataacaataaataacaaagacatcaatagggtttttccttccagtggttttctcccttttacttaagagtcatatggcactaagtaaaataattacttaaaacatgtatctctcaggcttagagctttatactcactcctttgacagccacgcttctatttctttttaaatctcaaaggtgtgggattacaagtcctgtcttagtaataaacttttgcagataaaccctgagatggtataactgcatcctttcttggcaccttaaatcaaattaactaaatacttagtgaggagagaaaaggaaaacacagtttttttgcaacgtatctgactgggtgagaagccactgctgcagcataaagaaccgacgggaatctgggctttcccactctggaatgaaggggggaattacgggttggtggtcggcttcatgttaggaggacacccctccatctgttcacagctcagcctgtttccaatttaaagcccagatttcaatacaaacctcaatttcttttccccattttaaatgcaaagcaagacttgtgaatcatagtgtctctgctcctgggattcagaccaaatttccccccaaaattctcaggctatttgtttgaatacctgcttacagtggtacacaatgggcagctttgagaagaaaaattgataatcttcacggaagagtaatttgaatgaaattacacttgacagcctgtctccaagcaaacaagaggaacgagggagcctgagctaagctctgaggacttgcccaagccactgctgttggagcttcccaggaaaaaaaaaaaaaaaaaaaaaaaaaaaaaaaaaaaaaaacccccagtttttccaacatctaattgagcttttgattaattccgtgtaccagattctactgaagaaaggtagccatggaagagaatatggaagagggacagacacaaaaaggtactgtgctaaaagcgtttatttgtaactaagtaattattttgcagtttccttgtttgctttagacacttgccagtaaggctaatgaatgtttctctcttggaaggcattttgttccttcctctcctttagtctgttcctcacttgcagtaatgtctggcacgaatgttgtcattatttgcaaatctttcagatataagtaccgaaatgcagagtcgagtattagtgagaagagcattgcggtattgtagtgaactattccttagaccagtctttgttaaccttcatttatttcgtgatttcacacttgccgagctgggtcaagggatccctagtgtgagccacaaatacaatatttggagttagttaaaaatttggtgatggaaccattatccatatctttgcatggacatctgatagaacaaagaccaagaccattaattatcttttgattggtgcacctttttaaaacaatctttaaaaaataaaaactaaaaacgaggatgcaatataggtttaagcagatggagcaaaagttcataaattttcagggtgtatggaagcgttaagattttcctttctatatagttgactgtaatcaacttctgagtaataatgttaaaggaaatttttttatgtgtttttaaagcttgtctaggtatatctggctgtatgagttaaagtgaaatttccatttttgaaggttgaaatggtcaaatattggtaatttggaatgattcaatcaactcgagaattgttttaacgtgtcaaatggtagcttcagagggagctagctttcaccccagataggcagcgtttctctcgtctgctgtcgggcttatgtaatgtcagagaaaatggtctcattttcttagtactgaagcagtaacacaggtaatactacataaaggtaatattcaagagtagtgttgaaaaagattcagctgtcaaagttaatttcaaatgtatataaaggcacttatcgtaaaaaactgtattttatgtgataaaatatatagggtggaagcacagtatagttaccatatttttagccatttagctatgctgggtttcttctcttaa

SEQ ID NO: 10123 - DNA, 6000 bp, Homo sapiens
ttggcaatttttctatacatcaaaaactgttttataaagtttatttaaaatgtcgcatgaagaaaacattcattagtacacagcccaaaacacaggaaaaaaacttattagagtggtaggaaaaaagaattaataaaatttttaggtgatttttttctggattttgtgaaatttatgattgcaattatgtgggcaacattttttcccttccctactgccggaggccctagaaagcccaaacttttaaaatttgtagtttactgtgatttctgttctaattctaaaggaaacattcacttttgtatccaactttgtatttgtaattttcttatagaggttccctaaactgtgtaagtttaaggctccaaacgtggatctacccttggttgacatcgagtagttagaaaaatgtgtccaactcaacaattgaatacctactctgtgtaaatgaagaggacgtgcaggggagtaagaaagactgggatggttcatgaggattcacgggacacactgcctccttccagtcccttacagtttcatgggggcatggatgtatgcctaatatagttgcagtcccaaaatggattgaacaaaaagaactcagttactgatgccaatcttcctttaaccagccaattaccgaggtctgtaattaaaagctcatcggccattattaattgatgtggctatacttcagatagccatgctcaaaagcaataggtgcagaagattaataataatcacagctttgtagttcctaatcacaagtgggaacttttgagacaaggccactgtaaacctgctaatcagcttgacccagaaagacttcgattctttttttcttttctttctttcttttttttttttgatgtggtcttgctctgttgcccatgccaaagtgcaatggtgcaatcacggttcactgcagtctcgacctcctgggttcaagagatcctcccacctcagcctcccatgtagctgggactataggctacaggtgcacaccaccatgctgggctaagttttgtattttttgtagagacaggatctcgccatgttgctcacactggtctcaaactcctgggctgaagtgatccgccgaccttggcctcccaacatgctgggattacaggcatgtgccactgcacccggcccagttctctttagcttctccaggagattgatcaatcggtgttaggcagatgtcaatgtggatttagccagaattagccacaacattttaatcaggccaaaatgtaacaagggcaggagtgaccgaaaaaagactcaaatttccgctaggaaatttgcaccactacaatatccaattggctcttattcccttggctagagagatgcttgaaaaaaaagacagtagaaaggagggttaagactggtttcttaaagaagtaagtacaaggaagtataagttcatgctgcctgcttctaaaagaattctattcctcataactacataacattataatgctactgattcataaggagtttagattaattctattggagaggacaccaggattattagtgtttattttcatctaggatctttattctttaatgctgttggtcccacagacacatttcagtatacaaaaacactgcagtgttaatagccaaaagaaaagccattatgatgtgaatagtggtcattgtgatcactgtgacacaatttttaaaaactttttcttagagacggagggtctcactatgttgctcaggctggtcttgaattcccggactcaagcaatcctcctgcatttgcctcccaaagtgctgggattacaggtgtgagccaccgcacctggcccaatttttaaaaacaatcatgtccttcatttaaaaaaaaaaaaaaaaaaaaggccgggcgcggtggctcacgcctgtaatcccagcactttgggaggccaaggcgggtggatcacgaagtcaggagatcgagaccatcctggctaacacaatgaaaccccatctctactaaaaatacaaaaaactagccgggtgtggtggtgggtgcctgtggtcccagctacttgggaggctgaggcaggaaaatggcatgaacccaggaggtagagattgcagtgagccgagatcgcaccactgcaccccagcctgggcaacagagtgagactccgtctcaaaaaaagagactggtttcttacctaagtcacaaactcccaactatagagtctggaatcttcatttaatgagaacgccaagggcgtggctgtcaatcctatgacacctgtctgaggtaggtattattcctgatttaaggaggatgcaatgaggcttgatgtggattcacccaccccaaagcctgtgttcttaaccactatgcaatactgcctcccatcaaagtctctatctcaagtccacaagacaaccccatacattgtaaaactttttggagtgattagataaaaacttttttgtttttttttaagtgtgtgtgctgaaagagacctaagagattatttagccaagcccccttatagcctgaggagaaatctaggttctaaggaatgaagttgcttcccaatgtcacctagaagttcctgccagaaggagtgtgaactcaggtctgatactgggttgtgtgcctttcccagccttgagttggaaatcacctcattaagggctagagcccagggagaggcacccagtttaaaagaaaagtgtcttgaggagaagacgtaaggtgagacagccagtgacgaccatccacatgttacgggttgaattgtcacccccacattccccaagttcatatgttcaggggtttgttgttgttgttgttgttgttttgagacagagtcttgctctgtctcccaggctggaatgcagtggcgtgatcttggctcattgcaacctccacctccctgggttcaaacaattcttctgcctcagcctcccgagtagctgggactacaggtacgcaccaccatgccccgctaatttttttatttttagtagagacagggtttcaccatgttggccaggctggtcttgaactcctgacctcagttgatctgcctgcctcggcctcccaaagtgctgggattacaggcatgaaccaccgtgcctgggcattcaggtatcttagaatgggaccttacttggacattacctcatgattacagaggtcatcaagttaaaatgaggcaattcgggtgggccctagtccagtatgactggtgtccttatagaaagaagggatttgcacacacacaccacagggaagatggtgtgaggagacatagggagaagatgggcatctgcaagtcagagtggccgggcacacatgctctttcatgggcctcggaagcagccagccctcccacgccgtgattttgtacttctagtctccagaaccaggacagaccatacatttcggttgttgaagccacttagtgtgtggtacttcgttccagcagcccttgaaaacaatagaccacagaacttgggaggtgcctgcagaggttctggggctgagggaccggttggagaagaggaaaaaggagaggcaaagatgacaaaatcacggatggggaggcgagatctggacagaaaaaccagggattagccaagcgggaaccagtgaaaacgaacgtggagtccattttttctagatctggaagatggagatctaaaaggactgagctgctagagaggttgctggtgtgtgcgttgtcctcaccccactgcaccactgcgcccagcacactgtgggagacacccagggaaagtccttcagttatttgtgggagtgaactgcagtgtggctgaggcctggagcgaaccacggtcagtttcccctgcctgcagcccaggcatagccctgcgttggttgtgcccacactctgggggcagcctgagtgccaagtgtggtactgctctcactagcatttaacctctgtgccccagcttcctcttctgtgaaaggacagtaatgacagtacctacctcactgggttatgaagattaaatagaataatgtgtacgcagtgtttgtagcaatgcctggcatcaagcactgggtaaacagtatctattattatcaaaggcctttacgacaacaatcattcttcaaacggccctccagcgaacgctgggcgcaaactccacggtaacggggaccaatgttgttagaggttgaggttcctggtaggtcccaggtgctaaaaggaagagcagcctttgggatgtgagcccgaaaaccatcgtgttggcttctgaagccccaagatgggcatggcagggacgcggaagccctcagaaccgcggaagccctcagaaccgcacagcaggtggccgccgtggtgcagcgcgcagtcggccctcagctcccctgcaccggcgcgagctgcgggcgctgcccacgtcaggctctgcagacaccagacagaaaaggtcttccggccagggagcgtgggggaaaccctgtggggccgcgcccgtcagtgtcaaggaaaaacggagaggaaggcccttgcctccagggccctcgcagcagaattctgcccggcctgccaggaggccagcggggcacgggctgagggtgcaggatccggagggcgccgcccgcccctcgggcatcgcggggcccagggtccgcggggcctctgagctgaggcggtccaatgtaccctttgtccttcctcagattcattatgaaatccgaggcagtctgggcgactccagcggcgttcgcccgccgcagcctctcgaccgccggccacccgccagccacgcgcgcccagacaggagggcggccgggcgctcggcggggcggggcctgccgggggcggggcctgcgggcggggcggggccgcgggagggcggggccggcgcggcgagcgcaccagcagcatcctggctcagccgcggcggtggcgggggcgcaaccagcgggccgaggcggcggcgccagcggcgccttaaatagcatccagagccggcgcggggcagggagtgggctgcagtgacagccggcggcggagcggccggtccacggaggaggtgagtgcgcccgccgtgcggagccgcgcctgctcccgcggcggtgcccgggccccggccgaggcgccggctgacgttgcccttcagggccgagcccggagcagcggccgccgcggaggcgcgtgagccaccccaggctcgtggggccgcgccgcctttccggcctcctgcccgcggccccgcttccctcggcagccggaggcctccggggtgcccgtgctgccgcagcttcctgtgtctgagtcgcgggcggcgcgggcgcggggctggtgcgcggccggggatgcgcgcgggaccgacccttgtgtgtgcggcggcggggaccggcccggcgaagcagccggaggccgcgcttcggctgggaggaggtggcccagctgggccgctgacgttgccctcgtccgcggcccccgcctgcccagaggccgggctcgcgggcgttcggaccgcgcgtggggcgagactgcactcgcgcccgctgagatgccggccccacgcagcgcggcggcacgaggcccacaggcagctcagaggccgctgccagaggcagacattctctcggtgactccagaggagtgcccgtggcccttgcacttggccgtggagtcattgatctaaggagtgctggcattttttgaaattgagaagcaaagatgatgtctgtcacctggcagcgtagacggagagtggcggtagatgacttgaatggacacgtggattcgagtctggggacaggcgttcccccagtcggtgcgttgtgagagtgtggaaaccccttccccactcagtccaatttcaaggttatggagcataattaagagtgaccattctaaaagcgttctctagtgccctggctaagacttttaagcttcttggtgcaggagtgtctaaagtcccgcgactctcactgccctgtcttttattttcttgacctttgattagcgttgagagaaactg

SEQ ID NO: 10124 - DNA, 6000 bp, Homo sapiens
catgtcgaattgtaatccccagtgttggaggtggtcttggagggaggtcattggatcatggaggtggatttctccctttggttttgttattgtgatagagttgtcacaagatctggttgtttataagtgtgtagcacctccctcctctctctcttcctcttgctctggccatgtaagatattcctgcttcctttcgctttccaccctgattgtaagtctcccaagacttacctagaagtcgagcagaagcagccatgcctcctgtacagcctgtgaaaccgtgagccaattcaacctcttttccttataaattactcggtcttgggtatttcatccaccatgggattacacaacgagaaggctttcacaaggtgcagccccttgatcttggattgcccagcctccagagctgtaagaaatacattccttttctttgtaaattacccagtctgtggtcttctgttatagcaacacaatgaggggtaagaccaatggcaaaagggactttcagatataattaaggctatggactttcagatagaaaaattagcctgggttgtctagttgggcccagtctaaatccacatgcccttaaaatagagaactttctccagctaacagcagaggagataaagcagaagataaagttagagaaatttgaagtgtgagtgggactctgcccaccattgttggcttcaaagatgagagaagggaccatgagtcaaggaatgcagccaacctctagaagctgagaatgacctcaaccttacaaccatatgaaactggattctgccagcaacttgaatgagctcagaagtggatttaccctgagaacctccagaaagaaacagctctacttctttgtggttttatcctcataagaccctaagcagagggctcagctgagccactttgtacctggacttctggtctgtttaactgtgacataatacatggatgttgttttaagtctccaaattaatttaattaaggtaatttgttatgacagtaatagaaaattagcacagtttctgatgagaaatcagctgttagttggattaattgctaaccagtacgtaatatgtaacttgactttaattgctttttatctttggcttttagcagtttgactatgctgtgccttagtatgcttgtttttgtttattctgcttagtattcattttgcatgtacaaatttacgtctttcctaaaattcaggaaaatttcaatcatgatgtcttctaatattttttctgcaccattttatttctacagctagtattctaattaatataatctataagaattgtaagctttgttcattttaaaatatatcttttctctgtgttggacaatttctgttggtttatctttaagtatacttactctgtcatgtccatttggctagtaagtccattgagtaaagaattaatttcagaaattgtatttttcagttctagaatttccccttcgttcttttttactgtttttatttctttcatgggagttcctatttctttgctgagattgttagttacaacattttgctcatttagggactggatttgattgatcttattgtatcttaaagaatgtgtttagatagatgatagatagataggtagatagatagatagatagatagatagatagatagatagatagatagacagacaatgttttcatacgttaaataattttgaatgtaccatggacatacgaatcttacactgtgggtattctagatgctattatttttctctgttgagttttctttgtctcagtaggcagtgttcttggctaggctggaactggaactgttttcttgtgtggcagctccagcctcagttcaggccttttgctccagttgcttcctttgggtctattcctcacgtgctgggttcagggatgctggcagtcagagtctgggcattccctctctgggtctttgttttccaggatttcaccatcattttcagtgctcgtggtttcccagcttcacctttctcattccccagggaagaaagatcatgaatgttgttatgtgcaccccagcattatgtatgccaccccttttgggggagagttagccatctatgcctttgtatttcatctgttgatttcacaaatttgtgtatcaaaaccccaagtataggagttttacctgtgacaaacaatgcagggagaaataacggtgtgtcctgacacatgtggacactgttcaattgttttctattagtaaaacgactagcaccatgtatgcagtttgaagacgtccatatctggtgcacaggaatgctttttctccacgtgtttcaaaccacacttggcactaccaatataatgttttctaaagtgatcgctggaatggaagctttctcttttttttaacttttttgctaaaagaggttacacatacatttttagtttttgtctaattatgacctttaaatatatttctattttttttccttagctctttatataattgtcttagtctgttttccatcactattacagaatacagcaatacctgggactggataattttttttttttttttctgaagcagagtctctctctgtctcccaggctggagtggtaattttttaaaacccactctcactgtaactaatccagtcccaggagagcaagaactgactcatgcctgcagaattaacccagtcagacagagtggtataaccctcttgacctgatcgcctcttgaaggccccgccttcccctggggaccaaattttccacacacaaattctggggacatgctgaaaccataacaataatgaagaccattaatgcttcgtctcttagctatgtcacaaatcatttccccagtttctctagctttcacttgtgtgtggtattttttgaatataggacttttaacttttccgtagtcaaatctatcacgaccgagaaacactatcacttagtaatgaggctccttgcttggcagtcagagagacctgagttccaatcctgcctctacttgttaccagctgtgtgactttggtacattgcttaacctctcagcaccagaggtttctcgtccataaaatggtcgcagcagtgccagaccttctggaattgttaacacattgtgcaaacaatggttgtaagataccgatgccagagatgggaagtgacacacgctgtccatggcagctgctaccttttctatggttaggattatttcctgtctgtcttttttccaggcttacagagtgcttctctacctcaagtgatatgtatatttacctacattttctttaaatgcatttttgttttcgtgatctatcccagccctactgatttgaactgttcactttataaaatctttattttatatgctttttcaaattgtttatgagctcaatactgttttagttttttttttttttttgaaacggagtctcattctttttggcccaggctggagcgcagtggcgtgatctcagctcactacaatctctgcctcccgggttcaagcgattctcctgcctcaggctcctgagattacaggcgcccaccacaatacttggctaatttttgtgtttttagtagagacgaggtttcaccatgttggccaggccagcctcaaactcctgacctcaggtgatccacctgcctcagccttccaaagtgctggggttacaggtgtgagcagccgtgcctggcatacttattgtaatttttttttttttttttttgagacagagtcttgctctgtctgccagactggagtgcagtggcacgatctcggctcactgcaatctccgcctcccgggctcaagcaattctcctgcctcagcctcccgaatagctgggattataggcctgtgccaccacgcccggctaatttttgtatttttagtagagacggggtttcaccatgttggctaggctggtcttgaactcctgacctcaggtaatccgcccacctcggcctcccaaagtgctgggattgcaggcgtgagccaccgtgcctgtaatcccaggcgccacttaattgtaatttttaatgaacattttgatactggtaggtcatacttctctcctattcatcttattcaaatccttttcctacactttctttttactctttcaaagaaactttaggttatttgatatttttcttggtctggcataaagtatatgaggaaaatgaaaatttcaggcttcgaagctaggaacactgtttgtctctccgtttatttaaatttcctttcatggttttcataaagttttttcctcactgcacacaactggttaggccatttcctagcacttttacattgctgccatgtatccgatccacctaagtgtgctttctttctcatttttactggtacttacagaagtacatacatttttatcatctgcaaatattgagttttacttttttctttgaaaatgtcatttcattatcggaaacatctagcaccatcttaagcggtgcaatacacaacggaagacagtccttggttttttcacattttactaattatgaggctaacaggtgagatagtatcttattcccattttgcagataaggaagataagggcggtggggcacacagctggtgaactcgccccaatcccatttcgcatttgatcccaggcagcctggccctgctgggtgaaaagtcccatcccagagaggaaacacaatgaacggcctcgccgtgcgcccacgaggagaggcctctgggacaccgtccccagggcgcggcggctgggcccggcttcccgcaccggggcgctgtcggcccgtggtgcggggttcgagctgcgggcggggaatccaagcgggctcgcggcggacaccaggtgtcacctggccgtggcgtccggcgcggcgtgggcgtccgggggcgcggcgtggaggagcgcgcgggatggggcgtgggcgcggggagcgccgggcggagccttaacaagtggtcgggcgggcggacgaggcgggcgatggccccgcggccgggacgcgcacagggaccatgcagggcaacggcagcgcgctgcccaacgcctcccagcccgtgctccgcggggacggcgcgcggccctcgtggctggcgtccgccctggcctgcgtcctcatcttcaccatcgtggtggacatcctgggcaacctcctggtcatcctgtcggtgtatcggaacaagaagctcaggaacgcaggtagggcccgcgccgcctcccctgggccagcgctccggacgcagcgcctctccgcgggcagccagccttccccaagcacttggttctttttcctaaacactgcggacttggagttatttttcctgttagagaggactcttctccagcctgcccgttgaaagtgccttttcataaggcgcggagtcacagcccctaagaggtgggacactccaccagagtcgggttctctttcctatggggacacccccgtctggttgtcctgtctgaggtttattagattgagaagcctcaggtccaggctgcagaaagttcctcaagcagcctctgcaacgaactgatcaattgcttggtcttaacatgtgatttagttttcccaacattgttaaaatatggaaacatagaagctggcaaaatgatggagcagccgccgtggtcttgttgttcgggagtagtctgcagttacgagcctacagtggaaagagaggctcccaaacgtgctgtgtccggcaggcggcggctcctccaagtaaacaagttgacactttaaaaacggaagttgttgtgttagagtaggcaggtagccaggcgtgagcaggaaagagtacacttacgtataatatgcaactacaggtaattgtgtgcttgagttaacttgctttttcctccgagcaatgcattgaactggtttgttctggtgggaacctgtggacactttgttcttaggatgctggatgttcagacctctgagtgatgattagatgcttggttctctgaagaaactagttttttatttggagg

SEQ ID NO: 10125 - DNA, 6000 bp, Homo sapiens; identical to SEQ ID NO: 3819

SEQ ID NO: 10126 - DNA, 6000 bp, Homo sapiens
tttctagtcatttttctccgtttcatttggacagtttgtattgctatgttttcaagttcactgatcctttttttgagacggagtcttgctctgtcacccaggctggagtgcagtggtgtgatctgggctcactgcaaccttcgcctcttgggttcaagtgattctgctgtctcagcctcctgagtagctgggactacaggaacacgccaccacacccagctaagttttctatttttagtagagatggggtttcaccatgttggccaggctggtcttgaactcctgacctcaggtgatccacctgccttggtctcccaaagtgctgggattataggtgtgagccacggcgcccagccacactgatcctttcttttgcagtgttccattaatcccatctcgtgtattatttctctgacactacttttcatccccagaagtacgatttgaggcttttttccccgtctttacttaacatattgtctttcctttcctccagcatcttgaacatatggaacatggtcacagcataagcatgtgtgtgctgtcctctacttgccctgtcacctccagcatcttgaacatatggaacatggtcacagcataagcatgtgtgtgctgtcctctacttgccctgtcacctccagcatcttgaacatatggaacatggtcacagcataagcatgtgtgtgctgtcctctacttgccctgtcacctccagcatcttgaacatatggaacatggtcacagcataagcatgtgtgtgctctcctctacttgccctgtcacctttgtcatttccaggtcagttactacaacctccacctcccggattcaagtgattctcctgcctcagccttctgagtaactggggctacaggttgcctgccaccacgcctggctagtttttttatttttagtagagatggggtttcaccatgttgtccaggctggttgtgaacttctggtctgaagtgattcgccctcctcggcctcccagagtgctgggattacaggcgtgagccactgtgcccggccccaggtcaattttgattgatttttcccatctctccatatgggtcataatgtcctgcctcttttcatgcctgtttttttgttttttgtttttcccggatattcaatattttgtattctaccttgtttggtgctggatatttttgtaaacctatacatatctttgcatttgtttctcgaatgtgatcaagttacttggaaactgtgtggtccttttttttcaggcagggtctcactgtgtcgcacgggctggagtgtagtggtgtgatcttggctctctgcagtctcggccccctgggctcaagtgattctcccacctcagcctccccaatagctggggccacaggcacgcatcaccacattggcgactttttggatttttgtagagatggggtttcaccgtgttgctcaggctagtctcgacctcctgggctcaactggtctgcctgccttggcttcccaaagttctgggattacaggtgtgagcccccacatctggctctgggtcttcttattcagtggtgtttggtgggacctgaactgtatttagtctcgtgttgatgcttccctactacggggtgagaacttcttcctgctctaacgatgcttccccactctggctgctgagcacaggcactattcccagccctgcatgggctctgatcctgggtgggtctttccctggccttgagtgttttcttcacgctcctgcactgatctgtgcttagctgaagcctccaggcagaccctctgtgggtgtctgggcttctcggtgcagccccctcctctccagcactctggagcacctgtgaactccagcccctgcctggccacctctgtcttcccagttgagggagacgccggtggctgcctgggttttctctgcaccggcctgggcagtgggcgggactgtcctcgctgccgggtcgcttcccctctctccagcaccacggtcctcggtttcgtgagcccagtgccttacgtgctgttttcacacctatttttttggttgctgcagctgagagtgtgtaagtcactgttactgcatctccattctctgccaagcctcctccacccgcctgtccttgtcagtccctacacctgctgttcctgagatgccgcctctgtgaggcctgcccggctctcccccagtcctgcctcttctgccccggggcaggtgctgtcgcgggcaagcgaggatccgtgctagcgaacctgcgcgcctggggctcaccggggctgggtaggtggctacaagaacctgtcttcccgcggtcaccccatggggttggctgaggatggggcctgagaccccgagggtggctgaccgccccgtttcagttttaaggggcaggacgtgcttgcgccggcccctcggctccgcgctgcctgacccgaagggccgtgggagcggggagggcccagtccctgttccgggggtgggcgaggggcggggggctgcctgaggacggggcctgggccggccgcgggctgggacgtggcgggcggggcggggcggggcggggcggggcggggcgaggagacgaggaaaaacgcctcgggagctgccgcgccggcgccgccgccaccgccagagggcagcgcgtgccggcgcgggaggcccgggccccgcccccgcccggccaggccccgccccctccccgtccccgcccctgtccgcctcgggccccgccccgtctgccgctccgcccctggccccgccccccgtcccggccccgcccgccaggggccgcgacgctgcccgtgcccctcccactgcccgctcattcgggggccggcacctgccggcctgtccgctccctgcttatactttgcacgctcgcagccacgtttccgcacacctgtcccctttccacgcacctgtgtccggcagcccgcacatctgtgggagcgctgcctcctcgccagctgtccgggaagttcagcgccgctctcccacgggcgtgagaccgccccacccacctgtccgtgactgcagctccggccgggagggcggcaggtgggccccggcgctgctggctccttgtgggacagggccgcggcggcggcgcaggacgttctcccgccgggaggaccacgcggcggtccctggacccttccccgggtgcacagcggcggctgcgccagcgggggcaggatgggccgtccgagcgcacctccatccgccctcgcgacgcccacgctggcccagacgcgggatttggggtggaggacgctgggctgggaaccagcaccttgggacggccgggtagttcgggccttgaggagtcccacaccctgacagctggcgccccccacgccccgcctagctctcctcggcctggggacaccggctgccaggcctctccagtttcagcctttcctgggaggacttcctggaagagggggcttcaggccccagaaagagaggctgctctgggggatggaggaggtgctgggatggtgactccgcggagtcgagggtgtgaggcgggatgtgggcaggccgtgaggtttgtgttgcaagactgggaggcaggatgaggggaggccatggggcggctggaggtgcggcctgggagccctgcgtgctgggccctgggcagggacggcaggcgaggcgtgtggaggaagagccgcgaagagctgggcgctgtcttctccacgcctccgtttcttcatctgctcctggggccgcctgcccggtagcggagattgaatcgcatgttgacgtctattacgatgattaatgttcttgtcattcccgtcactagcaggtgagaggctgggaggcctcaggtgggaacatacctttggccaaaggcaccaggtaacccgaacgccccggggaggacccctgcctgcatcgccgcggccgtccccccctaccccgtccccagcagctccggctgggcgaggccctgcttctcccttctgctcccgaagaccccccggggcgcagacctggaagcctcgaagctcccgcggccgtccagtccgcccccttctgagcaaccagagagcggtctgggcccggcccggggctgcgcagaggtcagactgccgcgggcagggccggagcctgctctgggggtcgcggaggtgtctcgagagttgaggacccgacccgggcgcgcgcgggcgcaggtatggggagggcgcggcggctcctggccggtcctaggagcctgcggggaccaagggcgcgcgggcggggccgggggcgcggcgaggctcgggttggggcggggcgggggcgggggcggggccggacccggggaagccgcccgcccgcggggacgtccgcaccgcgagggttaaggccgggagcccggcggggcgggggcggtgtgcgcgcgcggattggggaaaagtttggcggcggggcggggcacgggggagggctgacgcgcgcggattggccggaagttgtgccgggggcgggtcgggggtccgggctcggcgctcgctccgggagagttgacaaagccccgcagggaaggacgcctcgcggcgcggcgccccgggcccctcgccccgccgccccgggatcccggccccggcccccggccccgcggactcgcccccgccgcctgcccggtccgggaccccgcgccccgagcgcccgagcccggaccccgacccggcccgagccgcccgcgcccaggtagcgccgccccgccccgagaccgggcccgggggcgcggggcggcgggatgcggcgcccggggcggcgatgaccgcggagcgcacgccgcgggcccggccctgaccccgccgcccgcccgctgagccccccgccgaggtgagccccccgcgcgcgcggccgcgaccccaggtgggcacacgggggagggcgggggtccggggcgggggcggggaggggcgggttcggggccccagctgggcacgggtcatgcgcgccgccgccgctcctgcgggcccccggcctgccccgcccccgcccccgcgccccacgtgggccccccccagcgcaaatttgtccgctaatggcgcaggcgattatctgcggggcgctgagtgttgtgtgtcctgcgggcagggccggagttacaagcgccaggaatccagacggtgtttggagagggggggcggcgggggagcccggtaattagtgtaaaccctttgtctgcctttgatacccacagcttctccccgctgcggcttcctccgcctggagcgcgggcggggagggcctgtggggagggcggccagacccctgatccccgcggcccgggaccggggagggcggtatctcccagttccacgtgttagtgacggcgcccccaatgtccccaggtccggacaggccgagatgacgccgagccccctgttgctgctcctgctgccgccgctgctgctgggggccttcccgccggccgccgccgcccgaggtgagttctggcgcccagcccggccagcctggcctccgccagcgccgcccccttcccgcccggccctgaaccctgccacagtgcccgcctggcacgcgccatgccccgcccctgccgccccgctcgccaggcccccttccttccagggccccctcacccatgggctgtccacagcacccaccggggctcccctagctggctggaggggttcccctcatgcgtgcttgctggccaggtgggctttagtcctggctccccaggacatgctcctggtcttgcaaacactttcatactcgtacctgcagtccagggcagctaatcacctgtggattcttggggagtgggcggtttgtggccacagtggacccgataaggactctgggaacctgcagagacccccacggaaggcaggatgggctatgggagatattggtaatatacttggtgtctgggactgaaactgacccccagacccccagtcccccagccgacctagccgtgtgccctgggcctgcccagctctaggcaggcagtgccgggcggttgtgtggac

SEQ ID NO: 10127 - DNA, 6000 bp, Homo sapiens; identical to SEQ ID NO: 1088

SEQ ID NO: 10128 - DNA, 6000 bp, Homo sapiens
aggtttcaggcaaatgccaagtgcttaggaaaatagattctgagctgctcagcggctaccggcctggcccccgccatcctgggagctgcccagccttaacccctccctggccagccctccactgcccgccccacccacccctgtgggggaccccaccaccacctcctgctgcttccgcacagttcgagccgccctcctgtgccagactccaggcagggagctgggcctcccccactcccaggctggggcaggagcccagggggagcctgaacattcacccccgcccccatctctacagctctctcttgtgtctgcagacagctctggtttcctttctttgctcatctgggagcagccacattttccaaaccaaagtcagaacttgaggtctagtggtctgagtgaaccaaacggtaaaaaggccagaatgtttgaactgggactgtcctgccatatccaagacgacaggctcccagcagctcatgactcacggtgttaccctttttcctcagcctgccaggaagctcagagctaaaattaagggtcttgctagctgcgttggcttagggattttggaatattttttcttcttcttcacgttctttaaaatttcatttctgttataatgagcaaatcaaggtttgtttttttattttaatacttttcaaattttgtgagaataaatttaaaaggcaaagtcaggcatggtggcacatgcctgtatttgggaggctgagacgggaagattgtttgagcccaggagttcaagaccagcctggacagcatagtaagaccctgtctcaaaaataaaatagaaggcagaaactacccataaactataatagctatagccccactaacagcccagtccagttcagcagggctacccaggggcccttcttcctccatcccatggtggcctgccctgatccctggcacccaaccctgtgccctgacagtgtggaagggcactagtggttcctggggaaggtggtaggagatggggagctccgaggggagatcgcatggctcccagggggtcccatgggcagaagggacttgatacccactccggacctccgtgtcccctgtccttccactcagcctcatggcagggccgagggaagctccccgcagcagccccagccctaggccaggttctgatcccagaggggagctgggcaggaggctctctctggcagctcgcctgccctgggttccaggtctccaagcctcggcctccctgcccacctccctgtcgggaaaggcggcagctgcctgcccggagtgctgtggggaacaggcggtgtggatctgagactgtgctgggaatgtcctctctgccgaaggcgcctctgccattttccgagtacctgcaagggagacgcaggagacgcgggtgtgagcggggccatgggcaacctgcggaggccctgcacccaggatgggcctccctcccaggcaccctctgccactcacccacgcaggccccagcaagccaggctgcccagctctgagtcaccgccagggctgggctgggccgggccgtcagccgcacgcgccgcttgtctcggcccctgcctcccatactcaccttcaggggggacccctgggtatgggcctcaggaggtgggtgggggtgcagggggagtgggtagggaggtgtaaaccggagtccagcagatgggaagttcctgtccggccggcacctgcttggagcctcctgcacatgcggaccctcaacaggctccccgagtcctcgcctgccctccctgcctcaaaggccccagaagggcctacttcatcaggtgccacgaggatgaagccaggtaatattgcaaagggtctgtggaaacgcttgagcaagggcactgtgatgaaattgtggctactgacagctaatgtgcagagtcaccgaaattcaggagtcaagcagccggcctggcctcacctcagtgtcgggggaatgccatctgcacctgtgggcttggaagtgatccatttgaacaatacaattattcagacaatactaaaccgagctttcaggcaagacctcccgtggccctgacagtcctggggcagagtgggcagcaactccttgctggtggccgtggcggcactaggacccttttgaaaccaatttggcaaaattagcggcaccacggaaatgctcctgccctttgacctaactgctcccagacagtgccactggagaagccattcagaatgtggagggcgccagaggaggcagctgccacgcagtgcgtagtgggcagaacggcggcctccaaaagacatagtcatgtcctcaccccttgcagcctgtgaacgtgaccgtatttggaaaaggatctttgcaaatgtaattaaggtgagaatcttgagatgggggatcctcttggattatccaagtgggccctatatccaacgacaagtgtctgtataagagatggaagagaagatggcagagtgggaagcagatgctggagcaatgaggctgcgagccaagggacttggagccctgggacacttggagcccccaggagctggaaaaggcaggaaagatcttccctggagccttcagaggcagtgcagccctgcctacaccttgattccagacatctgctcttccagactatgagaaagtaaatttaagtcaattagtgtgcagtaatttgtgagggcaacctagaaatacaagatgctactgaactaaggaatccccggctgctactggagggagaggtggtgggcctgggccagggctgcggggacaaagggagggagtgggttgtgaaagtgcctggtccccagtccctcctcctgccagcactgcccactggtcaaacccacccagaagctggagagcaagggaccctcagagatagggtctgtaggatcaggctttcaaggacaaatgggagaggggctggggaagggacacatggggaccagacccctactgggcatttctgccaaggagaggatcctggtgaggaagaaagcagaaagctatgtgttcacagatgcacggatgctcccctcccagagacccgtggccgtgggtgcagagggagtcagtccttcttggaggtactgggaaaggagcctacagctccactgagcccttctgcctacaggaggggccccactcagcagctgttccctgagggagacctgtccacgcgtgagctccttcccacagtcccatccagtcccccaggggaaggggcaagacggtcaggtcaggacccacacgcatgctggtgctttcagaacctgatgacttagttggttaagagagctcacacctgcaatcccagcactttgggaggctgaggcaggtggatcagttgaggtcaggagttcaagaccagcctggccaacatggtgaagccccgtctctactaacaatacaaaaattagccgagtgtggtggtgcacacctgtaatcctagctacttgggaggctgagacaggagaatcacttcaatcagggaggcagagattgcttgagctgagactgtgccactgcactccagcctgggtgacagagcgagactccctctcaaaaaaaaaaaaaaaaaaaaaaaagagcagggccaatgtgctgctgtgccttggggaacggtgtcctgggagcggacctggctggcagtgacctggggctgtgcactggagggggctggacagtgcacttggaggtgggtgagcctgggccccaagacggtctggggacatgggcttggccagagcaggaaatgagggtggccaaggacaggtgctgagccaccgagtcggcacagaggggtgggcatgagggcttcctgggagcagggcccttccaagtccctgaggtcagcccagggacaccctggcctctgggagattcatggtggggctgtgcatgggctgggtggggtcagcaggcagccagtcactgaggggctttcagcgcccattttcctgatgagcacctccagtcctggaagccacaagccaggcacgcagcccacccggccggccctcccggccagctcactggctcccatgggccccggacctccttgggctttgcctgaaggtgggagcagatggccttttccttgtgagggtggacacagaagccaacagtcatgtggggtgaggggacccaggcacctccagcgtcccccgcagggcagcaccttcccctcctgggaacccacccctcttcagctggactctgagcccaccccgtggagcccagaacctcgggccagctcaggctctgccaccagctctctgtcatcctccctcagagccgggctgtgctccccaagccaggggtatccagcccccgctcttcatcctaggccgggcaggcagccagccccaggcctgtgtcctccttggggggcggggggtagggacccctcgcgcggggctctcaggcggcttagctgcgtgcggccccaggtcagtcaacgcagcctctgcacctcgccggtcaggtacgcaggccgcgccgggctgccccagacctgcggcgcacacgggaggctcagcctggaatgccgtcctgccctcctccacctgaggaattgccgctcacaccacagggttcagctccgcggcatctcggcgaagcctcctgacatcccgacccccgccgagacctcccctctgagctcctgagcacagccccaggggacccgagctgcgcgctatgcaaacacaggcctgccctcgccctcggtgcgccccgtgcccgccgccccctgggccgccccgcggtgcgactaggggcctagcccgcctgccccggctcccacgccctcgagaccgccgggcgcccccgcccggccacgccccctcggatgccccgctccgccccgagggggcgtgccctgcgcccccgcgagccgggcggggaccgggcgggagcggggcggggccggggcggggcgcggaccgtcccccactggctgcggcgcgcggggcagcccaggctcagtgcgcggtggcggcggcgtcgcgggcagctggcgccgcgcggtcctgctctgccggtcgcacggacgcaccggcgggccgccggccggagggacggggcgggagctgggcccgcggacagcgagccggagcgggagccgcgcgtagcgagccgggctccggcgctcgccaggtccgtgcttggggccgggcaggctcgcggaggggtccaacggtgctcgcggaggggtcggggcgcggctgtcgcggaaccacagaggtccctgcagcgggccgggccggggcgcgggcttcccgctccggaaagtttgccgccgccgccgccctgggagggctttgcagcagccagggagggaagggggaggagggagggaccgcggcggggaggaggcggccggcgccaggcggcccgggagccctgggcggcggcggcggcgggcggggcggctgggggtcggaggggtcgggacgcaggagccggccaccgccgctttcgtccctgtccgcccctctaacgagctgccttcctcctcctgtagtctcccgagcggcgcccgcctcccgccggtgcccgcgccgggccgtggggggcagcatgcccgcgcgcgctgcctgaggacgccgcggcccccgcccccgccatgggcgcccctgcctgcgccctcgcgctctgcgtggccgtggccatcgtggccggcgcctcctcggagtccttggggacggagcagcgcgtcgtggggcgagcggcaggtaagaagggacccactaggcacgggagaggccggcccgtgcgggcagaggcgttggggacgggaaccggccccgggtcggaggggccgccgggtgtgagtgacgccccggggttagagcccggattccgctgcctccttgccggagagcgcggccagagctagcgcggcgacttgtggtgcgcccggagccgcagctaccctccaagtgcgaggccaccacggggagccaggctgggggttggcgtccgcagcc

SEQ ID NO: 10129 - DNA, 6000 bp, Homo sapiens
cacacagcatgggacttagcaaaggtgcaataaatatagatagatacatagatagatagatacatagatagatagatagatacatagatagatagacacatagatagatacatagatagatacatagatagatacatagatagatagatagatacatagatagatagatacatagatagatagatagatacatacatacatacatacatacatacatagataatattgaatgaatggatggatagatggtatcaagtaattacatgaaggcatcatataattacaataggaagaactaacctgtgccttcgggaactgtgctctgggaacagcccttacaccattgctcagaagaggaagcagagaccctgagggctgtgacttgtcccaggccccacaagagggagtggccaaggcagggacacacatggccagagctctttcctgtacagtgtgcagaagggctatgcaagacaggcccagagagacggaagaaggctggtcccatcaacagctgggatgggcgtgggcagggccagggcccaggggacgtgctcaagatgccaagggcacctgaatacaggtgctcattcccagattcctgcaaaggcaggggttgcccttgagggtgaggtactctacacccaccatggtcctagatggcttcaggcccttcccagtaggcaccgtccctcccttctggcagggaccaccctcaacaccactgtggctgacagaggccaatgtgcaccaggatttctgacactggcttcccagaaggaagagcttgtgcaaagcaggtgaggccaggcacgcaggctctgaactcgggggccagagagagagtacaggacaggcctggggacgcggctccctgagccttggttttgtcacctgcaaaacgggccagatactcccatctcacagggcagatgcaagtgaaaggacccagggaacatgttctgtcattggacttttgaaagctcaggacactgacatggcgtttttccagtgaaaacctaaagacagaaagggagcagggtctcttttaagagactaaacctctgccagtgtcgcaagtgtcctggggtagagaacacagcaggacacgacccaccaccctaggagagaggtgggaggacctcagggcagcatcaatgggccagaccattggccagggcagtcctgggaataggagcctgggtgtgctgtcaggggcaataaggtggagagaagagtgccagcatgggacaggagtggcagaatgtctaccaggacagaccaccccagaggtctgggggaaaatggatgggagacgtgggaaaaccatcaccaagggctggaagtgaagtggtgggacctgaagccagggagtggcagtggggagtgaggaggggcagacatccgagctgatttggaggaaaaggcactaggactggtgaccagctttgtcgggggaggtcaagtctagggctacagccagggatccatgcctttcgagtttaggaccacagagggagggccagggtgaagtaggaagtggctaaatccatcagccaggagagttcagtcacctaagagtccagccaagagcccccacttttaaaaaccgctgcaatttcccagtgctggcctctgcaaggggctctgcatatgtgagctcatctaacccacttccaccctctggggtggacgccgcgacggccccgtttcaacgatcaggaaactggggcacaggagtgaactgccctaggtcgaagctcgtaaaatggagagcaggattcgaaccagggtcgctggtgaagtccaagccggcagctgccacaccccgaggaaggtctccagtttccctcgaagctttctggccgtgagcgggatacacctaagggccgcgaagcaccctattcagatcctgccctcccttcctcattctttgcgaaatactaagggtcctccctgccaccgccggtgtagacaaagtcaaaccactacagtcagaccggagcctggggtcgggccctccttacctgcgtgctgctctcgggccccgccccgctccgccccggagggatcctcaggccgggcccagacctaggagccacctggggatcccggggtggctgcgcgccgagggggcgccagcggggacgtgagctggcgccgagacagcctcggccccccagcgccagggccactgccaggagacccccggccagcacccacgtggggcgcccccgggagcccgaggggtccatcgcctgtcgggacccgctacctcaaagcggcgggtgccgccgagtcgctggagcttccggaccccaggcccgccccgccgccgagcatgctcagtgcgagccgccgccgaaagttttctggaacaaacacccgcatctggggcttggcgggccaggaggtgccggacgggcgtgggagggggagagcgagttggcgcggcccaggcgcccggcggccaggcctgggtttgcttgcgcccaaaccgaatcagagcgggtcactcccctgctccccgaggttaccaggaccccaagggcccctccgctaccgcctacctgggtctgtaagcctcagctcagacgcacttcccctgggaacggtttcctgacacacggatgtgaatccagagtttccccatccccgcttagaaaacggagaagcatttggagcgcggggccgggagtcctggagcacccagaaggttcaggaaagctcggggaggagggggtggccgcagagaaggaaaaggaccctcacttccggttgcgttcagtgcagaccagctgagcacccactgcccgagcctgctgtgggtcagccctgggccggcccgggtgcccctcgcattcccagtgggaaacaggccagccgctgggccacctctctggggacctagaaagaggggagctggtgtctgaagtcgcagccctaagcaagctctccctgaactctccgaggggacagggatttgctttgccaagggacgcaggaggaggaggaggagaaagacacaaaaagggggactggtggagccttttgtgtgcttcctcatccctgcctaggtcctgggtgacagctgacacctgttgacgggggagggctccactcccgccagccttcctgcggggcaggctgttaggctgtctataaagtctcaggccagcgagcctggcccctggcagcctctctccccataacccagaccatccaaggacaggcctttcctgacctaacatggacaaggccatggggttcgagaagctgagaatttataagccaagttccccacaccagggggtacgtggcagctgtcaggcatgtgacaagaccacaggctaaatgccaagcatgttgctggaccgttggagttgtttgacagtcagtcatttaaaggttaatttaatagtcaacaactttatgataaagtaaaaagcaaataaccctacatttaaaaaatctccttagtattttttatggagtcagggtctcactatgttgccaagactggtcttaaactcctgggctcagacaatcctccacttgagcctcccaaagtgctgggattacaggcgtgagcaaccacacctggcccaaacaccacattttaaaaactaaagcctaagcattcatggaaatgtaaaacaagagcgtcaagttattgcccccatacatgtccccaggaaccttggagatgcttctaaggtaatatataagaagctccacatagcagagagtttgccctgaagccagacacaggtgtaaatgagacaagaattctgccccactccttaattgcaaatgagtcacctctcctctccagctgtcagtttcttcatttattaaaaaaagatgaagaatttggataacagttcccatcttgccatgaggaaatgatgaaacaaactagaaacaagctggacatctaggctgaaaggacaaagccctcctctgctgaagcagatccccatggtgtcccctagcccggcccacacagggaattaagctccacagggtaggtgtgtgtgtgtgtgtgcccctgagtgcaagtgtgcagtcgtgcatgtgcatgtgtgctttacccaggcacccaggacaaaagcaaacatctagtagctaccccataaatgtttgtttaaagcaaacacagtgatgaactcctttaattttttatcactctaaacaactgtgagatactcactagcctggacactgcctggtttgtggctggcctatcccccagcctgcaacacacacacaacagattctctccaagtgctgagtaaatgaaggatggtgcagtgtcctggtcctagtggggagcgggtgtaagggtctctttatccattgtctcagtggggagtgggtgtaagggtctctctacccttggtcctagtggggactaggtgtaagggtctctctacccatcgtctcagtggggtctgggtgtaaggatccctttacccatcctcctagtggagactgagtgtaacggtgtctccacccattgtctcgaccttccctgggacaaaataagattaaaacaggagtcttcgcgtgagcaagttcagaggcgtggagggcggtgtgttcccgggaaggttgatgggtagaggttaggggcaagggcagggggttggaattgcattgatcccagcgtcttcatcaggaggatgggcggagcacccaccgcagagggttattgagaaagttaatgagatcattaagctaaatgcgtagcatattctaagcctcaaaaaacttaaaggagccttctaagcctcagtaaagttaaaggggtggaaaccgggcccccctccggaagggtccggggctgggaggcgcgtctgtctctgggcatgctcagtgcaggggcagggctggggcgggggtggctgaaagttttgagcggtgatccaggctcctccctccggctcggcgaagcagggaaggggagagaagcaggagtcgggagactgcacaggccagaaagtctgcggagcgggccgcgcccctggcccgcccgggctccaagtcccgcgtcgccgccctggcggggacggtgcagcaggcggcgggatgcggcggggcggcagcctgagcgccccggatggcccgcggcggggcggcctgcaagagcgacgcgcggctgctgctggggcgggacgcgctgcggccggcgcccgccctgctggcccccgccgtgctgctgggcgccgcgctcggcctcggcctcggcctttggcttggctgccgcgcgggccgccagcgcacgcgacaccaggtgggtcggccgagcagacagcggcggggcggggagcgcggggcgcgtggcttctgggtcctgcgggcccggagccccggctctgcgactccttgagcctggttgggaacttcgcacgcaaccgcttaggcgtcgggttccccttctgctccaggagggaggtggcggcgtgactaaagggcattggcctggggtcccctgcggtgcctgttacatcccactccgttgggtgatccttgacagcagcccaactgcgccacgcctcggtctcctcatctgcagcaccaagggtttggacaggacgctggccctgctcgccatggtggacagaaggacggctggggctcccacgcctgaatgcctattcctgcttctgcctcttccatccttgcggtgtgggttacgtcgcctggcctgagtcccagctgccacattggcattcattttttcattcaccccacagtaaaagttttcaggcaccttctacagccagtcactggcctagggacgacattcatgagcgggagagaccctgccttgaggctgtgaacctcaaggagaaggacgaattgcaagtttgcaagtaaactatcggttatgacaccgcatggggagtctgcgatgggacgctggcaatgctagcgtttattaagtgctgtgtaccaggcactgaactagaccctctccctaaatgatctcaatga

SEQ ID NO: 10130 - DNA, 6000 bp, Homo sapiens
tttctattcttatctcttttactttttctttccttatctcttttactttttcttttcttttctcttctcttctcttctcttcttttgagacagggtctcactctgatgcccaggctggagtgcagtggtgcaatcttggctcactgcagcctcaaactccccagttcaagcaatcctcccatttcagcttcctgagtagctgggactatgggcacatgccaccacgtctggctgatttttaaatttttttgtggagatgggtttttgccatgttgcctaggctggtcttgaacttctgggcccaagcaatccccctggcttggcctcccaaagtgctgggatgacaggtgtgcgctaccatgcccaaccagccgcacatgttgtttttttgttgttgttttttgtgtgtgatggagtttcgctcttgttgcccaggctagagtgcaatggtgtgatcttggctcaccgcaacctcagcttcccgagtagctgggattacgggcatgcgccatcaagcccggctaattttgtatttttagtagagacggggtttcaccatgttggtcaggctggtctcaaactcccgacctcaggtgatccaccccccacctccaggcctcccaaagtgctgggatcacaggcgtgagccaccatgcctggcccatgttgttcttatctcattaacccagtgggctaaaaactcattgccacactcagtagcttaaaccacagaaatggattctgccacagttatgaaggccggaagtctgaaatcagtgtcactgggcaaaaatcaaggagaatctgttccctgctcttccagattccagggactgcctgcattccttgacttgtggccacataattcctatcttcaatgccagcgtcttggaatctctctctgctctatgtccacatcaacttctccgtgtgtggtcaaatctctgtctgcctctctcctgcaaggagataagccaggctaatggccccttctcaaaatccttaatcacatctgcaaaaacccttttctaaataaggtaccattcacaggctccaggaagtgatctctttgggggccttgtacaccaatagcctgtaaaccgccacactctgctgtctttcaaatgacaactcaccaagcctctgtcctcattttctttgaatacttggcatgtagtccaatgcctggaacaggcaggatgtcactaaatgtttatattttttaatttttatttattttattattattcttattatttttgagacagagttttactctgtcgcccaggctggagtgcagtggcatgatctctgctcactgcaacctccagttcctgggatcaagcgattctcctgcctcagcctcctgtgtagctgggattacaggcatgtgccatgacgcccggctaatttttttgtatttttagtagagatggggtttctccatgttggccaggctggtctcgaactgctgacctcaagtgatccacccacctcggcctcccaaagggctaggattacaggtgtgagccaccacgcctggccaaaagtcactaaatgtttgttgagtaaatggaagtaggttttaaataggtgtagggaaggaagtgggccaagaacttgaatgcagagtctgaaaatcatgggcagacatcaaaggactgaattgtggggggtatatttggatgtcaggttaaagagtttggacactgtcctatgggcaagaaagagcttatatgaagtccttgcataggtgattcatccatccatccatccattcattcattcaatactcagcagcaacatgcagagctcagctcttgggggaatgaggacaggtgtcctagaaaagatagcattgaacagctggctctttctcccaccagagttgtgttttaataagttctagtatttctagcagttactgctttaagtgtgtggctactagattttctggctcattcagattcatgacaatgaaatctttgtggattgtgcctggcacccttacataataccactcttcccgtgaatgctttccatcatgcgttcttccttatcaatagtaatttgccatttttcaaatgtctgctgtgatcttctacttctcaatatttttggtgtgtttcttgtaaatagcgcttaactggactttagtttttgccccaatcttacagactttggatgggaaattcagcccattcaccgtgttacgaaggcgggtagccatggctttatttattttatctcatcttatgtttactattattaagcttattgttcttgctattatttactttcccccttaattttgcttccttactctccctccacccctcccccaacttctacctagtaattcaggagttctactctgcttctttcccgtgagttgctactttccaattcctgagagtcataattcaaccaatctttccctgataatgtattaaaagtaaatggtaatgaagccccctccccaccaccaataaggctttccttccccagctgagagtcataattaaaccaatctttccctgctaatgtattaaaagtaaatggtaatgaagcacccctcccaaccaccaataaggctttccttccccactcaccaaatcagatccttttacttcctccttctcccctcaaccaaatgtgatcttaaaatattctgacttctctgtgataagattctatttttttttttagttccaggctaatacaactttctcttgaagcatgtagcttatgttttaagaatccttatgtggcactgctagtacaaaatcacaggcacatgtggattatccatactgtatattttgcaagggtcattgcttaacaccacttcctgttctgagcgtttgctctatcttgaaatctctactgtgattgaactgtctcggtgacgggggaactctgaatatcttcctctgaaaggggacatcactgaggtcctttctctgtcttgccacagtggatattttctctcttttgtccacatagatgaatcctgtagtagccatggtaaggatccttgatcctatcatcagagtccctggacattgctccaaagtcccctaggaaccacttcaacttttctccccttagatgtgacctgttctttctggaactctgcaagaccgtctctttatccttggcatctgggatttccagggacacgttctcctggcactttgctcacctctgtttcccctccagctcttcctggagtacctgtcctttgtgcaatacacctcctggaactgtctttccagtctctgctttttgtcctgatgattttcatgtgcttttcctctacatcatgaagcatttactccacattatcttccagtttgctcatttgtcctcacctccactcttctctttctgaatttgcctgttgctttttcagtctcttagctccgtggagtatgttcagtgttgctgtgttctgatagaggctccttaagccatcttgtagattttttgttgcacttcctctcttcccttagacctccacaggaggaacttttcaatctgtcctcttctctctgcttaatgagcccctgcaaagggtttgggaagtgcttcagcctctctgtgattgtgtgttcacattaatatttattattttcttaaatgtgcataaatctcacaatgtgaacagtgatcatctttgagtgattttttttctcctttctacttttagtaattctccaaattttctacagttagtgtgtgataaggtggaaagacatcttcaagactttgggcaaataactatgtctgagcctcaattttcacatcaataaaaaatgggctcagtgccacctccctccttgggtcactaggggggcccttgaaagctgtgaaagcccctaagccaacctggacagagcaggcgaggctgacggcaggtgttcttccttcctctgtgagcctcacagggtcacacgtgaacattggggatcgggggtgggcagtgggggcagctggagaatcaaatgaggtgactgacatgaactacgccgctttgacaaaagtcctccgaagtagtgtgttcagaactcatctccaaagccatctggaatatttgctcccaacatgttggtaagcattatctctgacagtcactccgagccccagtttctgctgtgataactaggacaggtagctcaggttggttgtggggaccagagacagagcaggcagggtctcacgttccccagggcctctcaaggatagaccctcgccctcatctccaaaccacgcctcccagacaggaaccaaactcccagagtctccaaactgcctgagccttgcccactccctgggctaacacacactttaaaggaatcccacagtcaccgtgtgaaaagcttgctacactgcatttgattctgggcactgaaagcagtacttggctgcagacactcgtttcaaacaggccccatttttccatctctgctgctgttattaggggagcccttagactctcttgcagcgccggaataggcgctcaagacgtgtgttaatattgcaacagcaaatataatgaatctgcagttggggacgctgaggccggagtggtggatgaaaggtggccggagccttttccacgggtccaaaccacctgttacaggagaaggcgagcggcctcgctaagcaactggacgttccgcgggcggggcgggggcggggccggggcccgagtccgctcggaaactttcgctgtgggcgagccggacccgccttctggcccctcgggcccaaccacgcagggggagtgccgggccgcagctaggcgaggcgcaccgtgattggcggagatgtggagtgattggcggctacaccggccactcagcaggccgagctggcgccgcatccggggggccgcgtctggagtggagggaggccgaaggccccgcccctgccccgccccctcgtgcagaaggccgcgctagccggctcttcagcagcgagtgcagattgctcccccgcggccgcagatctcccgtttgcgccgcgttcagctgctcccgaacaacttttctgccggcccagaggccccagggcgtcgcagcgccgcgtgcggcccactcacgggccggtgagtacttcggcgctggggcagtggcgcggtggctgtgggcagcgcgcaggaggcgggcaagagccctgaggcactgtcctcttcgggcctcagtttccccttccgagctgatgggtggctggccccaaagtcccgacaaggtccccgaagttggagggccgggggtcccgcccgctctgcaacgcgcaaggcgacccctgttccgggcccgaacgggtcacccggggggcgcgccccggtcccccgcgcgctgtcgcctggagccccgccgcgggcgggacagcaggcccgagaggcggagcggccggcgggcaggccccctccccgcgccccgcgccatcccccccgagttgccccgtcatgcccctcccccgcggtcccgggacccacggccgccctcggtgcccgcccggccgttggaacgcgcctgggcccccgggaggtgttgtgggggggaaggggggttcagtcccccagggggacccggcccgcccgaggggcagcttaggggtcattctgaatccccacagcccacttaggagcgctgtggcagttcctctctctctcggggcccctcagtagagagttgaggggtttcagtggcagcacctggaccctgcctcgtatgaactccaccctctggatcattagctttttgtttgatcaacgaaaactttctggagaatcctacccagcccttttggatgtgatggcgccctggcctctcacccacttagcagatgatgttatgaattccaaggaagtcgcatttgtgcaaccccccaccacccagatttaaccctctcagtagccttaggcggagaagttatagtccccgtttgacaccccaggaagctgaggctcagcagggtttggtgccagcc

SEQ ID NO: 10131 - DNA, 6000 bp, Homo sapiens
catttcttctctcatgaatcctgatgaaaagccatgctatggggcagcatgccctgctggtcgcacattggcatcacgtgggggagtttagagaagatggaataacggggctccacccccaccgagcctgaggcagaagtggacccaggaagcaggatttttctaaatctcctcacatgattctgatgagcagcctgggcctgcagccgcagggttagcacagtgcttctcaaacttaggggtgtgccagaagtacatgagcgcatgttaaaacagatgcctgggccctaccccagagtttctggtctgggtagggcccaggaatcagcaggtcgaatcagttctcattaaggtagatggtgctggtcccgtttctcaggtaggcaatttgagaaacagagaggtgagggtgaagctgaagggcctcgtagccagcacatgggagagggggggctttgaatcctcgaggtaatttattcaatccctttgtgccttcatcttctctatctttaacttggggaaaataatacctactttatataggtgttgtgaagctcagtgagtccttccaaccagaacagtgcctagcccatggtggtgttcagtagcatttatgatcattgctgtctctattacctagcaggatagttgaagggtgtcctcccggcagccttcctccctcagccccagacagcagctctcccttcccttagctccaggcacctctgtgggagcacctgtttccctaatgtcactctctgttcacctgtgtgcctcctccatcaggttgtgaagtctccaacagcaggcaccaggtatgattcaggctagagcccagtgcccagcctggagctgggagaagggaaggagacgagggagcaaggcggggcatgctgagggtcctcgcgttgtgaaaaattattaggtttcttagccctggacagcgtttactattgacctgatgcacctgagtgtcggatgctgagcccaagcatctgcatgtggccccgtcagtcttgcagcgcctgtggggtcctcacaaacagcgcctccatcagccactcacgcccccatgccttctgagcctttggcttcctcagtgagtactgctgacaccacctctgtggcttctgaagacatcccgtgtgctcttcttctatcagggcatgtcgggaggggtaaaccagctctcctttgctgtctacactcccccatgtctttctctggcactggagcccctgagtccctgagtccctgatgtgggtcactaaggagggtgagtgcaaggcaggtaggaggcacctgggagtggcacatgggtccctgcaggcttccctccattctctcctctgctgcctgccagctcccagccaccatggcctctctctggacctgagaggagtagcctcctaagtggcttcgtgtgcctgtcctcaccgtggccaaaatgatggctgtaaacatgctcataacctcagccgactgcttaaagcaccccagcgactttccatccgactgtgagtacaaatcaagccctgcgtctgctcctccctgaacatgccagctccggcatcagggtcgccatcccggctcttcctgcaatgcctgggtgggtcctcgatcctcagctcaatgtcacttcctaagggagcagggcttccctgacccctgagcacccctacctcttctcggatggccgcactgtcctctcctgggcacttagttctagctgaaattagttttccccactaggacagaggctccttgtgagcatgggaatcttgtctgtctccctcatcactgtgtctgcgtgtccagcaggtggggactgaatggtctgggacagtcaaagtggctctgagctcagacccacagaaggggagaatcagccttgctctttccaatgtcttgcagcctcattagggcagaggcagcaattgttctggaaagatcagtagttaggtgtcaagccaactgcattccagctcggaaccctccccccaatttgttggggacttaacgtgactgaccaagtcactcagtgactgagcctcctttgagctgaagggtggtggtggtgagctcattttgctgccctgcctggctaggcagcccgagtctgagccccatagatgtaaagtgcctgagagcccggaacacacagatgacaaacgcaccatggcaaacgcatagatgacaagcagcttgaggtggtgtaaacagtgccaccttggggttagaatacctggtttggagtctggcctctgatacacactgaccaggtgaccttgtgtagtcaaggaatgtctctgggtctgtttcctcctctgtaaaatggggacagtgacacctgctccagcctggtcgtgagaatgagatatgatggcctgaaacagcagcccccagagcagagtccccgttgtcctctcaagccccggggaaagtgcccagcaccgtaagtgcttgataactgacactgtcaagtttctccttccttccttccttcccttctctctctctttcttcctttctcgctttctctttctctctctttctttctgtctcttttctctctttctccccttcctttctccctcccttcctttccttctcccttctttcctttccctccctctctccctcccttccttccttccccttccaccctcccatccttccttccctccttccttccttcctctctttgtctttctcgctttctttctctttctttctcactttctctctctctctcttcctctttctttctcttttctgtctttctccccttccttcctttctttctcccttccttcctgtccttcttttccttccttccctccctacctccctctccttccttcattccttccttctttccttctttctttctttctcccacactggagtgctgcggcatgatctcggctcaccgcagccttgacctcctgggctcaagcgatcctttaacctcagcttcccaagtagtttggaccacacccagctaatattttaaatatatatatattttaatagagatggggtctcactacattacccaggctggtctctgactcctagcctcaagcattcctcccaacttggccgcccacagtgttgggattacagtgtgagccactgcacctggccaagtttcttgaggatagtacttggaggccttctttatttaaaacaaaacaaaaccagttaacactgagagagaccgcagagattgtgcagcctcttcttttacagttggcaaaatggaggctcgggagtttggggaaggccctgtgatggttcctgtctaagctgggaggaaccgaaccatctcatttctaactccatgttcagtgatctcctgccagccacggtctgcagccctcttttggtcccccacttttcctcatctcccctcccctccacccttcactgaccccactctgttcttctctgcttcctgtgtgagaccagatgttcccacagctgcagagtcctcccttccctcttcccattgggtttgaagctgacaggttcaggatttacatggtggggtgagagggaacggcacattcggagtgtggggccttcttaggcatctggccagacctcctcctccccaagtcccagcgctgggtacagcgtgaatgcaggtagcctgtgcccagtgctttgggatatgatttcctggggagggagatgggtgctccaattctctgggagccagagggaacccccaattctccatctttcccaaatgttcgaggccttgcccctctgccccagtaggctctctctggagccaagggacccagctgggaggtggggtatgactgggaccccggcccaagggctcctatctggcgcggggcctctgggggaaggccatgggcagggtggccctggcctggcagaggctctgaccctggccttgcctcgggaagcgcctgccgtgcttgttcctggaggcccgtctgacactcagggtggctgctctgtgaagtcatttttatcgctactgaactaaagtggccacgagaccttgggtggggacttgctgtgctccgagcctcagtttccacattcctcactgcgcctgccaggtccctaggacctcaccccctgccccctccccacgcctccccacacaggagcttgtcctgttcagggtagctccctcgtggcccctgggttgggagatgaagccactgcacgtcccgatgtctgagccagaggcctggcagtccttggggcagttctgctgaggacaccttaggggcctctgcactgcacccccccaccccgctccggccgcctagcaggcctccccagggaccttcacgggcttcaccccctctccactgccacctcttcagaggccccttgaggagaaccctttataatctgcgccgggagccctggttctagctcagagttcttttgcctatatatgtgtcctcctgggttggtctgtctccctcaggctgtcagctcccggacagggacctggctgttcccagcgggagcccagagccgcagaaccgtggctggacctggagagagggagggaggacgggaagaggtgggagagccgggaaggaggaccggaggaaccaccgagctgggaaggggatcctggcctggaggtggggccgcgctcgggtacgccgggcttcccacgagcgcctgggcggcgggccggccggcaggtggcggtgcgcgctcggcgtcgcgggtggcgccggggccgccgagtcccctcctcccgccgctccctcccctcgccggctcctttctctgcgctctcgctcgcgctccccagcgccctcctgctctcccggccgcggtcccctcgtccgcgccgccccgccgccggctccgctgccgcccctggcgaccatggcgcaccgggggccctcgcgcgcctcgaagggccccggccccaccgcccgagccccgagccccggggctccgccgccgccgcgctcgccgcgctcgcggccgctcctgctgctgctgctgctgctgggcgcctgcggggcggcggggcgctcccctgagcccgggcgcctgggtcctcacgcccaactgacccgggtgccgcggagccctcccgcggggcgcgcggagcccggtggcggcgaggaccggcaggcgcgcggcacggagccaggcgccccgggtccgagtcccggtcccgctcctggtcccggcgaggacggcgcccccgccgcgggctaccggcgctgggagcgggcggcgccgctggccggagtggcttcgcgggcgcaggtctcgctcatcagcacgtcgttcgtgctcaagggggacgcgacgcacaaccaggcgatggtgcactggacgggcgagaacagcagcgtaagtgacctccacgcgctcgccgcggcccctacccgggacaccgcgggacacccgggcgggaccgccacggcccccaccccagatccccactatggtcatcaggggcgggttcttggcgacttgggcacttgggtcacctcggccgcgcccctactggcctctggtcactggttacttggggagaggtcctcagattcgtacgcttgtctcaccgcaggggacattcccgcagatttcgggatcctgggccacctccgatactcccccactggcctccaggtcttgggttacggaggaggaccccagaaccttcggaagcctgcaggtccttgagggtaccccagctcggcgttacctcccctgcccccagactccaccagctgagcgtcgcgttctgggattttgggctccgggatccttccctccctggtctaccagggactccgcggtggcgcctccgcaggctccgggacttccccggtcagctcgaatcctgttctgggactctgggatttctgggttacccctctccccggggtactctagtgcgacccgcggctgtcttgagctcttgctgccggtcgccccgcctggatgcactgggacccgcgtaccccc

SEQ ID NO: 10132 - DNA, 6000 bp, Homo sapiens
aagaaatgaaattctcaaagctaagaacaaaatcttaagaaaacaaaaagacaaaaaaagtagtcacgaatggcccaatacaattatctaacaaatgatatgttctatatttattaagaaaataaaccactgaaagcatacatgcactacaactccgtttatattaaggtcaaaaagaggtttatttcggatataccgctagatagcgttaaaactataataaactctgaagacaagcaaggtaacagataacacaaaattcaagataatggtttcctctgggaagcagaggaaatatattcacaaaggaacacaagaggcttaaaagatacctttatgttatgtttcttaatttggatgctgggtatatatgttcgtcttattactcttctgtggtataataaaaaatatatttattctttgtccttggttcctggaagaaagctcctaaaacccttggaatttcctaataggaggtgtcttttatacttcataatatatccctttcaattatgcctgagtttatgttaatgaggtgactcataggggttgggagatagagagggaccctaggtaccttcaggatggaggctggttaccagaaaaaccaactaggtgtttacaggattaaaacttttagcccatctcactatctctgacaaggggagaagaactggagactgagttcaaataagtgactagtgattaatgattaatgagtcatgtctgatcattggaagctcaaggggcttccaaacacattaatgtgctgggagggtggcacagagagggcatgaaagttttgcaccctctgtcctccataccttcccctatgtgtctcttccatttggctgttcccaagttgtatcctttacacaaaaattgtagtagtaaatatagtgctttcctaagttctgtgagtcattctagcaaattatcaaacttggggagtaggtcatgggaatgcccaaatatggagtcagcctggaagaagtccaagtaggttgggaatacctgagacttgtggctggcatctgaaatggaggcagtcctgtgggactgagcgcttaacctgtgtggcaactgtgctaacttcaggcaattagtaacgaaattgaattgcattgtaggacattcagctggtgtcagggaattgctattggaatgatgtatcattaaatgggcgggtgggtgtgtttcatacatactttcttttctcataaattatatatttaataggaataattcaactactgtgaatttaaaaatcaaacaaaaaactatgaagttgcacatacttttaacttatgggacaagtcattattcataggtgttaagtctcaaaacaggcaggattgcctggattttctcatttgcaattttatctttcaatctaacaagaatggcttcattaattttttacacaaaacattattaatctaggcattttctggcttatttcccaataacttactcagaatttggcacatcaaaaacttcattgctgtttacctcagtattgaaacaaaaacaaatgaaaacttattcccaagtggcattgtaacgaccacttgattttccccaagtgaaggctttaataactcaaaggggttacaattcatgcaaacgaagaaaagctacaatgctactttcatgcataggtatactaaatatacatttacatagtctcaaaatagtccttgtctgaaatatttgctaaataacaagaatgcaacaactttttgaccaaaatgatcttctgcattccttcctaggtagagcattaatttaagtatatttacctaaaattggtttcttataattttaaatgtaagctattattacttaacaaatcagcttttaattataagcttattattttagcctacagaaaaatatttataaggtcattttgtttgaaatgtcactgtcttcatttttctcattatcttccttctgtttggtgaaatgatgtaataaactgctgcaaattctgtttctcactctactgttggttcatatttgcagatcatcatagcttaattgatataatgaacaaatgcctcttaaaaaacttttactggtcagcagaaataaaaaacaaacccttcacaaactacattgataatagtctctgtccctagcactatcataattctcaaaaatctcaacaatttttcaccaaactaaaatctctattttttttttttttttttttgagacggagtctcactctcaccaggctggagtgcagcggcgtgatctcggctcactgcaacctccgcctcctgggttcaagcgattctcctgcctcagcctcctgagtagctgggattataggcacgtgccaccacacccagctaatttttgtatttttagtagagacagggtttcaccatgttggtcaggatctcctgatctcatgatccacccgcttcggcctctcaaagtgctgggattacaggtgtgagccaccatgtcgggctaaaatatctactctttaacaattattaattatccatccagtagaaaaaactgaggaaaataaacctgagtaatatttacccaagtctcttgtttttgaattgcttctgtcatggagcaaggaagcacagattttgatcacaagagattttgatttttctaaatatccttgaatctatctagagaaatatgctaaaggtacagttcaggaacaaaaaaaaaaaaaaacaaaaaaacaaaaaaccaacacccaatggtcccaattcaatactgctttttaaaattaagccttcttatcacacaacaagttatttttgttatatgttttatcattctaactcatattcccaaacttttcaggattttacttatctatcaaaaaatcccaattatattcctgttctttccaatccccctaaaaaaaaaaaagcagtatgtctcattctcttctctgctgataggagtgtaaaatggatcactctatgaagggcaactgtaaatatctatcatatttgcaaacacatttcctcttggatccagcaattcttttcagaatctgacagttacccctgcaaatgtagaaatgacatgtattcactgaagagttgtttctaatatctgaagactggaaacaacgccaagtgtccacctacgcgtgatttactgtataaactggagtatatctacaaaatggagtatgtgacaggaaaaaataagtttaattgaatactgataaggaggaatatccagaatatacagtaaaacaggaaaaaaaaaaacatgaacaatgcagaaaatattgaaggagagaccgagtgaaataagactgtatattctcatctgcttgtatctctgcatgaagaccggaaggataaacaagaaactaatttaaaatgattacccgtgaagactattaggaatggtactggatagggactagggaggaagtgtttcttgctgcatttcttttcatgtagtttgagccatgtaaaagaaatatttgctaatcaaaaaacagctttaaaaatccagtgggagaggctgggtgcagtggctcacccctgtaatcccagcactttgggaggcccaagtgggtggatcacctgaggtcaggagttcgagaccagcctggccaaaatggtgaaaccccgtctttgtatttttgaaaaatacaaaaattagcctggcatggtggcggtcgcctgtaatcccagctactcgggaggttgtggcaggggaatcgcttgaaccaggaggctgaggttgcagtgagccgaggctgcgccactgcactccagcctgggcgagagagtgagactccgtctcaaaaattaaaaaaaaaaatccagttggagaatcaaaaatttttaaaaatttgactgtgtaatcctacaagaagtaagtagcttgagaaagagaaatgctgataaagtcgcattaagtttcagagttgaaattcaagctcctgtatctaacatgtttccctgtttaaggtagaatttaaaaaaaaactatatatgacatatatatgtcaacccaaaaaaataaagcagtatatattatatatataagaatatatatatattctcctttatatgttttttgtttcacatatatatataaatatatatctcaaccacaaaaaaatttggtttgtgacaaagatgcacttatttgcacgaacctatcttgttaatgatcaagaaatctgctttgttacaatcattagaggacagaaatatacatacatatttaaatctatttaatgaaatgcagttttatgttaaaaatcaatgatctgctaacctaaagagtcgcacaggaatactatgattattaaacacaatgcgattctctaaataagtaaacacgtgcaatgatatcaaagttcaaaattctctaattcttccacaaagactatgaaaatcaccttggagtgtatgaaccagcgtcctggccccgccaggtcggggctggggcgggcgcgggccgggagcgcttaccccgcggcaggagcgattcagcgccactacctgcttcgcctggttgtggtgtggctgctgcgccaaccgaaaggcctccttaatccgcagcagtctcttttcgctcccatggctctgggactctgtccggactagccctgtccgcgctcggctacatccggcccgcccaccagctcagaggcagagttctccgcggtgtctcctagggtttcttgtcagagggccccaggcgcctagggagtcgttaccgccctggcattcaaataactcccgcgagaggcggaaatcccgcgagactgccgacagagcgtagggaagtggaaaagtggagcctgcaccgcccgctcccggcacccccggacaccgccccggtctcacgcatgcgcagagggccgatccagttcttttcggctggaatggggaatttgtgaggtaggccggaagtggtgttgcggagggaagtgtggggagagcagaggcgcagctctgctggagagacctgaggcttgcagcgctgggcccggccgggtcgctgcggctgggctggaggtgaggcgaaagaagggcatcctctgatgggagtggaccggagtccgctaaagcgaagcattccagggttcgttgcgggaaatacagtctggttttgccccccgtatgaattgagggaaggtgagagcagaagcaatccgggcctgaagggcgattattctagggtcggccgaggggttcaggccaaagttcattgaaatcctagctgggtccctggaggacgagaaaaccggtcaggagtctcctgggaagagggtcatgttttaatctagctaaagctggtacctggcagtttccactcttaaggcctagtgtactaactaatgtgtgcgcaatgtcaaaacaggaaacaaagggaaatgcaagaggtggaaggtaattttaagttagtggcagtatgacagatttccagtgccttcaggaaggtatccagccttaaagatgctttttttaaatagacgattttagacagaaaaaaggtagaaacaaaactataacacatgtgtactcaccactgaattggagaaataaatgattatataagtgattgaagtcctttgtcagctctaccccgtctcattctctttccttttgcctaaggaaaccactctcctaaccacctttatgcaatctgtaatgtgtacatctttttgcagctagcttgttttacataatgtttttgagatttgtcagtgttgtgtaactccaccttattcatcttaatagctgaacagatattctgttattttaatatgtcactgttcattgtttagtatctccagtgcctgacatactttaggcactgtaggtagctaaatgttagttgaatgcatggctgctgtagcatttgaactaagtagaaaagaataaataggacttcatgtgacccaacaagagtattccaggcaaaaggaatactagccaaaagcagagacatgaaagtgcatgaactatttcaagaatt

SEQ ID NO: 10133 - DNA, 6000 bp, Homo sapiens; identical to SEQ ID NO: 1093

SEQ ID NO: 10134 - DNA, 6000 bp, Homo sapiens
cagtgaaccgagatcacaacactgcactccagcctgggcagcagagcgagactctgtctcaaacatacacacacacacacacacacacacacacacacacacacacaaactgatctctgccaggcacagtggctcatgcctgtaatcccagcactttgggaggtggaggcgggctgaggcaggagaatcgcttgatcctgggaggtagaggttgcagtgagctgagatcgcaccattgcactccagcctgggcaacagagtgagactctgtctcaaaaaaaaaaaaaaacccaaaaaaacagcaaccaaaaaaacctgatttcatgggggcaagattcaaatgtcaacttcagtttgagattaggaggccctgattcattaaaccgatagttatgtattggacctaccatgagttgaatgcatgcatacagtgtggtgggaagggtctgtgagctctgagaggccagagtttgagagtctggcggtgcttctagtcataacagacacataataggacataaaaggagtagtatttacctactaagttccaggcctatgataatgctttacactcactggcttgccaaataacttataaactatacaaactttattatcaggaactgttatatttaataactcaggcaaaatattcacatactcttaccagtactaatagtcattaccatgattgatcttttaggctgtctttgacaaacagaaatggacagtgtcgtacggttccagcatttaacctctcctccacctcaatcttacttccctacgtttctctttgcctcttctttctcacttagttttgaatcaattatactttgtcgatctgttagctgtcttagatccttttaggagcagcatacaaatagaaaaatacagtctcccatatcccacaaccaaatataaccacaatgaacatttttgtgtattgctttccggtatttttctctgcatatttatgtacatattgaagccaggttgaagacagcctgtaattatgtcagccctgtgttctgttccgttagcatttctccatttaaacctgactctttgaagtccagtgctgtctcatgactagataacacattatttgacttttctggaattctggctgtatctaaggggataggtttcctgtcactgagcctgactgaacaattctgagattatcaacactgccatagggccccgaaaaagcgtctaatgaatgcaaaagttcaaagcggttttgttcaggtgttatttttggagacactttctcaggcttttatgatgcaatccactttgtgcccctctcttgcagcagctgcggccagggaaaaagcactaagtgggcttgctcactggtcctcaggggtgggtaccctgggcaggtcagcccagaagtcagctgcctcctctccaggccctgcctggacagctgagagtcaagcagacagttatgtgccatccctacctcttttctgtcttcagtaactggcagcttcatcctgccagagagtttggaatgagctaggactttcccatcagtctgaactcctgggttttcccaggcctggtgactcagagggtaaggcaccgagccgaggaagagaaaggagaacctggactcctgggtgcctttgtctcaccacacaatcacctcccaggaaggctgtcatccaatcactcctgtggaatctctctgccactttgttgtaaagaaagtcagccccagtgaagggtaaaaagaagtgccagagggccttggggacaagccatatactggtagaaagggcactggggcagggtccgaacagctgagagtatgtctagcaccaggatgaaaatcagtagttcacagagctgctttgtttgacctactccgtatttttttaatggtacatttcacataaagacctgtatatctggcttccccacaaaagtcaagatctgacagcatctgactatattttctcatgcaatatctgaagctgggtagcagccagccctggatggggtgtttcctctccagattaacacagagcctaccaacttgttaaatctcacctcataggacaataggcgcaaaaatatactgaaatgagttgaaaaaatggtaatactttttttttttgagacagagtctcactctgtcgcccaggctggagtgcagtggcacgatcttggctcactgcaagctctgcctcccaggttcatgccattctcctgcctcagcctcctgagtagctgggactacaggcacccgccaccatgcccggctaatttttttttgtatttttagtagagacagggtttcactgtgttagccaggatcatctcgatctcctgaccttgtgttccgcccgtctcggcctcccaaaatgctgggattacaggcttgagccactgtgcccggtttggtgacacttttttgatgaaagtatttttttttaatttaatttttttgagacagattcttattctgtcatccaggctggattgcagttagctctcactgcaacttccgcctcccgggttcaagtgattcttgtgactcagcctcctgagcagctgggatttttttatatttttagcagagacggggtttcgccatgttggtagacgggtctccaactcctggcttcaagtgatctgcctgcctcggcctcccaaactgttgggattacagatgtgagccaccacacccagcctcgatgaaagtattttagatgtttgtatttatacataaggctctatgtttgaagtactaaatggtgagagtattttgtatctcagatggaataacgataggaaaatgttcttcagcaaattgtactctcctaaagggagagattatagagtgatgaacacagacacgccatctacctttcctccagactttgtaaaaaaaaattatataaattacaatcccaaactagaatcagataccatccctgatctactaccaagatctatacacattaagagaacaatgttcgggattgaacctgttttgcctttttaatcggaacacaaaagggatacctttttctttctccaagtttttgaaattttggtctccctcctacattcactccttgttgaaagtaatggaaaggcaattaggtctgtgtcccaaatgaaagcccacagtcaggaggggattctcattgaggtgactgtcctgttaagacctgctcctgtgaacccccaagcacagggcagagcaggacatgaactaagagccaggctttgccgaatccgggtcgagttcaccgacagcagtgtgtgcagcacgcttcctcctctgcaccctggcagtagagcccttcctcattgtaaagccaagtggtgtctgcagtccgccttgcccagggctggaggcagagctgagcttggtgaacaggtgccaggggattcctgtcatcagtggactatgctttagaagctgcttgttgcaaaggtactggttgatcattgtctgagagttggatctgaaggccaacacccactagcaaaaccatcatccctgtaataacagcaacccaagcagatttgatttctccagtgaaggttctagatgagtctaatcaaggcttcccacccatcttctcccaacaccagagtttccctgtgaaaacgatcatggttaactcgcactgaatactatttatgtgccaagtaccattccacattctttacatattttagctcactttactccaacggggaccattattcccagtttgcacataagcaaatggagccagggaaagcaaggggcagaacagggaactgatttcccggagtttcggcccagagtcagtgtgcttagccaccgccaacaccagccccagagctctaggctcctggaagtcgtgctcccgagtccttccccttgcacagtggagagaactcgatgttggaatgaaaccagctaattccagtagggtgcttccgctgttgtgaggagctgggcaactagtaagctcactgagcctcactgtgctccactataaaaccaggagagtgcgcagcagaggagagggtctgggtttcagaataagaagcaggttttcttcctgctcagcaaatcctgggtaattgtatcatatcccctaaccccttaaacctcagctagagagggcgccagtcttagccccagggaaggctttcgtgtgcacattggagacaaagcctgcccagcagtgcccggcacagaactggggagctgttgggataagcatgggggtggactctccctgggacagatcctatctcacagcagtttggagaactgttgtatacacacgcaggtgacacgaggcagagcaggatgtgaaacgagcgcagtggtttgccaaacccgcagcaggcttaggacggagtggtgagaacagcccccttccttttcctcagcttgacggtcccagcctttcccattgcggacctagagcccagactcccagggcagaaagcgccccacagactgataaaggtgaacaatccaggctttgtttccaagggctttatccctgactttccaactggcttttatctgtgtcttcacgtctctgacctcttgagcctcacaggagctagactagaaggttcaagttcttgaggagaaggcaggggcgggagagccccacttgcgggaatctcgtgcggaccgagtcggggcgggagagggcgcgcaccagccaggctagggcgcgcggggcgccgaggggcgcggggccgtttggggccgttcgggccagttcgcgcggcggggcccgtcggagcttttctctcggcagcctggctggccgcgcgtcttctccgcgcagcgggcgaagtcgcgatgggttcattaaggcggcaggtaggcagtgccccggcggcggctgcggcaggcggtcctggaatgtgcgaggggcgtgatgacagcggccagcctctttgcgcaacaccttcgccatatatacccggggcgctgcgctccacctggccgccgcctccagcccagcacctgcggagggagcgctggtgagtaccgccgccggggcaggggcgcttcctcgctctttcaaggactttgattcacttaattcttgcaaatacctctcggtgctgacttcaaggaacttggctggctttgggccgcagaagtgaaaaacacaaagctctccacaatgttcaagttgttttcttcttaatgttacggttattgcttttattacagcttttgctgctacactcttacgatcgacagtgttattaatcagccacacttgtggattctaaaatgatcactgttttgagagtcgtggtttggaagaggaaaggcccaggggatagaaatctccacctaggaatcaggatagctaggctctttgtggctgggtcaccaactagccatgtgacaacgctagtccctgtgagcccctgggctgccgtcttccattctttataagaaggggaatgcgacatctcaggaccatgaaaattctaggtttgtggtggctgcctggtgatgtgacactgccccccacccaagtgtgacttccacgtggtacagtgcttgtttgcagttatttaaggtgcctaggagacagtcttagtttgtttctattagggcccgtggccatcagcgaagggtccgtccttcagccgtcttggggagcaaagcccgcaatttatgttttccaagccacaaatgggtgagcaggctggggagataacttacaaggagatgtgcacaggagtggttgggttcggggactgcgcatcctcaggccagaaagttgggggctgcatggcatggagttagttcaggttccctgcaacggtgcctgccaccggtggctcgcactgcgctgaagagagttggaatctcgttttctttgaggaggtccctttttcaaacatgttgatttcatggaagcagcttgtggatttcatcactcgagtcccctcttcctgtttgggtgccccagggggtttctgtgttagccctga

SEQ ID NO: 10135 - DNA, 6000 bp, Homo sapiens
ttgtgaagtacaatagatcactcaaacatattcctccagtctaacagtaaccttataccctttggtcagcatcttccctttccccatccctcgccccattcacacttaccagcctctggtaatcacctttatactgtttctatgagatgaacttttttttagattccacatatgtggggtcatacaatgtttgtttttctacgcctggcttatttcacttagcctaatgtcctccagttccacccatgttgcagtgaatgaagaatttccttcttttttaaggctctatagtattccactgtgtgtatatataccctattttccttatccattcatctgttgatggacatttagtttgcttccatatcttggctattgtaaataatgctgaaatgaacatgagagtgcagatatctcattgacatactgatttccattcctttggatatatactcagaagtgggattgctggatcatatgataattctattcctagttttttaggaacctccatactactttccaaaatgggtatactaatttacatttccactaacagtataccagggtttccttttctccacatcctcatcaacacttatttgtctttttgataatagccatcattttctcaccattttcaattgttatgatctttactttagctccatcacaattctagtcctctttttgtggaaaatgtcaacattcctgctgcttcagcatctgtcagttatcatgtgatcaataatattcatgtaacacctcaaattaagcagtatagagcaaacacatcctatttaataatataaacgactcaccccacacgccctctgattgcaccgggctttagcgggcaaagttaactcgcttctgttgagcggcttttaaaaaactatgttagttaaatctagagtttttaactccctatcctggatgcaagacacttaaaaagacttccttcctctgctcccagagaaagcagcaataaaattttccaccttcactacaccacttgaggactatctcatgttttattgggtttagggaggaagggtcttgctaatgagttacttccacggtgtcacttctattcctagtgctttattaaacaatttgaggaccccatttttatgctagggcttcattgatcgaatggagccatcacattgtctatatcactttagaggtgtttccaaagttctcagcacctcgagtcccttgttagcgtttgtcgagagtcagcgggaaaactcgatacctaacagcgtttccaccgaaggcagctctctgaggggcttcaccatcaagagcaagcgaaccaggctggaccaccctgctgggtctgtcccgacattccagggccacgcagggaagtcaaagacgggaaggagaagatcagtgggagggcgaggcgccggaattccccacttctatacctccacccctactaccgccccacgtccaccaccctccccactgacagcccgccgcgcccgcccacgcggtgacgccatctcgcggctgccgggcgccccgcccacagagtgggagccggaagccgggcgggcagcggcgcgcggcgtcccggaacccagcagcttgagaactcgcgcacctgggggaagccggcaggaggcagcgggcatgcgcggggctgcggtggcgcaggcgccctgccgcgcccgccagtcgggaaccggttctccgagtccgagctggcggcgcgctgtgggctgtgcgggagcgaggggagaagagggagatagggagcccgacatttgggaagggcaggcttgcctctgggatggggaggagccggtgcacggatcctgctgtgcctctgtgcagggcgcgcccagtagtttgggatttgcaagaaaatgcaatcaaacaacatgggcaaagtgcgatgcgtttatcctaagccaagaacacgcttagaatgcacgcccagagccagttctccccaagggatggcaacgcacctgtgtgccgggctccgcgcaagggctttccctgtttattctcccgccgccgctaacaaccttgtggggcgggcatggttggatccccaatttaaaagtggggaaactgaggacagattaacctgtctgcacgtaacacagctgaaaagtggtggaattgctatttctttcaggtttgcctgattctagagctcaatgctgcccatcaggtgtttgaagtcatgatttggtgaaaatgggacagtgaagacgttctgaaaaaaaaaaaaggcatatgatgaggtttggacattgagaggtataggctggctgtaggagtcgggtaagtgccaaggaaaagggcctcagggtagcttttgaatgggatttggcgacagggaaggagagaaagctttggggtggtgagaacaagggaagggaaagggaaaacaaaagcgtggaggtgggaaaggaaacctggggagaaaggtaagcgattgcctcatttggagtcttgtgtttatgtttggcttgcaaatagaagcatatataattctagggttgggcttttcttgccaaggaatggattttctcctttctgttcttaggtttatgctgtgatgcacagtgacacgtacctctctctgttcagcaaggttcattccggctattcatttaacagctggaaagttctatatctgtggcaaagatgatctgcggtggagggtttattcctggcccctggccttcctggccttggtcttttgagtgcttgccggatccctagttcctttccggttccagtagtgagaggaataaacacttaaaactccagtccaatacactctcaatgtcaataccctccctatctttaaaagaagaaaaaaaaatactaaatcatctttgtttaaagaatcctggcccctgtgatttgttaatttgttcgtggttttatactgttactactgtaacagtttgcactacaccatttagcaactgattactactttgtattagcctctaattgtttaatgggtgtacattttatctccttaaaaagattgtaagatgccttagtcatgggactgtgctgtttatctcatagccctgactgctgacttaattgcctttttcaagtgtctctcttgcctaaccctcaccactcagtactctgcctggcacatactaggtactcagtaaacatttaataaatgaaatgcctcctggagagcaggaacaagcttgttatttatattgttctggtcccctagcagaattatcttctctggtgggcactcagcactctggtgtgacttcatcgctgtgcctttcagcaggggaaatataatctcccggttgccctataaagaattgccacctgaacactatgcccacaagaagtctgctgagaaataactgttgatagattgacttagcctcaaagacatccttgattcttttctaaagtgtgcatctgcccttccacaataaacgatatttgtggttatcttggccaggctacctaagaaatactttaggagaatgtaatttgagtatcttcttggcttgagaaagcaagcaaacaaaccaataagcagaatgaaaccaacaaaacccaatagcaaaaggatcttcgtgtttaataaccctatctgcaaattttaaacaattttgtgcccctgggagaaagaatgcctccttgcgtgtgaatttccagggcttttaatttatagtgacagtacattcaacacttccttttaaatttgaagggaggtggccttaaaaatatgctggcaactagtttggatgagaaagattccggttctttatttattcaaaccaattagaccaggtctgaacaggatttacaacagagagcagatcttgggtgcacaagagctttgcttcattccaggttggcgaaaacaagtcaagtctacatcattgttctgtcagccggttcaggatacagcacagagtcgatgggatgggggtgggaaggtgatgagttcaggtaaatgtacctaggagagtcagaggctaaagtaaattctcttaaataggccttttcagtggctgctaaatctcgctcatttcccatgaattagctgtgggatattggggacaacttacttcacatttctaggtcttagtctcttcattcgtaaaagggggtaacgataattttggagttatagcatgtaaatgtgtaaaacggttagagcaatgcctggtacactcacacatagcacgcgctttgtgaaatgtttggcaagtaaataaaacgctaagctatgctaaccgcgtctaaacagccagccacttgtaagccccacctatattgaaattacggggacgctgctgttttccgattgcaagattttcctgatccatgcaattactttcgctgccctctacgaggctgaaactcgccctcaggatgtgggacgtctggactcttctctccgtccccttgtagccccccactccccctcgcggtggtaccgtgaatgagggagaggtacacgtcccccttcttccccgcctcctatcttcgcggctcgctaaagcgttatcagccgccccacggtactaccgtccgtctaggaacgcctccggggcggggctgggatgccgcgcacgcgcagtacagcagcgccgcgcctgcgccgtggagagcctgagggaggcgggggattggtatgcgagcgaatgtgcgaggggagggaggcgtcccggcggagcgtggtactacgaccagcgcgggccggagggggcggggggatgcgccgcggcggcggcggcgcgggagctggggttggtgtttggcggcgccagagcagcggatcccggtctcgccgcagcagcagcgcgggtgtcgtgcaccgcctgaagacgccgtacctttctaccccccaccttttttttttttttttttaaataaccggaaccaatgaacgcagccgggatcagagctccggaggccgccggtgccgatgggaccaggctggcgcccggcgggagcccgtgtctgaggcggcgggggcggccggaggagtcgccggcggcggtggtggcgcctcgcggagccggcgagctgcaggcggccggggcgccgctgcgctttcacccggcttctcctcggcgccttcatcccgcctcgactcctggcccagcgtggggctggctgctgcggcggcggcgctgggctgcgttgctggtgctcgggctgctggtagccggagcggcggacggatgcgagcttgtgccccggcacctccgcgggcggcgggcgactggctctgccgcaactgccgcctcctctcccgccgcggcggccggcgatagcccggcgctcatgacaggtgaggggccggggggcggcgggcggggctcggccggcagcgatgggacccccaacccgtgcagaggtcagcatctccgccggacgtccgctattccgcggctccggccagggcgcgatgcggagccctgcctgctgcttcgtcgcggtcccctgcactccggacgtctttccttttcaccccgacaccccgccctcgccgagcctctcgacggcactgattcccctcccttcagtcgggctctccgatcttccaagctgagcaatgcggtggtttctctttcgtgctgcagaagtgccagcagggtctgcaggggactgggctgattttttttttttttttttttttgaggctgctagaaaaagtcagcagcagcattgcggtattgagtctacctctggtgctgcttttgcaaaggcagctggcagcgagtctcaccggttcaaagctccgcttgagcacagcgtcccaggggagcctgctaaaggggattctttgagagccataatacctagtgatattagtggttccgtgttagtatgcagaaatgcctaagtttacagtgcattttttgcggggtggaaggaggccgttttaagtggtgatggaaagtgtttggtggtgggagcatcactgggtgacaaagggtgtagaaacctcagcaggta

SEQ ID NO: 10136 - DNA, 6000 bp, Homo sapiens
tcttgagttactttctccttttctgtcaaactgtttttatctttccagaactggctatcgtgtttactgtatttaacctttttctcatattattgtgaatacagcgtctattataaatgaaaggccccctgagatcacatctccagcatctactttgtattcttaaccataaacttttgttgtagttacttctcttactgtcttttcttgaggcttgaactacatcagggaccctgaatgctatttttcagttcagccactgaaatttcttaacggcaaaacaggtttaagcaagcgaggttagtaggtaaattaaaaaaaaaaaatctactgaatattttaagtttagggtaagatttctggcacagaaaatgaatcgtttgtcaaggttttattaaatgcatattagcacgggatgatatttatattttaatcaatttcattttttacatcttgatttcaaaggggtatttccttttattgttcttttttaaaaagccactaaagaaaaaacagaaatctccatttcaacattccctcaaacattttgcttcctacatgcgatgacgtctaatcactctgatcgatgcaagctttagggcactgatctcattttctctctccagttctggccgccaaagcagcagcagcagcagcagcagcagcagcagcagcaggctctttaatttattgcaggcggttacactttcgatcccatttccttctgaaccctttcctctcaggttgagtagataaatgcagcctcgggtctgagaagccgggggggggggggggggggggttggtgggtgggagcgaagccggatatcacattccctcggtgaggtctggtaccgggggggattaagtctcccggttccatttaatgaaattgctgagcacttgtgacactggctctaagactgcggaaatggggcgggggtgggagaaactgcttctctcttcattcatcctctgcgccggcgagaggagagagtgtcagcccctagagagggggcggaagaggactgggagctccagccgccgcaagggcgccccgagggctcctctcacctcccccgtacccctaccccgcccatttcctttgcttgcccagaacggcgctgcagggcaaagccgccgccacttctttgctgctctggcagaaaggtcggagcctgggactgatgggggtgggagcaaagccagcaggcttcttggcccccgcagtctgtcctcgctgttctccatgcagcacacgtcggacccatttcccacgctggcttggctccgccgcgaagttggtaggaatgagagtgaggagggcgggctggagacttcctcccgctcgcaaagaggaaaccactccactgtgaaggacgcgctgcaactccctagtcatccgggaagaaatgtgcagcgcgctgaggaaaagccgcccactccttcgcgccccgctcaagtgtgcgcctggagagtgcgcgccagagccgcgagcaaatgctttgaagatgcggagaggcttattcaagtttatggtctggagagggaagagggagtgcacaacgtttctgcccaagcggctgcctgaagtttgcaaaatcttagtaaggcgatgaggggagtgagtgcactgcaccatattgccgcgcatcggaatgcacggcgcaaggccgcggagtggagacggcttctcccatttgcctccaacctgggaaaaaggggaaccagggtcggaggtttggagagaggcaggcgttccgataaacccgggttcttgccaaatgtaagagggatttggctttactgccacttagccggccgcgaaggcgctgcggagcccacccccgcccccggctcgagactgcggcggtgcgcactgagcctgcgcgcggggcttttctcgctgatgctgcagatacagagctgagaggttcgggtgccagcagcgggagggttagcgggaaggccgggttccctgccctggcctcggaggaggagccaccacccctggggtgatgctactttcacagactggaaaatactcgccagctccctgacacacacttagacacacttccatccaacgggcatctacgatcccctgtagggagagcttggaaatctctgccgcctctccctcctcattcctgttcctgcgcccgcccaaacaaccgcgcgctacatctgctcgttgactttattggtgtttgtcttgtttaaatcattctgcctcgtcacccaggtctcgtaaagaatacccacactggacagattttattttttcggctttaaatttttctttgaggggaggcccttaaatgtgtatggatacgtcaggcgagctgaagactaagcaaatcccagcagcggccctttctctctttcgagatggtaaaaattctccccaaatacctacagtccgtctcagtcgtcttaatcctagccgggcctcttcgtttacagccactgaaataaatgagtaaatggctcagttcaaaaacacaaccagacctgagatctgatgaggccggctgcggtggtcgtgaatgaaaattggagaagccttgcttcaggaaatagggacagtcaagggacacaaagtcaaaaggagagatgggaaagctggggacactttggtacacaaagttgccattaaagtttatttcccttttatccagataggtgacgctacactttgccagttactaaaggctgcaggtttctgctcagaaaataatatcgaggtttccaacatgtgtttattccccaggcgcgcacacacggtctacccccgcaagcaagcacgacgacaggaatgtcaagcatttaaacaaagacagacatccttcaccctccacccaccgccgcccctgccccccgcaaccatccaaagtctgagctcccaaaaaaggatctttctccagctctctggagtttgatgttctctcttcactactgcagcccgtcatggtttttcagaacagagtggctttctgggcgctcgtaggttccccaggaccccgataaccatgtcctaaccaagatcctaaatcgcgaaccggagacactttccggggggaggaggacgtcgtctgagagggagggagaaggagaaacctatcctgacaccagctccgaaagctctcacgcgtgaactgggcattagtcaagggaggaggaaatttaccagcccgagggagggaaaacaagtcccccagagaagacggcggtactcgctagggagggggactgggctttggcttaaagaggactggctgggattgggcacactttgagcggcccctggagctgaggctgggctttcccgagcgcggcggctggctgacgctccctcccgcctccttatcccgggccctcctccctcgctctctcctagtgtgtagtttcggcggctcggctgctactgccgccgccgctgcagcagcagcgtcagggacaagcctgatccgtgagcgagcgagcacccagcagcaaccaccactttgggcaacttgcgggtttcctgctcgcgggtagcgaacgggagattcccactagcggttcagtgtctccgagccgctgcagcccgaggggcggcgggagcgcccgcaccagactctcccagacgcgaaaagggacgagacaactgcggaattcaccagccgtgccagggcacttccgaggccacaaccgactgacactttttctccccttggcaaactggatttttttttttaagctacttggcagctgtctctgactccacctccccctccacccccgcccgaaagcctttggcttttcttcggaaatccagacagaattgggcatctttgttaattgccgttggggacgcccggccgtgcgctttcgccggctaacgtcgcctgtgctccgagcctggtttgctcacctttgaactgcaaagggatcaagttcagcttgagttccctgcattgggaaggagagagagcgtgcaagagagcgagtgggagagggggaaaggggaaaggagaggagggaggagagagaggagggaggagagagaaagggagggagggaggggagggatcgagagagagcggggagagagaggctgcaatctcctccctgaatcgcgcacagcgctgcagatcccactgctccgacatgcgggccgaatgcaggtgagaaaaggcacggactctgcggctgcgaacccaaacttgggcaccgcacggtgcgcactgctcagccttcgcccccgtgggcgaaaggctgctgcggtttcaggcggctgcttcgtgactaatgaccttgcgcagagttgttaagaaaaaagagaaacccgcgctctccggggtgagaagggactgactctgggcgtctctgaagatggctcgggcttctctttggcgcgccggggggaccctgacactgaccgctctgtgacgcgagtagtctcccctgcaccgtgcccgaagcgacgtgccgggggatttttcattctcgatctgttgactggctcccccgctgcatgagcagagtcggagttgagactggcttgttgctggccccagcgcctggtgcaggaagcgactcacgtttgtctgggtggccggagccggagcagagcctgggtttggagtgagtgcctggaacgtgaattggactcaactcgagtagcagcaaagaccagcgggctggcaggcgggggaggctgcaggctcattccccacctcttcccagccccactgcccgtctgccggagcggttctggccccttccgacagagcggggactagagccggggattctccgcccgctgaggggatgactctgggttgggggagcgccgaacccgcggcgcgcagtgtcccgtgaactgtgagtactgcgactgaacggcggcaggcgagcgggcgattagcacccattgcatgaattatgaaacaataactttcggaagaagcaggaggaaaaaaagaagcatctatcgctgccctcccacccccattcccggccaactctccacgccgcttttgccccctccctcccctccctctcgctccttcctttccgggagaggggagaggactcgggggagggcaggcggccggccccggaggaggggggcgccgagggggctgtggttagaaggagcagtagcagcagcagcaggagaagatgctgaggatgcggaccgcgggatgggcgcgcggctggtgcttgggctgctgcctcctcctgccgctctcgctcagcctggcggccgccaagcagctcctccggtaccggctggccgaggagggccccgccgacgtccgcatcggcaacgtggcttcagacctgggcatcgtgaccggatcgggtgaggtgactttcagcctggagtccggttccgagtacctgaagatcgacaacctcactggcgagctgagcacgagcgagcggcgcatcgaccgcgagaagctgccccagtgtcagatgatcttcgacgagaacgagtgcttcctggacttcgaggtgtcggtgatcgggccctcgcagagctgggtggacctgtttgagggtcaggtcatcgtgcttgacatcaacgacaacacgcccaccttcccgtcgcccgtgctcacgctcacggtggaggagaatcggccggtgggcacactttacctgctgcccacagccaccgaccgcgacttcggccgcaacggcatcgagcgctacgagctgctccaggagcccggaggcggcggcagcggcggcgagagccggcgcgccggggcggccgacagcgccccctaccccgggggcggcgggaacggcgcgagcggcggcggctcgggaggctccaagcggcggctggacgcatcagagggcggcggcggcaccaaccccggcggccgcagcagcgtgttcgagctgcaggtggcggacaccccggacggcgagaagcagccgcagctgatcgtgaagggggcgctggaccgcgagcagcgcgactcctacgagctgaccc

SEQ ID NO: 10137 - DNA, 6000 bp, Homo sapiens
gagatcacgtcactgcattccagcctgggcgacagagcaacactctatctttaaaaaaaaaaaaaaaaaaaaaaaaaaaatatatatatatatatatatatatacatacacacacatatatacttttcatgagtattgtgcaaacttacattgcaatcaacaatctaatcaacactggttttcatcacttatcatttttatttttgctaattttataagataaaatattgaccaggcacggtggctcatgcctgtaatcccagcactttgggaggccaaggcaggcagatcacctgaggtcaggagttcgagaccagcctggccaacatggtgaaaccctgtctctactaaaaatacaaaacttagccgggagtggtggcagacacctgtaatcccagctactcgggaggctgaggcaggagaatcacttgaacctgggaggtagaggttgcagtgagcctagatcgtgccactgcactccagcctgggtgacagatcaagactccatctcaaaaaaaaaaaaaaaaaagattaaatattatatacctctttttatgtatgtttctaattactcatggtttaattttttattagccacatttttcactagttgcatttcctcttttgtgtatttttaaattcatgttgtttggccatttatctgttagagatttagtggctttcttgttgatttgcatgaattacttatggccatttgccttactttggccatttgccttctagatttgctttgacattttccaagtttgttatttgcctttaaattttattttttatattttaattataaattatttatatatcatcatatgtaaatagaataatatatataatctacacatttacataatttaatatttacttctgttttctttaattttctgtggctatattttttaaattgtggtaaaatcaagtaatatgaaatgtaccatcttaaccatttctgtggttatacatttttgaattaaatatatttgtgaggatctaagatattgcatttaaaattttattttcataaatagtaatgtaccaactccattcattcaatagataattattaatcatttactctgataagcaattataaacatttagataggagatattcttacagtgtggtggaggagacaaacaactccaggattatgtgataaatgcagtgatagaggtatacatagtctactatagctactttttttttcttagtagagatgaattctcactatgttgcccaggctagtcttgaacacctgaactcaagcgatcctcctgcctcagcctcccaaagtgcagggattacaggtgtgggccctcatgcccagcctactatagatactctcattcattcagtaaatactttagtgactgctatatgtcaagtaccatgctgggccacagacaatcaacagggaaccaatcatggtccctgttttggtttttaaaaaagagagagagagagagaaacagagagagagagagaaaacttacactcaaacagaggatacagatacatttattgtgtggttagctgatttattgtgtgtcataatagagaaaacatgggctgccatgggaaaacagaagatccatctaaatccaatcaggctagggagtcatagggagtcagaaaggccttactaatgcaggaacagaagaccaaataccgcaggttctcacttataagtgggagctaaatgatgagaacacctggacacatagagggaaataacacactggggcctatcagagggtggagggtcggaagaaggagaggatcaggaaaaaaaaactaatgagtactaggcttaatacctgcctgctgaaataatccatacagcaaacacccataacacaagtttacgtatgtaacaaacttgcacgtgtccctgaacttaaaagttaaaaaaaaaaaaaaaaaaaaaaagacggccgggcgctgtggctcacgcctgtaatcccagcactttgggaggccgagacggtcggatcacgaggttaggagatcgagaccatcctggctaacacggtgaaaccccgtctctactaaaaatacaaaaaactagccaggcgtggtggcgggcgccggtagtcccagctactcaggaggctgaggcaggagaatggagtgaacctgggaggcggagcttgcagtgagccgagatcccgccactgcactccagcctggcagacagagtgagactccgtctcaaaaaaaaaaaaaaaaaaagatagacatgagctagatgaagggagaaacatactctgtgcagagagcacacataccaaggtacagggctacaagttagcaggctgtgtaccccttagtcaactgagagaagtgaagctaaaaatgtgggcaggagccagaacaaattgtcttttatgctaaatcctggcatcatgtcctgaataatctttccctttcacacaaaaataatattagcacataacttactatgtgtcagtctctgttccaagtgccttacatgtactggctcattcgtttctatattccagagaaaaccatttggttcagtgtattaactcgtttaattctcacaataatccatgaagtgcatattattattatgccttttcttaaagaggaaactgagggcaagttacacagctatatttaaactcaggcagtctgcctctagaggctcaatctctcttttttttttttttttttttttttttttttttttttttttagacagagttttgctcttgttgcctaggctggagtgcaatggcgcgatctcggctcactgcaacctccacctcccgggatcaggcaattcttctgcctcagcctcccgagtaactgggattacaggcatgtgccaccatgcccagctaattttgtatttttagtagagatggggtttcaccatgttggtcaggctggtctcgaactcctgatctcaggtgatccagccgcctcggactcccaaagtgctgggattacaggtgcgaaccactgtgccgggcctcaatcatctttttttagaggtgaggatagtctcactatattgcccaggctggtctcaaaactcctggcctcaagcagtcctccccacttagcctcctaagtagctgggattataggtgtgagccacctcatctggcacagagaccaaactattaaccactctgcttctcattcatatgtgatacttcaaatatttaaaacatttatttatttatttatttattattttttgagacagagtctcattctgtcacccaggctggagtgcagtggtgcaatcatggctcactacagtcttgacctcttgggctcaaagcaatcctcccaccttggccttctaaagtgctgggactacaggcatgcacaaccacacccggttagtttttaattttttttgtagagatggggccttattatgttccccaggctgtaaaacattaaattttttacaggttatttggaggctatcgatttggtacaatatttctttctgtatgtgcatgtatttctttctgtatgtttatctttattccagaatcatgctgaaggtagtctatgcctttgctattttctttttcaggtttttctttcctttttaaaaataaatattgcctattcttcaagggaactttcataataattttctctttttttttttttttttattttgagaccgagtcttgctctgttgcccaggctggagtgcggtggtgcgatctcagctcactacaacctccacgtcccaggttcaagagattctcctgcctcagcctcccaggtagctgggattacaggtgcccaccaccgtgcccagctaattgtatttttaatagagacggggtttcaacatgttggctaggctggtctcaaactcctgaccccaagtgatctgcctgccttggcctcccaaagtggtgggattatagccatgaatcactgtgcctggcctttcgtaataattttcttgaactaaaatttgggattaggccaggcatggtggctcacacctataatcccaagcactttaggaggccgaggcagaagggctgtttgagcccaggagttcaggaccagcctgggggacatagctagaccccacctctaccaaaaaatcaaaaatcagctgggcatggtggcatgtgcctgttgtcccagctacttggaggctgaggagggaggattgcttaagcctgggaagttgaggctgcggtgagctgtgatgacaccactgcactccagcctaggctacaaagcaagactcttattaaaaattaattaattaattaaaaaattagagattagagaattttagttaagttaaataaataaaataaaaaataaaattagagattagaggattttagttaagttaaatgtattaaattgaaaagtatttcatttttccatccacaaagtgctatattttctcattcaagtcttctctcaaatctaccaatacatttttgcaattttcctaaaataggtaacatttattaagattgttcttagatgcgttataattttgtggagaagtgtaatttcttattgtgttttctaattctttactattggtatgtaggaatgctatatacttgtatatgttatttttcttgatatatgagattataaaattaccacacaaaaactctaaaaatagaaaagctatataccttattcaataatgttcaaaacattcagaaaagatttgggtcaatatgaaaggctacacggaaaataatgtgattttaatccagtgtttacatatgtgttagttacacattcaaactcttgtcaccgatgcattttcatctaattttttccataatgagagagaaggagacgcgttggtgactgcaatagggccacctccctcaaattacgttgctctctatgacccatcctcagtctcccagttcaagctaatcattgacagagctttacaatcacaagcttttactgaagctttgataagacagtccagcagttggtggcaaatgaagccaggctgtgcggcaggatctccagggaatgaatggattttcttcagcactgatgaaataaccacacgctataggaatacaatgtccaacgggggattgcaaagatctgtcatcctgtcagcacttattctgctacgagctgttactggattctctggagatggaagagctatatggtctaaaaatcctaattttactccggtaaatgaaagtcagctgtttctctatgacactttccctaaaaactttttctggggtattgggactggagcattgcaagtggaagggagttggaagaaggatggaaaaggaccttctatatgggatcatttcatccacacacaccttaaaaatgtcagcagcacgaatggttccagtgacagttatatttttctggaaaaagacttatcagccctggattttataggagtttctttttatcaattttcaatttcctggccaaggcttttccccgatggaatagtaacagttgccaacgcaaaaggtctgcagtactacagtactcttctggacgctctagtgcttagaaacattgaacctatagttactttataccactgggatttgcctttggcactacaagaaaaatatggggggtggaaaaatgataccataatagatatcttcaatgactatgccacatactgtttccagatgtttggggaccgtgtcaaatattggattacaattcacaacccatatctagtggcttggcatgggtatgggacaggtatgcatgcccctggagagaagggaaatttagcagctgtctacactgtgggacacaacttgatcaaggtactgtacagctagcttcttcttatagcttcagaaaacactaagaatttaagaatttaccttctgcctcagtaattctcttcactgaaatcaaggcaactgattttaagctaattcaaaagatctatcctcaaattttgcatttaagttagtgtatgtttt

SEQ ID NO: 10138 - DNA, 6000 bp, Homo sapiens
cagatgggaaattggttgtcgcaaccaatctaactgactgaggctcactcagtatttgttagtgtgaaagtgcaactttgtaacttcaccttagccttcacctttgtaacttcatacatagctaccgactaaactgtgttccccaaaattcatatgtcaaagccctaaccctcaggcaactgtatgtatttggagacagaatcttcaagaagtaattaaggtgaactgaagttataaggatggggtcctaatcagataaaactggtggcattataagaagagaaagagaggaaagggaaggtgaagatgtttgcacaggagtgtgacctttgtaactccacttcagcctctgattggctgcacaaagcaactgattgcaggccaccacttcatttacatgatgtgagcatgaagtggccagttggaaacccagagggtatttggacccgagaagattctgtatcgggcagctcccacattgtgtagtatactttcgttttcaacaaatccctgcttttgttctttcattgcttcattctttctttgttttgctgggcgttttgtccaattctttgttcaaaatgccaagaatctggacaacttgcagtcaagaccctctaccagtaacaatataacaaaaaactagtatcaaaacacaattttaacaaaactttttaaaatgccgacaaatcaataataatggaccacaacaaaagacaaacagctcaatagaaaagaggcaacagaggccaggcacagcggctcacgcctataatcccagcactttgggaggctgaggcgggtagatcacgaggtctggagtttgagaccagcctggccaacatactgaaaccccatctctactaaaaatacaaaaaattagcccagcgtggtagcaggcacctgtaatcccagctacttaggaggctgaggcaggataatcatttgaacctgggaggtggaggctgcagcaagtcgagactgcgccattgcactcctgcctgggcgacagctcaagactgtgtctcaaaaaaaaaagccaacaggagagaaaatctgaatggccaataaagttgtgaaaagatgctaagcctcactactactcacgaaaatgcaaattgaaaaaatgacataccattttatatacctaatcttggtaagaactaaaaatagcaaattttggcagggattagggctattctcatacactaaatacaactacttaggagagtaaacttgcaattattttaatatgcaaagttgaagatatgtgtcttagttgtttcactttcattttactctttaacaaaaatatcaagaaacattcatgaaattacactcattcatcaatggcaactgtatattgctatggatataagagttcagcaaaatcaaaagaagtatctgtgagattaattagctatatggaatttacaatagagaacattttgtattttaatatttttgtaataagatgatcctttaaatcagtaaaaaaatatgtacttacatacatatatataaaatatatatagctatggactgaattgtgtccctcaaaattcatatgtcaagaccctaaccctcatgtgactgtatatatttggaaacaggatctttaggaagtaattaaggctaacttaagttataaggatggggtcctaatccgatagaactggcgaccttataagaaggggaagagaggaagacagagatcatttacctcctcctaaattgagcacacagaaaatggcagctgccagcggctaaaatgaaacttaccttgttggcaccttaatcttaaacctctcagtctccagaactgtgagaaaacaaatttgtgttgcttatgctacccactttatggtatttcgttatgacagcctgagttgactgccatagacacacacaaacacacacactggcaaggagacatataattctaagaaatgttaaaaaatgtaactgctataaaaatatggagtaaatgatatgggaagagtgcagaggaggtggcattttagctcagctaggaggatgagtaatccaggctagagatctgaaggacctgaacttgggcagtggccttagaaaaagaggtttgtactgtttcaagagaaccccatttgatttctcggctgcatctgactagcacctggtctgcccatggatactagaggataaccacacatctgacagaggaagagcattacagtctcatggttttccgacagggtgccagctttcccgtgggtccccagtccactccctctccctagccccttcatatttgattctcaatctactgctcttctcatgcatttttttctacacttcttcaggtctcagcagatggcattccccttcctacacacccatacctagttagtcaccacatcttagaagccacctccaagtcatctttcctcttcttttccccaacaacactgcctcaatccagaatctcatcacttctttcctacacgtatgtgttaacttaaaactcacaagatctatatgttcagaaaaggagactttatttcttataaggagatacagcctgcaaggtggccctctcatgggctgggaagcacagcctccagcaaggaccagagacaggcactttaaaggaagaggagctggggtaggagctttatgctgaataggttggctaaacatacatattcaacaggttacaggaagagctatgaatattcataaaagtagtcctgatacatgcgtatggaacaacatgcatgttacatacaacctgtgttcaccttggggtggagacttaatatttaatgtattacagttaggctctgtacctcaaaaggtgaagcagagacgaaggcacacaagtgcatggcctctgtaaagtggccagaaccagcctatggtcagtggtcttatctggagaacgttactgaaatcagtctcttgtgcaatcaaagctgtagctatggttggtatagcaggggttcagttagtgtctgtgagctggattagttgtaattgttttaatattgcttctctctaggccagtggttgtttagctgccagagggaaaaaaaaaacctcttgtggtagaacatagtttattttttaagtgtagggggtgcatgacttaacccttgcctggcatggccttaggtcctgtttataatttggtatcctattcccacaaagagtttgttctgtcaatgttatgatctttattgtaacattaacatgttaaacataggctgacttcctagaactaatttgaaaggaaaaccctaactttccacgcctaagtagttgctagtcagttgtgtctaaactacaaaagggagggggtataatgaggcatgtctgatctcctgtcccatcatggctggggtccccttggccaagaaagggatctatccagtcagtcgacagaccccttacttaggattttatttttagtttatatatatataaatggcttcacaacgaatttcctgacttttaatttgcccctctgttcatcctccaccctgttgccagagagaactttctaaatctcaggatgtcacacttctgattaaaattgttccatggttctctggatttcagggtcaagttcagatcctttcctcagtacacccctgcctgcctctctagcgcaaatctttcacaatcccctgactggtaccatcattctggtcacactcaactagtcctctcgctgtcctgttacttcttgcactttctgttactctgtatggagttcccttcccgttttaaggcagaagaatatggtatggcggtagggaacctaatgccctttctcgctgacttcctagaactaaattgaaggaaaatccttactgtccacgcttaagtgaataaagggccagatactactccctttgcaagccccaacctgttctgcgcagatttgggaaattgaaagtacctctgattggttgctttttgtaaccaatcagacgtttgcatagaagtgtaactttgtaacttcttcagcctctgattggttgctttgcgcaaccattcagactgattgcgggccaccacttcatttacatgaagtgaactccaagtggccaatgggaaacctctagggggtatttggacccgagaagactctgtatccagggcccttgagctgctgtctcactctcccacactctggagtgtactttcattttcaacaaatctctgcttttgttgctttattctttccttgctttgtgcgttttgtccaattctatgttcaaaacgccaagaacttggacaccctacaccagtaacactttcagccaactttttgtcgttcaagatcaaggcccggacttaccttttccaggaaacctccccagatcccttctgatttaggtaccgtcctctgtgctccctgtgattaaatcagcctctacacatattacacaatcactatgctctgatttccgtttacttgtttctcttttgcaatctgtgtcatattcctctttttatccgccgtgccaagtatggagcctgtcacatagcaggcctcataaatacttattgaaagaattaataatagacgtagaaccaacgggcttagtaagcccctggagaaaggaatcaaagatgtttctgaggcctctatatcaggaagtgcggaaatttcatggtttgagaatgggcaggaaagatcatttgtgagctgtatttaatgcaaaagttgctcccccatcctgatttcttagctcactgggccaatcggcggaaggacaggtggggctcaaattaggagaaaaaaaccacacttcccgtcatgcctctgggcaccgctcccgtttccccctctttgtcaccgcctcttccccacggaaatgaaaggagcacttccgggttcggcaataacctggagccggcggcgtaggttggctctttagggcttcaccccgaagctccaccttcgctcccgtctttctggaaacaccgctttgatctcggcggtgcgggacaggtacctcccggctgctgcgggtgccctggatccagtcggctgcaccaggcgagcgagacccttccctggtggaggctcagagttccggcagggtgcatccggcctgtgtgtggcgcgaggcagggaagccggtacccgggtcctggccccagcgctgacgttttctctcccctttcttctctcttcgcggttgcggcgtcgcagacgctagtgtgagcccccatggcagatacgaccccgaacggcccccaaggggcgggcgctgtggtaagtgcgagggcagggtagtctggcttgatttgcaagagttaggaagaagcaggaagcgttgcgagtcccgaggcgttccagaagctcagtgcattcaggaatgggattaatgagttggggtggggaagttggagcggggagaggggaggtcctgagcgaagatatggagggaactacaagtttgtttctgaagcgacaataggctgacctggagctggtggcccccacctgtatgccatggaaattgggccttctttcctcttctcccacctcggtcttttgtttaccgtaggccccaaggttaaagatgccgcatgagattgtgccatgacacacatgatccatgacacacaccacgtggagcacacgagtgccggcaaagaacgtttctgcctagtttatacaatcgtatatagaaattatgcaaagggaggagagcggtggtctttttcttcttcactttgttctttatgaagagaaatatcattatgcttttgtaatttttttaagatgctgatctggagctaacaagttatttgtgcccggagcattgctgtcctctactttttaatccataagtagttaagtattattctgtgtgaccacaatgcagttaccacatttgggaaatattacctaatataaaatccatgtgcaaatttccataattgtcctttaaagctgctttctcttcatctgggattctgtcaaaaagcatgcatcgatgg

SEQ ID NO: 10139 - DNA, 6000 bp, Homo sapiens
ataccataaaaatcaccccttttaagtggtttaatttcagaacattttcatcacaccaaatagaaaccctgtaccccttcacagtcatgctccattcctctcttcccccagctcctggcaactactactctactttcgatctctatggctttatctattctgggaatttcatagaaatggaatcaaacaatatgtagacttttgtgtctagcttctttttgggtgcattttcatatgaggttttatgcttaaaatgtctagttacaatttttgatactttataatgattcattcaaattcttgataattactctcaatgagaaattctgttcactcaaatatgtgacaaaagcttatgaatgacttttacaaccataccagactgtgcaataattgacattatacctaaagatgctaatagtccttttttttattagttgaaccacataaagctatcatttttatgtcaaaactggttgaatattggcagtcacaatattccaactaatattttactgggtaatgtaatactggaattccttgtgataatgtgaatggattttgaatccagttcagttttttatgccaagcttttatttgcagaacatactgtgaaaataaagaataaagatatgtgaaaattaagacagctgcatgggacctggggtgtctagagctgtgctggcccagtctcctcgccaaccccactgaacattctctcggccacttgttgtgctcttcgagagcctggaacacaggcttcttcatcagatccatgagtttcttatccatggtgggctccagacaccccaggtcccatgcagctgttgcagaggctgatagtgttatcttgcactgtacccatagcctgttgcctgagctctgatttgtgaggaatacagcaccatagaaagagaaaatagcttaaaagtgaaacttttaagatattactttctgaaagtcactcagccaatacctattcagggaattggtcatgggtcttattccacatttgatgcaagattacatatcattccttagaagctgaattccatcttctctctaggtagaactatctcccatcctttcacctctccaaagtttccaaactcctgccttctctggtcactaggggaaatacacattatccagagaaatgtatacttctttttcttaactacatttattcagaaaaagctctggtacctatctttgtctaaataagaaactaatcatctttcctagactaaagggccatcatttcatacaaggaattgtgctactgtcctattaccagtgttcttgatattataaacagaatcaataaatagttgacggacttatccagaactctggggccagcctggatctctgctaatctggattttccctttctgatatcctgtgtaatcattgcatgttaaaggtttttacaaggttaaaagccaatttgttctcctatggacgaaagggactcacctgatacaaagggaaggaaatgtatttcctctttaaaaaaaaaacgcacacataaaattaagatctatgtttacaactagtaataataatgtagatatccttgttgtttctagaaataaagaatttctactgtcaacaaggcagttatagtcatagcatggttttaccctatcccaacaaaaatcatttactattcacttccctaatttattgaaagctgtgctgcttagcccacagtagagagctccattaagaatgtgtgttctcaagccagctctttcacctgctgtcttgccatcttggataagttgctctaactctttgtgcctcagatgtctcatctctaaatgaagaatgacctcatagggatgataagaggaatacacgaagtcatagctgtaaacttcttagtacagtgtctaacagaaatggttcactagcactcaatgaatattgaggaaagaaaaaaagagacataaaatcctgtgattatgttgttaaaatcagggctcatctacaagggacaagtttaattgcctgcagcattgatcttcttcttcttcctcttcctcttcctcttcctcttcttcttcttcttcttctcctcctcctcctccttctccttctccaaaagtcagtcagaaaactgatcgtgggaaatgtcctaatctgtgcttgactcataacaagtacaaagaaaaagcagtggttgattatgaatcataagaaatcagcctgtgtgccactttaggaaatgtgaaatattttgaggtaaacaaaagtaaaccacgctgctttacacgttacatgttaaagcagtagcccgaaataatgaatatgtctctcttttacatataactgtataacaaatataataggttctaggaagaaccctgtttactgttttagaaaaatgttttctgataactctgtcttctgctgccatactaataatccttgagtatgtttaagaaaggaaaaagagaagttaggaaattgataattatcatttattaagcacctattaagtgttttacacagtgataagcacttcagctacctaacttcatatagtcttaataacacagaggaagatattattagatccattttacctacagagcttagtgttggtacccaagatcacatatctaaaaatttgcagagccaagatttaaaaccaggtcaaacctaggcatttgactactgtgccatatatttcgcattgacaattaattatgaagtattgagagttattagtgttgagagtccaaataattttctagctggaaaagatgaagttccctcacttctatattatacagttgaaatattggttttttaaaaaacttcctgagaagtgcaaaaaagaaaacctttctgaaattacaagaaagtaagtatcttttaaattaaaaattactatatagatttaaagtagctaatgtcttaaattaagaatcgtattttgtctttttcaaaataggaatcactctgaggagaaaattggatattacagaagcattgcaaaaagaaaacaccaaacacaacaaaacctaataaattgatagaaacccaccttaatagtggttattccaatgaccttcatggtatttatgagtattgatttttaaaaatttgattagaaatatttaaattatcaaaatgatacaaatttcattcaaatgacagacacaaatagaaagctagtaatctcccctcactatccttccctgagtaaacaattttgaggtgtatcttcacgtttttatatttatattaaaataaaccaatatataaagaatatgtataaggctaagttgtattacataatgttttccattattctactactatgctctttagacttaaatataatagattttcttctaagacaataattcaaatcttagtcagtgattctcaacccttgtgcacattagaatttctagaggagcttgaaaaaaagacattgccatagcgccacccccagagattctggtttaattggcctgggtggggccttggcatcaagctccccggttcactctgatgtgtagctagttagaaccactgatttaagcaatccaaacaggctacatgcctgaattgtcctggtatgtacgttcccaggaaggccctctgctgaggtaacaacaccagtgtttgattgggagagctcaggggggcccagctacagttttaagtctcctctataaggttgactctcagataggaaatgtgtttcatcttaaaggatgttagagacagtcatatgactgcaaaaagtgctactagggccaggaatttcagaggccatgtaaatgacagtgtattctactaggctgggttaattctggggattaagtttgactaagttctagagatttgtccttacctgcagatggaggcttccctaatggagcatcataggaagccacacccagaacttgtttctcctcgtctggcagaagcacgttctcagtgggtgcagaaacttgtttggcttctcttggtctgagagaattttcaagccgaccaaccagctccctgtgtctgtactggtgagctctttactaatagtcaaacatttgcatgctcatttagttttcttcactcttgttgcacatctgagaaacacttgagagaatggaagagagaggcacaatataggagagctgtggagagtttggccccactttttatatttgtttcaatgggataaaacaggcagccaagattattaggttttgttctgagttattggttcggccttcactaaatggcttttcctctttccaaattagacattttgagaaaccagacaggttgttgaaacttatttagaagttttaaaaaaagttgtgaattttaagcaaacggaccttggcaggtgtatggacaaagccacattatcctgagtaagggaacggaagggcaaggtgtgaggaaaacgaccaaatcagaattgtaatatttttcctcatttcttttctagtcataaaaacagtaacattacatattatttatttattttgtggtagggtctcactctgtcgcccaggctggaatgcagtggcgcgacatttttagatttgatctcttttaccctccaaaaaataattgtccagtgttccacgtttagctaaaacagtgaattgttagaattgcagcaaaacaatgaaccaaaccgtcaaccgcgagcaacctgtacttgggaggtgaaagtcagaggtgagattgtaagggctctgggtcactggggcatctgcgctgggcagaagggcagctcggtcaaacagctggagctgggagccggtcagttgccaggccctgccgctgctacgtcacggagggcggggcggtgggcgattggcggtgcactgcagctcgggctgctctgcagcctggcggagacgggaggaggagcggagggagaagtaggttgcgagctcagcacaggctccggcgctggctcccgcagctgagtttgggagatgtctaagtgattttttttttttcccggaaggcaaatggctggcgtggaagcacaacccgctttcactcttcgaatttgtgcttagctcttttcttgtaccttgcgactcgtgaccaacatgctgtgatgtgtgccgagggaggaattggtaagagtgagacggcgaatccctctgactgtcccagccttctgcttcaccgcccacccgcttttcctttctgtttctctctcctgtttctccccgctccacttccctagtcgtgtttagatttgatgacatggctcaaaactacagttctgggctgttactgaactaaaaaaaaaaaacaacaaaagataaaatgattacaccattttcaatcatttgttaaaggggaatttaaaaatctattttaaatgctggattttgtaaaaaggtaaactgcacacgcgggcgcacacgggcacgtacatacacgcattctcacacacctttgtacacgcgggcatacacgggcacgcacacacacgcattcacacacacacacactcctttgtcatcccgttgtgaaataagcagtttaaagaaattttggttatctgcctcaaaggtgatgaaaagggaaggtgttgaagatttagcccagcagattgattccttaaggttgattccctaaggttgattccttaggaagaaaaaggtgtttgtattggagctttctcggaaatagttttcaaaggagtgctacaaagaagcccccatgcttcccccaaaacactaactttaaagaacctagttgttattcggggcaccctttattttacgttgtaaaacatgtagttttaatttaccacgtacagcagagagacatcagttggttagggaatggatggttattttggtgtctgggaccctgtgcctttagaaagaatatgttttaactgctcttatcatgctagctcaggtttttaaaatgtgatctgaataagaccaaagtttcttcttgcgttcttttcatgctggttctaagcagggagaaaaa

SEQ ID NO: 10140 - DNA, 6000 bp, Homo sapiens
cctggaaccttccatcgatcctcccatctctgcaagcctagacatttaacatggtctagaaggcctccatgagctccatctcacctcttttttgctccttccgctccggacctttacaagttgtggccattccaaactcctttcacttctgattatctcatgttctctctcacctccccgcccatgcaatgaggttcctccccaactagattcttattcctcttagattctcagagaagccttccctgaaagaagccgtctcccatctcccagattgggttaggctcctcctgtgtgctgacttcattgtctctctccaacattgcttagaacgctaagttgcaactttatgtctaattgattgctccactagtccataaaatctaggaggaaagggctgtatccttagcccttgacacatggccttgtacatcttaagtttgcatatgaaccgctttatttacctgggatattatcttacttaatccccaagacaaccctatacgttgtgcatgattattccaatggtcattactgttattttaaatagagatgggggctcactatgttgcccaggctggtcttaaactcctgggctcaggtgttcctcccaccttggcctcctaaagtgttaggattacaggcatcagccaccatgcctagtcgattatgccccttttaatggatgagcaaagagtcgaggttccactggttttccactgcagtgtctctgctgaaggattaaaaaaaaaaaaatcacagggctgtgctggactcctgggacttccagaggacaagtccctctcttcagtgaggctgacctacacagagccagccctccttcccctcccagccacagctgtgtgttggaaagctagaggcctgggcccctaataaagagcagacctcccaatctcctcgttccttccccctcccctcatatggtttttcaaattaaaagcaactaaaaccaaagacctaaggagcaggagagggcagaggcacaacaacatccctaaactgaggaagggggctctctagcgagggagggggtatccaaaagccagatccagagggttccagtcctaccagtctgtcccaggctctaaggagtgtatggcccaccgggctgggctggaccaggaaacaagctcttgtcctcaggtctgtaaacaggctgcgttgttaggaaccctctgcttctacttcctgaagagcaagccccccaaacccagaagagaggctgcaccttgagatccagccagcaaggtgggtgcggagtcctggggagggaactttcacctcaagctgcacagacccatctcgatctttttagagaattcctccttttccaggactagtgccgttctgaattctgagcgtgcaaagagactccttagagctagcttccgagcctcagctggggcagaccagaggccagggcgtctctctgtctgcggggaccccccacatctgtgcgtcacctccaccacctccgggcaaaggacccttcctcgctggacccagggaggcggctattccagatgcagccaagggttaaagggggtgggagaaggagcagttagcaccgttttcttttgcaaaccaccaaacgggcccttcattttcaaattgtgaagccagaaacatcccccgttcccttgccccgcccatcaccatttgaaaaaaagaattcacaagtttaaacgtgattttcacaactaacggctttgataactgttaaattcgtacggcttctagggcaaacggacctgaattcttcaaggaaagtagaattggcggtggagctggggggcagaggaggagaagacacaaaaagccaactcagtgggaagcgccctcaaagccaaaggtgtggcgctcggagctgtggccgccctcgcccgggagtcggggccaggagaacgggccctggaggcagggcagggcacggcgagattttgcttttgtttttagtgaccattttgatctggttgtaaaaagtttacgaggccttctttttgaaagtcagctaatcgactgcacctttttatacccttgccctcaatttcatgtcgcctgctggcctagacgcgcaaggcggaggacagaactgtcacagtccctacccttttctcccaacttctcggcccggctcaattcgggagttgggcctccttcctctcggctcgcagcctccccgactcccactttggggagaaaacccacattcttaaccccttgataatccctcaaggaaaaaacaaaacaaaaaaccccaagaggttgaaaattagaatccgggcgcgggttgagatctgcgcagagctgcccaggccagtgcatgtcgctcctctcctccgggtacatatggtggcctggtcccctccccccaccccccacacggtgcccagtgagaagcacaagaaggggagaaaagacccgcagcccgcctcaggagggcaaggtttctagccccctgcggctccgggaccacccaggacccggggcgtcgtgggaccgatctcgaaggatcttagaacgacactgggagagcgcggcaagaactagccccaccttcccccgacgccccggactgactgccgggcgcagacccgacttctcccgaaccagcctcggaccagccttagaaggcggaaaacaggattcaaacccgcctatgagcagtggtaggggcgggggctgtgggggcaggactcggtttaaggaaccaaccgcctcggttcgagggcctcctgtccggaggttgctcctgaccactgggtttattttgcttttgcagaggaggcagatgttgacctctcttctttgcacagtctctccgcaaaattttcccccaaccatttgctttcttgcgccaccccccaccggggcactatccctggagtcagctcctcaggcctttaaaccttccagaatgtcacacatggaaacctttagcaaatgtttgttaatgatcataacaaaggcatcattcaaattaggcaggtaattactaccagaaggacaactgggtgctcgcttgctcatccattgctttctgctttaaactcccgaggagtcgctgcctggagacactcccgcccggactgcttctcgggccccattaaacggctctgaaatgaactgtgaagttaccatttgtgggcggagagcgctggggccctgcggacggaagaccctggcttgaccggactaacagtgtcgccgaagcaaagcagcccctctgggtaggctgtctgtctcgcctcctaccctctggggcaactagcctaaaaacccggttctcaacttaacagcatgtggcccagcacccgcttttgccttttattccgcactctgatttttggggggatcgtttgttcccgctcattttctacaaacattacggtatcctgttagcattccgaacaaggggctgttcatatatttgccttcaatgatttcctgaagggacatgtggaagtaatagcgagcggtgcagtcacccaagctgaagatgcacgagagcgggtcgcgtagaagaactgcggcaatgggacccccagcgcagccccaggcgccctgttttcgaggctgacatcccaagatcctgtcctggttaggcacagcaccgcgcccgttggagtacttctctgtgactctcccctgtccactgcactgtgtccaccctcctggtgaaggaggagacggctgttggacatgccagtcccaacctggccactttggccattttcagagtgcgtgtgttggggtggggttgagggagaaggatgaaggatgacccccaaccccaacaggagaattcaaaaatcagagagcgatgaaggtgaacgcgctcccctcccccgctgtcgctgggaagccccactctgcccaggtctggttcctggagcatcagcgccccctttccctcgccggcaggatcgtttcctcccgacactggcctctcgccttgggcgcagggtttggggctcagctgtcaattccaaggaattcgtagggttcgacccacgcggcgggagggaacggagggagaatcaaaaggcatcctcccccacgacgcggaggcggtggtacgattcctcaaacgcccaagcttgagctttttttgtatgcgagatagaagccagggcaacctcgcccagataaccccgaaaacaaaggcacgaccagataagtgacttcaagggagtaaaggtcgttctatcggagaacgttccaaacctacacagaccctcttttctttgtaccgtatttcagaccacccagtcttgtacacacacacacaccacacaaaacaaaaacccatcattgtcatattggactcaacagtttgcccaatcctattaaataactagcaactatatagcccttcccctaaaagacccctagttcaaaacggcgcaaccgcttggagatttctcccgagggccctatttctcgttgggccgagtttgtagaagggacatttcttgattctagatttatattctctctgggtattaaatgcaattttgtatgttccttttcttcttttcaaagagaatacaaaactatagcagtctaagaaaataaccccaaaatggggaggcaaactcattctggaaatgatgggctgtttgtagtttcacaaaacctctttcccggcagagcaccaacacctcccccttccaccaccccccatcccatctggtctgcttctccccgccccccagttgttgtcgaagtctgggggttgggactggaccccctgattgcgtaagagcaaaaagcgaaggcgcaatctggacactgggagattcggagcgcagggagtttgagagaaacttttattttgaagagaccaaggttgagggggggcttatttcctgacagctatttacttagagcaaatgattagttttagaaggatggactataacattgaatcaattacaaaacgcggtttttgagcccattactgttggagctacagggagagaaacagaggaggagactgcaagagatcattggaggccgtgggcacgctctttactccatgtgtgggacattcattgcggaataacatcggaggagaaggtaagggaaaagaaaaaatgattttttgtttataagggaagtccctgatcagactctgggactggagaaagcgaagtaacttcaaactttgggcgacaagaaaaaaaaaaaggagctggattccagttgtgtgtccagagagtaatttttttttttcggaataaacttcacttggggacgggtgggagataaccatagagttagaaagtctaggtattttttttaaacacacattttccagacctatttttaaaaacaatgtttttctaacaaccctatggcctcccaaagaaattgtttaggcttacatttttgaggtttcttttgggagtgggggtggtgttcgtgaatactgggccgaacaccaaggaactgggggtggaggcagaggtgtttgccctcttcttggcagtgggtcctggaaggcgacaggttttaaatgagtgttttcattcctcgcctgcggtttggcgggacagcgctgcagcccatggtgtggagcgcggctgggggaccagggggaggtggggagaggggagcgtggaggggagcgtggaggggggcgcgcgaaggggttgcggggcgcaggaggcgggctgggctcggctggagaccggacctcggtgttggcctacagcacagggagccggccgaatgcgcgtgattactggacggcgctgctctgggagagagtcggggccagatttggcgcggcggtgaggcggctgcgggacaagcagaggcgcgcgggcgtgggcaagggtttggggcgctctggagcggtttgttgggtcagtgaggtgccagggagagcgggtgcctgccgggcagtgtgctcgggttgcacgccctagcgcgggggcgacagcggcggcgcgggcgggcggtctggaataa

SEQ ID NO: 10141 - DNA, 6000 bp, Homo sapiens; identical to SEQ ID NO: 3421

SEQ ID NO: 10142 - DNA, 6000 bp, Homo sapiens
ttctttaaccaacctttgctctgtggactatttaaggaaaaaactttaatcggccctttgctgattatggggaaggagggttctccagcagagctcaggaaatagctcacttctccctatttctgaaacattgaggatgaaaacagagagtgacacagacaggaggccgggttggaaggaatagttttaggtctggtggccaggtggactgggctaatactgaactccagaatcaagagctgttgagttgcaggctgcactgggctaggggcaagccctggagagaacagcagataatgtttttcccttaggggtctgtctccccagaggaagaaggcaatgaagctgagcccaatatgctcagttaccctgctcagatggactctacattatcagaggggaatgacgaaggcactgaaagaggccaggaaatagtccttttctttttcttttttttttttttttgagacagagcatctctctgtcgcccaggcaggagtgtagtagcgcggtcttggctcactgcaacttccaattcccggattcaagcgattcttctgcctcagcctcccaagtggctgggactacaggcacacactactacgcctggctaacttttgtatttttagtagagacgaggtttcactacattggctaggctggtctcaaactcctgacctcatgatccgcccgcctcggcctcccaaagtgctgggattacaggcatgagccaccgcacccagcaggaaatagtccttttcaatagaaccctagagtggagaaacagcattctctaacagttaatgaaaatgttcaccattaattaattggctggtcttatatatttaaattttcataaagtagattttcagtaagtggagcataggtgaattcaacaaacaggtatgaggcataattctgctacttactagctgtgtaatttgaggaaagttccttgacctaagtctcagatttctcatttgcaaaaaggaggatagaaataattcatgtaacacacttagtgctctgactggatcagaatagcattcaataaagttttactactactttaatgataactattcccattaccttcttatataatctactaggtgctagaaatataaagataaaaggcataaccttaccatctagaagcttaaggcttagtaagggtgttggaataaaagacattaaaatacagtgcaggcccggctcagtggctcacacctgcaatcccagcactttgggaggccgaggtggatggattacttgaggtcaggagttcgagacctgccttgctaacatggtgaaaccctgtctctactaaaaatacaaaaattagccaggcatggtggcgggcgcctatagtcccagctactttggaggctgcggcaggagaatcgcttgaacctgggaggtagaggttgcagtgagctgagatcgcaccactgcactccagcctgggtgacagagcgagactccatctctacataaataaataaaaaataaaatataggtcaggcacagtggctcatgcctataatcccagcacttttgggaggccaaggcggacggatcacgaggtcaggagatcaagaccatcctggctaacatggtaaacccgtctctactaaaaatacaaaaaattagtggggcgtgtagcacatgcctgtaatcccagctactcaggaggctgaggcaggagaattgcttgaacccgggaggcggaggctgcagtgagccgagatcttgccactgcattccagcctgggcaacagagcgagactccacctcaaaaataaataaataaattaattaaataaaatacaatgtaatgcacatgtagtagggtttctttccataggatgcctgacagtggttacattttagtaagactatatcggtgtaggctatgattaaaaaatatatcatcttggaattgttgcgccacccacatccttattgggtagggggttaaataagtagcttcagttgtccttcaagaaaggtatcaggaaagctcctatagttttttaattgctttttttaagggagttagtcaccaatgaggactagaaggatgatggctctaaaccctcaaggtggtgaaaactggagccagcctcgatttagcacgcctgagcacggatcccaggaggtagatgtgtgtggaaacagaaataccagatcccatgagaatcagacacctagagcctagcctggcagcacctgaaggcccttggatcagggtgacactggggcaggctagaaaggtctcactctggcccagattctgatgctttgctgacaccactgtgccagttcgccaatgctctatctccatttatgttacatcttctgccaaatagctttgctgccttgcccctgaaccactgcatgctcagcagctggtgcttcagcatcctgcagctgtagcccagaagtcctcactgcctcatatgttgagatgactgaatttggccaggagtccttcctgtgagaaagccctggagtgtgggcagcccatcctagaaaataaacaaagcagctttcagcaatgagggacacacagccagttttgctacattcacccttctggctctgtcttcagcctaagctgctcctttcaggtccctcccttgggacctcaagcctccctttcaggccccttttaagcacagcaaatcctgtatgcattaaggggaggtagttgaagtttgggcttctgggttttatgttattactggcttctgaaagctcaaacatttgcactccagggatgatagttgcatctgttaaatttagtgtaaagctgcctccttacatattttaagttaggcctaaaggtttccccatacatggtgaactgtagcctaattgggtatgtaaacagactgtaacctattcttgtaccaatcacagagttctggccaatcacaagtggccaactgttcaaaccgtgttcaaatagggcaaacctgagctacaaccaatccagctgtttctgtccctcaattatgttttctgtaagtcactttattttttccgaccactcggcaagactggagcctctctgaacttactttgatttggggtctttttgatttgcagatcattctttgggttctttgcttgattaaacgctgttaagtttaatttgtctaaggtttttcttttaacacaccccaaactgtaagtggaggcatcctacttacacagtaatagaagaatgcataaagcaataacatgaaggaacaagtgacaaattctgtaacgccatgtgttggggaaaagttctgagagtggaagcttgaataggttttggaagtatgagtaggagtttacaaggagagaatggaagaaggggaattacggacagaataacatggacggaggccggccgcggtggctcacacctgtaatcccagcactttgagaggacgaggccggcagatcacctgaggtctggagttcgagaccagcctgaccaacatggagaaaccccatctctactaaaattacaaagttagccgcgtatggtggagcatgcctgtaatcccagctactcgggaagctgaggcaggagaatctcttgtacccgggaggaggaggttgcagtgggccgagatctcaccattgcactccatcctgagcaacaagcgcgaaactccgtctcaaaaacaaaaacaaagaaaacaacaaaacaaaaaaacagacggaaattttattatcctgtgacaaacactgtatctttggtgaactcaaagtaggtttgcccactttcccacagattgttttggtggattaattttttgtttcagttagtgataaacttccttagctctttactgagtacaggtttactgtatgtaaatatgtataatattagattagtgcctggcacatggttagcactatcgatttttattagggactaggtctcaaacttatggtaattaagtagctcactttttcttttgggaagacgtaaaaatattctcaagcctaactcaagaccatcctttcctgtcttctagtcttgcccactcaaagctccatcctgcaaaagtcttaaacagtccatttcaaaagcccagcatttttaaagggtctaaggaatagcacaaaacaagatgcacccaaaacgtcaaggccatactggacaagggcaacgttagccatttttggtctggggtaattataggcagtatcttaaaacaaggcttgaaaaatgtcatgttatttccaaatcccatttcagaactttaaaaaaaaaatagcattttgagctcctaagaacgtttttggcggtaggtggccacatggagggtggcacagaggctcggcgggggagagcggaacagagctgggcgtggcagtgcctgcgagtcagcgccacgtaaccagaggcgctcgcactaatttgacctctaagagagactaagcgcagggaacagcgggtgcggacattacggcggaaggctctggaggaagcagaagtgaaggacctcgcagtcctgggacggtggggcacagagagagaaagggagccccgggcgcggcgcggtgaggatgcgagcagaggaaggacacgcggcgccgggtacctgccgggagcgccggatccaatgggaggagggcccgcgccgcacctcaacctggcagaggacgtcacgacgccaaggcggtcgccgggccaatgggaggccgtcgcgggcagggacggggccgggaggagtcggggctgggccgcgccgaggcagctggctgactccagtttagccgccgccggagaggacgggcgccgagccggggctgcggacttcggcctgcccctcacctcactcccgctgcttgcacctcccggatggtgctgactgctccctaagcggcggcggcggcgagtcgtgaggacgcgccgcggaggctgttcggggtcgaggcttcccgtcgccggcacttcctcttgcggcgcccgtgcgcggccggcccggcaggcgggatggcggccgcggctccagggaacggccgcgcatcggcgccccggctgcttctgctctttctggttccgctgctgtgggccccggctgcggtccgggccggcccagatgaagaccttagccaccggaacaaagaaccgccggcgccggcccagcagctgcagccgcagcctgtggctgtgcagggccccgagccggcccgggtcgaggtgagcgggccgggatggggcgagcgaggctgcagggccggctgcgccgagtaccaggctccaggcctttgaaagcgccgcactccgccggcctcggctgggggaggggagcccggcccctgctcccggggtggagggcggtcggctgcgctgttttccggtgaggcctggtcttgcccgctcctttagggaaagggagagggagagtccaagaggagcccgctataaacgttgatctccggagggccaagatgctgctccgggatgggcgttttattgatcagatgtgtcttagagtagctagaaagactcatccctaccaaaaagtttttaacagaaggctgctaggaggctttttgtattccctgaggatcatcacatcggccatttcattgttgaaatagcttatgccaaactgcttacccaaattcaacttggcactgcctgtgctttttgccaaatatggattatgaaccatgactctcactttttaaaaatgtgctttggctagcaggaagtagcctttaggaacgcagaggaattagtctccggcagtacagcgtgctgcagcgatgtgggatgccaaaactacatttataagtaaaacagaatcctgtattttgtccttccctgaatagatactagaaatcaactttttaatctgttaatagaattagtccttagtcacttggcagcgttttaacatttctcccttctcccagtcgtgggctttgtcgtcatttccagtatctgctccctgaatcccggccagtgtggcactcaaaccc

SEQ ID NO: 10143 - DNA, 6000 bp, Homo sapiens
ggcccttggagcatttagaagatggtctcagaggttactatggctcaatgcaaaacagcatggtggtaaggaagggagcagaatagctggtagtgaggagacactccagctggggaagcagttaggggcatggtctgctgtcagggtccaggcttttctctgagggattcctcagtgagtgagggggcaaagcaaagacgaagagtgtctatagaaaaccaagcacaccaccagcacagatttctcaacaccaccatctgttagcaatagacaaaactggattgaaccagagaaaaacctaggacgctttctcacgcagacatgtaactgattatgtaagatctctaccacctttgtcttctctctctgaccccaaaactagaggagttcagcagcggggagtgaggatggttgtctcagagtcagatctccttccaacttctctactccaagcagtcagcctcacagtttgtgttgaggggaaagaaaggtaatcatatttatgttagtttcacaatccaagttttaaattggacaaaaataaacttcaaataactgaaactggtagaaagttagaagatttgcactttgggaggccgaggagggctgatcacgaggtcaggagatcaagaccatactggctaacacggtgaaaccccgtctctactaaaaatacaaaaaattagccgggcgtggtggcgggcgcctgtagttccagctactcgggaggctgaggcaggagaatggcgtgaacccaggaggcggagcttgcagtgagcagagatcaagccattgcactccagcctgggcgacagagcgagactccatctcaaaaaaaaaaaaaaggacagttagaagatttgctaggatattcattaaaggacacgagaataagacttgacaatcatgattggaagccttgattagaataaaaaatataactcttttgtatctatgctcttgttgagacacattacatgagtaaccaaacaatgaaacataacactataaaccacagcacatctatggagaaatcaaaatgcactaatcgaaaattataatttcgtgggacattttatttaaatgtaaaatttcatctggcttctcagttttgataaagtagagagtctgtcaattgcttctttcttataataaagtgagtcaatcttccttccatcagcaacatataatacaaattcttcaggcccttgtcaggaatataaactcatactttctcctattccgtttctaaaaaggtcttctaaggaagtaatatttaagaaagttcatctaagaaacattgtaccctttgtctaagtactttgaattctgcctttgaatcaagctagaccactggaagtatatgcacctgaccacaaaaatatatctcctttaaaaatctgtcaccaactttaacttcaaaattttattctcaggcttctttgaattatcataagaaagtttataaaattctcttctatttgttggtaaaaatattgctgatattattcaacgcgttgctcagtgtcatctccatatgagaaatttctccatcaacttagtggcaggaaaaattctctcttgatttgtttctttcttttaaataatgagaattgtgaaactccctaagtttcccttgttattcttgctatcggcaagttcaaagccaaatttgcagctctgtcagagcaagtctcttatacaatatgtacaatgtattccacttcggttttttcttgaatttgaaccttattttatcagtatattttatattttaggggcgttgtctatttgtaaagaaatggagtataggtaaataaatttggttcatgtgctaggaaaagttggttcagatgactgaaagttgatctcctaacatgaaattgattaatctttgaggtgtttttcaaagactacttgcaaaaaaaaagaaaaaaaaaaaagagacttaaaatggcccccaaaatgttatcttcattcattagtttaatatcattaaccaggctaaactgtatattccaataaattgaacaataataggattattttaacattattactgtcagttaattctaaaaaccttatctttggtttttattatatgtaccattatatattgaaaagcttagcagatcctcacatcaatgtccagaaaaattatctccagcattatgaagacacttatatcagttgtagaacatcttatagaagaatagggaagagaggtaatattttgggtaagaatgtagcacaagcaaaaggagagtcagtgacagagtagtgacagcttgtctctaaatgctaattaattatattgatcctctttgttttctcagcttaaacaaaataaagtgcatgggtaccttcaaaacaacacatgatagaagggaatggattcacaaatgacaatagctgtgtttacctggacacctagttaattcactagtttaacaatattggccagtctgtaatgtacatcccaataaactgaccaataaaaggattgccttagcattatggaaatatagctaaagtataagtttaagggcttccataaattaatcagattattattatacataggcatttatgtattatcaggtataaaagacatttgttcaaactaggagatattcaaataatgataaaaatcatctatgactagccacctgggaactatacttttctagtttaaagccataagatgcctcattgctttgacattgctaagtataaaaaggactgtagaataatttgttggtgataaaaatgtctgtggtcacattgctattttacttattatgcaatgtaagatatctactgtggatttctaacagactcaagtccacaaatatatttctcctgactgttcctgacattgcacagaatggcacagggaacacagaccaacacacaaaaagaagagtaactctttgaaaacattttcttcacactgtagtttaggacaaaagtattgcagaataaaatttatggttttagaaaaaacagcaacaaaaatttgaatgaaagacaaacttttgctttttcgaacttttggaagacaaaattatgactctaatgtttcattccttcttctttccttgccattcaaatttctactaaagtgtaagatatatcataaaatttgataatatacactgcaatgcccattgagcagactgaacaaaggccattaatatagcaaggaagacatatttttaatatctttagtctgacattcacttgtcctttatttacatatgcgtaatctcttaattttctacaaattgtagcttatactcacagagttttaaaaaaattcatgatagccctctcattttctgtatctacaattctaggttatatattaccctaagtatacaggtccataggcctatataaagaatttatttgaatttgaaatcttgattttgtgaaagaaacaaatgtcttgagattttgttaaaataagtctggcaagtcttggcccaaagttacactgagagggaatctgttttcctttgaaaacaaaagtattatcaatattttcataaaatgtgagtataaaatagaacatagtattattaaaccatattaacatttcattggcagagatttcactttgttaaaggctgtataagaacagcttaatctcataacccagaagtttttactgttattattgcctctttatttttggctaaagtgtaatttttaaatgagtatacagaaacctaatactatatattgaatgactttaagtaaataaatatccatgctattcatcaggataagtgacctagtgaccagaataaaaaggatatatgttggtagcccctagcacagtatgcctcagcacagaggtttcttgggttactgctagtgaatgattccaattcttggccgtctgatcccacacattacataaattccaactcctgcatctgtttaggtgagctgttggctaaatggatatgtaatgaaattaaacaatatttttaaggtgctttttaggatgggttataccccctctttttctcctcctttccttgcaacctgccctctactcattctttttatgcatatttttgagagcctgaatatgctaggaagagggtttcagtctgttaagaattcacaaccttgtggagttgagatacaattaataaaatttctagtataatgaggtaagtattatgataccatgaaagcacagaggagaaacacctactctgttttgtaaggattagggaaagcaatttagagattatacctaacacaaacacacagatatttgcatagtatgtgagcacacgtttaaaaaaatgtaattttcaccctagaaataagacagtagtgattcagcgtgagttgatatgcctgtctccactataatgaaagaaatataacgtcttaagtatgggttgacatttgcaaactaactgatttttctagaagaatgatgccacataatttaaaaatattaatgcttttctaatctctagtgtattttcaatggctaacatagttaaaaccaaagtgaaatttttattatgtacataatcgaatgcaaattgtgtcaggctagtttaaaaaatatgaatgtcagtcctggcttggcaatttaataactatttggtttttgaccaagtcatttaacttaattaaacctcagtttcttctctgtaaacaagagaaggtcaagcaagatagttttaaaatttctttccaaatttatacgtctgacttttctaaaaaatctggtttacactaatacttaaaagaaattatcttaaaacaataaattataaatttattttttgctcttgctccctgtaaaatttgtccttgtcctgctagtcacatatagtccccactacaccagccaagacttgtcagactggttctgttgagatcatcagtgacttatttcctcacttcaattcagcccacaaagtcattgatagagctggattcacacacttggatgtagacctcgaccttcacaggactcttcattgctggttggcaatgatgtatcggtgagttagttccctttttctttctagaagtcttaaggtaacttttagtttaaaacagtatgagccacaccaaggaatgtgtagatctacagtttattatttttttaaatatagaaacatatttttgagattttacataaaattatgtcaagaaaaagatttctattctttctgtattagtgtttcctgtcctcttttgttgtatcccatgtgtttttctgtttacttttagaaggtttctacacaatgtaaaggtacatggtgtttgacagctgtcttttagttagtttggccatatgtttcaagaaagatataacatatttttagcttgggctttgtttgtcttattgagaaacacttttattttagaaggtgtacatgaaaaaaagtctgaaataatgcagaaaaaaatgtttatttctgtaagtagttaaaaatttaaaaactctagatgttttgaaagaatcagaaacaactgaagaaaataatatgactaaattattatagcctgatttaaaaaataaatccactgatatgcctggccatagtcaacttctccaaagataagtcatgatcattttgaggttttctttcaaagttagaaactaatcagtaacaaggttttggggtactagttttgtctttgaaaataattttatctcctgattaaaatttattttctctgattctcatattggcatatcattttttattagtttttactttgagaacagtttgaaaatgttaaactttgaatgaaatctgtggtcttcatttaacatggaaaaacaggttctgtcatcagttgaaagttctacatacttgttattagaagtttaatactcttctgtacatatccatgaagcaactaaaagctacggatactaaacattttgttgggcttatcaaggctccctgccttttgcaagtatttctttacaaccaatgatggttttgt

SEQ ID NO: 10144 - DNA, 6000 bp, Homo sapiens
ggcccttggagcatttagaagatggtctcagaggttactatggctcaatgcaaaacagcatggtggtaaggaagggagcagaatagctggtagtgaggagacactccagctggggaagcagttaggggcatggtctgctgtcagggtccaggcttttctctgagggattcctcagtgagtgagggggcaaagcaaagacgaagagtgtctatagaaaaccaagcacaccaccagcacagatttctcaacaccaccatctgttagcaatagacaaaactggattgaaccagagaaaaacctaggacactttctcacgcagacatgtaactgattatgtaagatctctaccacctttgtcttctctctctgaccccaaaactagaggagttcagcagcggggagtgaggatggttgtctcagagtcagatctccttccaacttctctactccaagcagtcagcctcacagtttgtgttgagggcaaagaaaggtaatcatatttatgttagtttcacaatccaagttttaaactggacaaaaataaacttcaaataactgaaactggtagaaagttagaagatttgcactttgggaggccgaggagggctgatcacgaggtcaggagatcaagaccatactggctaacacggtgaaaccccgtctctactaaaaatacaaaaaattagccgggcgtggtggcgggcgcctgtagttccagctactcgggaggctgaggcaggagaatggcgtgaacccaggaggcggagcttgcagtgagcagagatcaagccattgcactccagcctgggcgacagagcgagactccatctcaaaaaaaaaaaaaaaggacagttagaagatttgctaggatattcattaaaggacacgagaataagacttgacaatcatgattggaagccttgattagaataaaaaatataactcttttgtatctatgctcttgttgagacacattacatgagtaaccaaacaatgaaacataacactataaaccacagcacatctatggagaaatcaaaatgcactaatcgaaaattataatttcgtgggacattttatttaaatgtaaaatttcatctggcttctcagttttgataaagtagagagtctgtcaattgcttctttcttataataaagtgagtcaatcttccttccatcagcaacatataatacaaattcttcaggcccttgtcaggaatataaactcatactttctcctattccgtttctaaaaaggtcttctaaggaagtaatatttaagaaagttcatctaagaaacattgtaccctttgtctaagtactttgaattctgcctttgaatcaagctagaccactggaagtatatgcacctgaccacaaaaatatatctcctttaaaaatctgtcaccaactttaacttcaaaattttattctcaggcttctttgaattatcataagaaagtttataaaattctcttctatttgttggtaaaaatattgctgatattattcaacgcgttgctcagtgtcatctccatatgagaaatttctccatcaacttagtggcaggaaaaattctctcttgatttgtttctttcttttaaataatgagaattgtgaaactccctaagtttcccttgttattcttgctatcggcaagttcaaagccaaatttgcagctctgtcagagcaagtctcttatacaatatgtacaatgtattccacttcggttttttcttgaatttgaaccttattttatcagtatattttatattttaggggcgttgtctatttgtaaagaaatggagtataggtaaataaatttggttcatgtgctaggaaaagttggttcagatgactgaaagttgatctcctaacatgaaattgattaatctttgaggtgtttttcaaagactacttgcaaaaaaaaagaaaaaaaaaaagagacttaaaatggcccccaaaatgttatcttcattcattagtttaatatcattaaccaggctaaactgtatattccaataaattgaacaataataggattattttaacattattactgtcagttaattctaaaaaccttatctttggtttttattatatgtaccattatatattgaaaagcttagcagatcctcacatcaatgtccagaaaaattatctccagcattatgaagacacttatatcagttgtagaacatcttatagaagaatagggaagagaggtaatattttgggtaagaatgtagcacaagcaaaaggagagtcagtgacagagtagtgacagcttgtctctaaatgctaattaattatattgatcctctttgttttctcagcttaaacaaaataaagtgcatgggtaccttcaaaacaacacatgatagaagggaatggattcacaaatgacaatagctgtgtttacctggacacctagttaattcactagtttaacaatattggccagtctgtaatgtacatcccaataaactgaccaataaaaggattgccttagcattatggaaatatagctaaagtataagtttaagggcttccataaattaatcagattattattatacataggcatttatgtattatcaggtataaaagacatttgttcaagctaggagatattcaaataatgataaaaatcatctatgactagccacctgggaactatacttttctagtttaaagccataagatgcctcattgctttgacattgctaagtataaaaaggactgtagaataatttgttggtgataaaaatgtctgtggtcacattgctattttacttattatgcaatgtaagatatctactgtggatttctaacagactcaagtccacaaatatatttctcctgactgttcctgacattgcacagaatggcacagggaacacagaccaacacacaaaaagaagagtaactctttgaaaacattttcttcacactgtagtttaggacaaaagtattgcagaataaaatttatggttttagaaaaaacagcaacaaaaatttgaatgaaagacaaacttttgctttttcgaacttttggaagacaaaattatgactctaatgtttcattccttcttctttccttgccattcaaatttctactaaagtgtaagatatatcataaaatttgataatatacactgcaatgcccattgagcagactgaacaaaggccattaatatagcaaggaagacatatttttaatatctttagtctgacattcacttgtcctttatttacatatgcgtaatctcttaattttctacaaattgtagcttatactcacagagttttaaaaaaattcatgatagccctctcattttctgtatctacaattctaggttatatattaccctaagtatacaggtccataggcctatataaagaatttatttgaatttgaaatcttgattttgtgaaagaaacaaatgtcttgagattttgttaaaataagtctggcaagtcttggcccaaagttacactgagagggaatctgttttcctttgaaaacaaaagtattatcaatattttcataaaatgtgagtataaaatagaacatagtattattaaaccatattaacatttcattggcagagatttcactttgttaaaggctgtataagaacagcttaatctcataacccagaagtttttactgttattattgcctctttatttttggctaaagtgtaatttttaaatgagtatacagaaacctaatactatatattgaatgactttaagtaaataaatatccatgctattcatcaggataagtgacctagtgaccagaataaaaaggatatatgttggtagcccctagcacagtatgcctcagcacagaggtttcttgggttactgctagtgaatgattccaattcttggccgtctgatcccacacattacataaattccaactcctgcatctgtttaggtgagctgttggctaaatggatatgtaatgaaattaaacaatatttttaaggtgctttttaggatgggttataccccctctttttctcctcctttccttgcaacctgccctctactcattctttttatgcatatttttgagagcctgaatatgctaggaagagggtttcagtctgttaagaattcacaaccttgtggagttgagatacaattaataaaatttctagtataatgaggtaagtattatgataccatgaaagcacagaggagaaacacctactctgttttgtaaggattagggaaagcaatttagagattatacctaacacaaacacacagatatttgcatagtatgtgagcacacgtttaaaaaaatgtaattttcaccctagaaataagacagtagtgattcagcgtgagttgatatgcctgtctccactataatgaaagaaatataacgtcttaagtatgggttgacatttgcaaactaactgatttttctagaagaatgatgccacataatttaaaaatattaatgcttttctaatctctagtgtattttcaatggctaacatagttaaaaccaaagtgaaatttttattatgtacataatcgaatgcaaattgtgtcaggctagtttaaaaaatatgaatgtcagtcctggcttggcaatttaataactatttggtttttgaccaagtcatttaacttaattaaacctcagtttcttctctgtaaacaagagaaggtcaagcaagatagttttaaaatttctttccaaatttatacgtctgacttttctaaaaaatctggtttacactaatacttaaaagaaattatcttaaaacaataaattataaatttattttttgctcttgctccctgtaaaatttgtccttgtcctgctagtcacatatagtccccactacaccagccaagacttgtcagactggttctgttgagatcatcagtgacttatttcctcacttcaattcagcccacaaagtcattgatagagctggattcacacacttggatgtagacctcgaccttcacaggactcttcattgctggttggcaatgatgtatcggtgagttagttccctttttctttctagaagtcttaaggtaacttttagtttaaaacagtatgagccacaccaaggaatgtgtagatctacagtttattatttttttaaatatagaaacatatttttgagattttacataaaattatgtcaagaaaaagatttctattctttctgtattagtgtttcctgtcctcttttgttgtatcccatgtgtttttctgtttacttttagaaggtttctacacaatgtaaaggtacatggtgtttgacagctgtcttttagttagtttggccatatgtttcaagaaagatataacatatttttagcttgggctttgtttgtcttattgagaaacacttttattttagaaggtgtacatgaaaaaaagtctgaaataatgcagaaaaaaatgtttatttctgtaagtagttaaaaatttaaaaactctagatgttttgaaagaatcagaaacaactgaagaaaataatatgactaaattattatagcctgatttaaaaaataaatccactgatatgcctggccatagtcaacttctccaaagataagtcatgatcattttgaggttttctttcaaagttagaaactaatcagtaacaaggttttggggtactagttttgtctttgaaaataattttatctcctgattaaaatttattttctctgattctcatattggcatatcattttttattagtttttactttgagaacagtttgaaaatgttaaactttgaatgaaatctgtggtcttcatttaacatggaaaaacaggttctgtcatcagttgaaagttctacatacttgttattagaagtttaatactcttctgtacatatccatgaagcaactaaaagctacggatactaaacattttgttgggcttatcaaggctccctgccttttgcaagtatttctttacaaccaatgatggttttgt

SEQ ID NO: 10145 - DNA, 6000 bp, Homo sapiens
acttaagcttgacgcttgaccaattggacctaacactctgcagaacactccaccccacaaccatgaaatttacattccactcatttttacatgaaacatagtctaagatcaacaacaacctttgttatgaagcaagactgaatacatttacaataattgaaatcattccaaatgcaaatcacaggggaggtataaaatgtcctgcaaggaaaaggacactatgtcatcttcaaacaatggaaaaatgctatcccttaacagaaaggagtggacctcttttgcagattcggagttcaggggagtctagaaactgaagattttaactgcaatgaattatttctcaaatgtcttataatttcactctatctaaactgagaccctgaatatggttagtgatcagactaggctgggaattcagctagaactgagctgggcttatttttaaaattcagtcctggacttaagattcagattcatttggtggtggggaccgggtgcttctacatgaagtgagagtctctgtatatgctgcagttagggaagcaggagctgaggagagacagagtaatgtgattttaagttcagctccctataaacacacacacctgcaatgaagagtccagatgtcccaatacccaaaacgatacatgatttcaagataataacagttatgttttgatgtattcacacaagaaagtgtcaaggatagttttcttggcataaatagaataatcagttttgtcctgttgtctgaccacccacaactagacacagcttaattaacctttacagagatgagactcctacataagaaaaacttaaaacaaaggtgttgcattcaactccttgccttctgaggatgccctactctgtaatgtcatagctttcaatgaattgtcttctcattgcactctgtgactgaccttgaattccttactgtgtggaatccaataaccttctcttggtgtctgaatctagacccctttttctggtaacacttccaaggagacttctggctttcaccgtttgccttaatttgatggttattggtcctcactcttccattattttctcccaagcattaattctgcagaaaaaaacatttgcctctattgtggtcataatttctacttttcccatattgataaatttgtgatatatcctaataagtaaagctttccctttcaaaatactaccagcataatttaccattactgaaagtatgaaaaatttaaattatcacattccaggggctatttgtgttctctgtaccaatagtgataggattctcattacaactggtagtgtatgatccaactctaaaatctcattttgttgtctgttctttttttctgacctctcttggtacatattatcaaatgttgggtgcttccaagaagtagactctaagctgaatattttttgagggagataattagggagatttcttgaaaataacatctgtgaaaaagtaggaagcaagattggacagtggaacaaaatagtacataattcagtgcaatagtttgaatgtctgagtgcccccaaaattaatatgttaaaattcttataaccaaaatgattgtattagcagacagaaccttttaggaggtgtttatgtcatgaaggcagagtcctctttaatggaattaattcttttgaaaaatatgctcacaataactcattcatctattttccccattaagacatggtgatgggttgccatcttggaggaatgcccaataccagcatcttgatggtgaatctttcagcctcaagaactgtgacaaataaatgtttgttgtctgtaagctagccaatgtatggtatttttctatatagcaccctgagcatgctaagacatgcagtctcagcataggtttcatctcacccactggaaattctgaagctaagttagcccttcagagttggtccaagttgaaatgaggagaatgggcctttagagtcctacatgtgaccaggcattggatattggctgtcttggaaaagtcactacatactagatagctttcagcagagatgtactgagagagagagcttataggtgaggtatgtcagttgttcatcacttcatcagctggaaagtaatttctatattcccaaaagggaaatctgggtgacacataatgcctgcactcaaggacattgaaaatattgaacaatattgccactctccaggcaatatttgctcagaaactgtgttcaaatatctttttaagaaagatttacctcatttcagattaacagattattaatagaataaaaacaaatatctctattttgtgacatgcatcttttccttcctaattctacttgatgtaaatttctatttagactttttaaaagtacaacttgcctgaattacaaggcaatctgtgaaacaagttaagtagtaggcatttagaagataaatattttctaagactgagaaatgtaagcaatgttgcaaatattcagaaaaggatattattgtgatttagacaaaatattttcaaatgaaacaaagtaactgtaattgtacttaaaacatatctgtttggataaaaataaaaggaatttctacagtcagaaaaacaatgtcaaggaacatgaaatgaagctaatataataagtgtgaaactacatagagaaaatgaagatattctatttgagaatgtttagataaataagaatagatcacaccactgcctcattgttgacagaatgatgctttcttatactagaaactctttatatacaattaaattatctcttgttctggagacagccacatttacaataagcaaataacaataaatttattattcacacatacaaacacaaaatcattcatccttttctttattctcttgctttccaaaaactctattgtcaacacttaaatcattgtgacattgattgacattgatatgtaccaagttagagaaagttagaaagaaagatagcattttaacaagttgtctaagaaatgggcttttttgtttcttatgctgacagttgtattctagctctgagtcctgtgagaatgtgctggtgtggccagtgaaatacagtctttatatcaatttaataatgatacttgatgaacttgctcagaaacaccaagaggtaactgtgcttgtcaccttcagcttccatcctcattgattccaacaatttgctgttaaatttgaggtttatcccacatcttttactgagaatgaacttgatttcatttttatgaaattgatcaagatatggacatacaagtttccaaagagtacattttggcatatgattcaaagatacaaaaaacacatattatgaatgttctgatactgttcaaaagctctgtgagtatgctgttttgaacaagaaacttataaggaacaacaagattccagaatttatgtcattcttgcagatgtcatttctcattagtgagctgctatctgaacagcttaatctgttaaacatttgttatacatttggtctactatcatccatttacaactggcagtatgtaccaagaactctgtggaggactttcattacctccttctgatgtagctgttgtcatgtcagaacttagtaccaaaatacatttacagaaagatgaaaaatcttttgcattttcttcattttaactttgcatttgataattttaacaaaaagaagtgtgatcagttttacagtgaagtattaggtaagttagtggttaatttattcccttttccctccaatatgtggaaggaaactttcctttctttgtgtctgttagagtgtgttaatgaattaaaatagaaaataaccttttttgttatttgaaagatgaggtttggcaagttggtggagacactgaaactctcatacattgttggtgagaatagaaaattattcacccactgtgaaaaagtctagcaattcctcaaaagtttacacatatatttaccacataattcaataattgcctttctaggcatatacccaagaaaaataaaaacatgtctacagaaagcatgtacatcaatgttaatcaacgctattcataatggccaaaagtggaagaaaaacaatgtccgtacactgataaatgaatgaataaataaattgtgtttataagtagcatctgatactatttggcaataaaaatgtgaacgctatttataatggccaaaagtggaagaaaatcaatgtccatccactgaaaaatgaataaataatttctgcttataagtagcatctgataaaaagcaataaaaatgaaatccttatatacactattctatggatggtcctttaaaaacattaaactaaataaaagtagccagccacaaaagaccacatattatatagtttcatttatttttaaaaagatcctgaataggcatatttgtagaggcagaaattagattactggttgcccagtacagtgtgggtgcagaaattcaggtggggagatgacagttaatatacaggattttttttttttttagataaaactgattgctatgttggatgcacaagtctgtgaatttactaggaaatatttaattttaaataatcattcatgaatcatatggtatgtgaattatacttcaacaaagttttacaaaatattccttgaaccaagatattcaaaaattctatttgcattgtataattacttcatctctcattctgtgtcaaggggcctgcaggactctctcacttgccactgttcttgacactattataaaatacattatataaaacacgatatttgcaaggtcattaaacttaggtggatgacaccaaatataaacataaaagaaacatcaaacatccttgagtaaatatgaagtaatcgaactttgtctccttgccatccatgtactcaggatgctcatataatgtatttactttgaattgaaggagttatgttttaacttgattgatttatctctgtatataagtatgagaaagaaacagtgactggaaaagaattatcacattgcacaaggatggctctgaaatggactacagttctgctgatacaactcagtttttactttagctctgggagttgtggaaaggtgctggtatgggccgcagaatacagcctttggatgaatatgaagacaatcctgaaagaacttgttcagagaggtcatgaggtgactgtactggcatcttcagcttccattctttttgatcccaacgactcatccactcttaaacttgaagtttatcctacatctttaactaaaactgaatttgagaatatcatcatgcaattggttaagagattgtcagaaattcaaaaagatacattttggttacctttttcacaagaacaagaaatcctgtgggcaattaatgacataattagaaacttctgtaaagatgtagtttcaaataagaaacttatgaaaaaactacaagagtcaagatttgacatcgtttttgcagatgcttatttaccctgtggtgagctgctggctgagctatttaacataccctttgtgtacagtcacagcttcagtcctggctactcatttgaaaggcacagtggaggatttattttccctccttcctacgtacctgttgttatgtcaaaattaagtgatcaaatgactttcatggagagggtaaaaaatatgctctatgtgctttattttgacttttggttccaaatatttaatatgaagaagtgggatcagttttacagtgaagttttaggtaagatttttttcaattagtaacatgaagctctaacttatttgtgtctttgaagcacaacttgcataaagccataaagtcagggaagtggagtttttggtaaatgaatttatgaaatgaaaatacaagatgatctaccaatctcacaaatattatagaaaagcttaaattatagggtcagtgaaaacgctgtgaccatcactcatacagaacaccccaggaaatcataaacctatatattagtacacctaagactttaagcaattatatatctgtttt

SEQ ID NO: 10146 - DNA, 6000 bp, Homo sapiens
cgtaataaacatcaagtttcaaaataaagcgtggccattcatatttaatatttaatttttaacatctgtgtatatttatttcaattcggagccctgtaaactcttaatctctgtgagcagtgcgtctgggagctaccatcacagtttctgagaagtgggcttcaagtattctgcacctgcagctctgctgtgctggttgtgcattctgtgggaaagtcctggttggccttgtgacatgagccattagcttaatgtcaaaaacattccagataaactcatagaaaggggccacaaagtaacaatgtttacttactacaggcttttctcattgactacaagaagccttcttcattgaacttcaaggaggtccatgtggcacatgacaaagataatcttgagaattcaaatgatgaattttttgacctagcttattattttcttttattttctatttgagacaaggtcttgctctgtcacccaggctgaagtgcaatcatggcttgcttcagcctcgaactctcaggctcaagtgatcctccccaccaaagcctcccaagtagctaggactgtaggcacaccccagcacacctggtcaatttttttgtaaaatgtttgtactgagtaggtcttgttatgttacccaggctggtctcaaactcttggccttaaatgatcctctcatcttgcctcccaaagttctgggattacaggttgagccactatatttggcttgtagacccagttctcagtatctttcctggcttatcatctggtaatggaaggtaaaactaaatatattctttaattgaattgggtggaatttttaaaccactatgtgagtgttgtctacagtcaggcactcatgaagcagctgcaggaaatgaatcattacagagtaatggtttactgaccctataattttctctggggagctagtggctgagttgcttgcagtcccttttgtgctcacacttaggatgcaacagggagtgatgcttcaggaaacttctagctccaccttcctatgtacctgtgcacatcgtaggacagagtgacctttctggaaaaagtaaaatataaaatataaaaagtaaaatataaaacataaaatatgaaaaatataagttttctttaccttttgtatccaggattatgactttcatttttggtaatcattttatagtgaggcattagataagtgtcttttattttaaatgagttatcaaaataaatagaagagagttaaatgaaatctatgtaaatataaataatacatttttatatagctatcctacatgcaaaactctaacagtgataccaatgaaagaataatcaaaatctaattgggaatagaagtaatacatttcttaaaatagttacactttctttagagtcagttaaccatttttcttgatacttgttaagagtcatgccaaaaacaatacccccaccccagaaaaaaaaaaaaaaaacaatattaatactttggaagatttggaagacatatggtttgtcatacataatctccaaagcccacaggctggaattgctaagtcacccaaacagcaaagatggcggcccatatctctgtgagctctgtcccagggagttttcaaatctctgctggcctaagaacaatggtggaaatgactggagtcccctgttgggaggtcccacccagtgaggtggaacaggatctgcaacctacttgaagaagcagtctggccatgttttggtagagtagctgtgttgtgctggggaattccttccttctgtggtcgatttggatgctccaaagctcaaatgccagaacagctaagttgcacaaacagcaaagatggtggcccaccccacgcggctgagagttccattccagggaggcccaacactgctatcacggctggttgaaattccaagccagtggatcttatcctgtgaggtgctgtgaaaatggggcccgcagactgtcactgctcagccccctgaattcagcctcccactttgcaattctaaccttccactttgcaagagctacagctacttttgccaggaagccctgaaagccagagtatctaaaggcatcacgtctctacacgtgcctgagtggctgctctgctgagactccacatacctttgtgtgtcagactgaagacctggttaagtgggttcatgaggggatcttgtgacctgagggttacaaaaatctgtgaaagaagcatgttatttggggtagcacattcactcaccacttccctgggtgaggaaattttccttggttctgtgttgatgccaggttggcagtcatcctgccttacttttcttcattctctgtggatcaagttgtttccttaaatagtcccaatgcgagtgcccgtatgtttcagttgaaggggctgtatttactcaccccttctgttcatctttgtgagagccatgcatattacctacttccggtcagtcatcctggccactcctccagcttaaaatatttttagagtatatctcatattaagtgttttcactaatacaaggcatacttctgagatgttgcagatttggttctagaatactaaaataaagcaaatattgcaatgaagcaaatcacacaatttgttttggtttcttttttttttttttttttttttttttttgagacggagtctcgctctgtcgcccaggctggagtgcagtggcgcgatctcggctcactgcaagctccgcctcccgggttcatgccattctcctgcctcagcctcccgagtagctgggactacaggcgcccgctaccacgcccggctaattttttgtattttttttttttttagtagagacggggtttcaccgtgttagccaggatggtctcgatctcctgacctcgtgatccgcccgcctcggcctcccaaagtgctgggattacaggcgtgagccaccgcgcccggccggtttctaaggcatataaaaagttatgtttacacaatgctatagcatattaagtctgcaataatattaagtctaaaaaaatacatgccttaatttaaaaacacttaattgctaaaaagtgctaatgatcatctgagtcttcagtcagtgcaacttttgttgatgaagattctcatatcaatgttgatggttgctaactcattttggtggtggccgctagtacttagcatggctgtggcaatttcttaaaaataagacaacaatggcatttgccacatacattaacccaccctttcacaaaagatatttttagcatgcaatgctgtcagatagcattttacccatagaagatcttctttcaaaattggaattaatcctctcaaactctaacgctgctttataaagtaagtttaagtaatattctaaatctcctgttgtcattcaacaatgttcataacatcttcaccaggagtagattccatctcaggaaacaagtttctttgcccctccaaaagtagtaactcctcacttatttgttttatcatgagatttcatcaattctgttacatcattaagttccacttctaattatagttatctttctagttttattatatttgcagttacttattccattaaagttttgttataggaccaacagtttcatatgcttactgtccaataatagtccaattacactgagacgtcagatttggcagcaaagaaggagtttaataattgcagggcactgagcaaggagataagaagagaaccctaaatccagctcctcaaggagttctgggttggaggttttaaggagatcatagatggtgataggctggaaaatttgggtaattgattagtcagggtaatagggtaaagtcatcagaacaagaaactacattatttgctgagtcagttccttgtggggtcctctagatcagctggcatcagtgaagtctttcagatcagctgacatcagtgagatccttcagaccagccgagtcagtagttttagcagtatgctggacctgaaggaatacctcaaaaggaaagttgatcatttcataatgtttaagttaatatttatagaaggattaagaggaactatagtcttgtaacagggtctgcataattctaggacaacagccaaataactgtgaggaagtgagtcggagaacaagctaacctaatgattaatgctgaatgtactacaagcttggtttacttttctctttttctttctttatctttgattactttaacaaagtttaaaaagatagtgtcatcttgaaactctcaatatcttacatgatggttgtaagaatcaacatgtatacgctatatcataaatgaacctttaaaatattatgttacataaaagaagccagtcacaaaataccacatattgtatgattctatgcattaaaaattgtccagaataggcaaatctatagagatagaaattcaattagcaattacctaggacaggggaaatgcagaaactaggggtggagagaaaaaggctaaggactatagggcttattttggggagataaaagggctctccaactgattgttatggtagatgcacaattctgtgaatatactatgaaacattaaattttacacaataattgataaatagtatgatatttaaattacatgtcaacaaagtttacaaaaatatgtggaccatgtttagtcatttaatctttagttttgtgtcaaatggactgcagaaacaagatctgtcactgctactgttctggacactcttctaaaatatattgcataagacagatggcatgtccatacaagatccttgatattagctgaaggatagcactcataaacataaaagggaaattaatcacatctgtgtgaacagatcatttaccttcatttgtctctttgccatccacatgctcagactgttgatttaatgatattgtatgtactttgacttataagggttacattttaacttcttggctaatttatctttggacataaccatgagaaatgacagaaaggaacagcaactggaaaacaagcattgcattgcaccaggatgtctgtgaaatggacttcagtaattttgctaatacaactgagcttttgctttagctctgggaattgtggaaaggtgctggtgtgggcagcagaatacagccattggatgaatataaagacaatcctggatgagcttattcagagaggtcatgaggtgactgtactggcatcttcagcttccattctttttgatcccaacaactcatccgctcttaaaattgaaatttatcccacatctttaactaaaactgagttggagaatttcatcatgcaacagattaagagatggtcagaccttccaaaagatacattttggttatatttttcacaagtacaggaaatcatgtcaatatttggtgacataactagaaagttctgtaaagatgtagtttcaaataagaaatttatgaaaaaagtacaagagtcaagatttgacgtcatttttgcagatgctatttttccctgtagtgagctgctggctgagctatttaacataccctttgtgtacagtctcagcttctctcctggctacacttttgaaaagcatagtggaggatttattttccctccttcctacgtacctgttgttatgtcagaattaactgatcaaatgactttcatggagagggtaaaaaatatgatctatgtgctttactttgacttttggttcgaaatatttgacatgaagaagtgggatcagttttatagtgaagttctaggtaagtatttttttcaatcagtaacatgaagctctaacttatttgtgtctttgaagcagagcttatataaagccataaagtcagggtagtggggttttggtaagtgaatttataaaacaaaaatacaagatgatctattaatctcacaaatattatagaaaagcttaaattacagggtcagttaaaaccctgtggccatcactcacacagaacaccccaggaaatcataaacctatacattagtgcatctaagactttaagcaat

SEQ ID NO: 10147 - DNA, 6000 bp, Homo sapiens
atagtaagtgtcttgagatcttatagttttataaaggagagtttccctacacaaggcttcttgcctgcctccaagtattatataacattgcttctcatttgccttttgtcatgatggtgaggccgcccaagccatgtgtaactgtgaatctattaaacctctttcctttataaattacccagtctcgggtatgtatttagaaacagcatgagaataagctagtacagtatcctaaaactataaaaccctagaacaaaatcaagagaatagaacataactgaactaaaaaacctctgtgcaacaaaagtaactatcaacagaataaacagatgacttacagaatgggagaatataattgtaaactatgcatctgttaaagatctaatatcaaaaatctttaaggaacttaaagaaattaacaaaacatacacaaataactccattaaaaaatggggcagggacatcaagaaagaattctcaaaagaatatatacacaggaatgtgttcaagatgatcaactagatgcagtcaggaagtgccactgccaccagggaaacaccagggttttttttttcataccaaaataatttgaacagatctttggagagaaaatactgaatgtggatggagaaaagaagtagtcactgaggctgaagagaaagaaggctgaggacgctgaatggtgtgcctgaatgctacagctggttctctaccctgagctgtttctagggaagggtgagtgaaaggaatagtaaacagcttcctttcactgtagacatctggaattctggctagatggggctccataccttcaaggacatgtggactggcagaggggtctcccagaaattgcacagagatggagatgcagacaaaatccagggacctttgtgaataggtcctttacacagacaagactcctatataagaaaaacttgaaacaaaggtgttgcattcaactccttgccttcagaggatgccctactctgtaatgtcacagctttcaatgagctatcttttctcactgcactctgtgactcaccttgaattccttcctgtgtggaatccgagaaccttctctcagtgtctgaatcaaggcccctttatctgggaacacttccaaggagacttttctggctttcatagtttgccttaatttgatggttattagtcctcactcttctattattttctcccaagcattaacactgaagaaaaaaacattcacctctattgtagtcataatttctacttttcccatattgatacatttgtgatatatcctaataagtaacactttccctttcaaaagattaccatcataatttgccattactgaaagtatgaaaaatttaaattatcacattccagggtctatttgtgttctccctaccaatagtgataggattctccttacaactggtagtgaatgatccaactctaaaatctcattttgttgtctgttctttttttctgatgtctcttggtgcatattatcaaattctgggagcttccaagaagtagactctaagctgaatatgtttttgagggagctaatttgggagttttattgaaaataacatctgtgaaaaagtaggaagcaagactggactgtggaacaaattaggatataattcagtgcaatggtttgaatgtttgagtgttccaaagattaatatgttaaaattcttataaccaaaatgactgtattagcagacagaaccttttaggaggtgtttaggtcacgaagggagagtcctcattagtggaattaattccattccaaaatttgctcacaagaactcattcatctcttttccccattaagacatggtgatgggctgccatcttggaggaatgcccaataccagcatcttgattgtgaaaatttcagcctcaagaactgtggcaaataaatgttttttgtctatatgctaggcaatgtatggtatttttctatatagcaccctgagcatgctaagacatgcagtctcagcataggtttcatctcacccactgggagttctgaagacaagttagcccttcagagttggtccacattgaaatgaggagaatgggcctttaaagtcttacatatgaccaggcattggatatgggctgtcttggaaaggtccccttatactagatagctttcaacagcgctgcgctgagagagagagcttataggtgaggtatgtcagttgttaatcacttcatcagctggaaagtaatttgtatattcccaaaaggaaaatttgggtgacacataatgcatgcactcaaggacattaaaaatattgaacaatattgccactctgtaggcaatattttctcagaaactgtgttcaaacatccttttaagaaagatttacctcatttcaggttaacagattattaacagaataaaaacaaatttgtctattttgtgacatgcatcttttccttcctaattctactttgatgtaaatttctggtgagactttttaaaagtacaaattacctgaattacaagacaatctgtgaaacaagttcaggagtgggcatttagaagacaaatactttctaagagtgagaaatgtcaggagtgctgcaaatattcagaaaaagaaaatattgtgatttagacaaaatatttgcaaatgaagcaaattaactgtaactgtacttaaaacatatctgtttggataaaaagaaaatgaatatctatagtcagaaaaacaatgtcaagaaacacaaaatgatgctaatatcataattgtgagaatacatagagaaaatgaagacggtctatttgagaatgttaagataaataagaatagatcacacccctgcctcattgttgacacaatgctgctttcttatactagaaactcttcatatacaattaaattatctcttgttctggagacagccacatttacaataagaatgaaatttattattcacacatgcaaacacaaaatcattcatccttttctttattcacttgctttccaaaacctctattgtcaatacttaaatcattgtgacattgattgatattgatatgtaccaagttagagaaagttataaagaaagatagcattttaacaagttgtctaagaaatggacttttttgtttcttatgctgacagttgtattctagctctgagtcctgttagaatgtgctggtgtggccgatgaaatagtctttgtatcaatttaatgttgatagttgatgaacttgctcagaacaccgtgaggtaactgtgcttgtcaccttcagcttccatcctcattgattccaacaatctgctgttaaatttgaggtttatcccacatcttttactcagaaggaacttgatttcatttttatgaagttgatcaagatgtggacatataagtttccaaagagtacattgttgacatatgattcaaagatgcaaaaactacatatcatgaatgttctgatactgttcaaaagctctgtgagtatgctgttttgaacaagaaaattatgaggaacaacaagattccagaatttatatcattcttgcaaatgtaagttctcagtagtgagctgctatctgaacaccttaatctgttaaacatttgttatacatttggtctacaatcatcaatttacaactggcagtatgtaccaagaactctgtggaggacttacattacctccttctgatgtaactgttgtcatatcagaacttagtaccaatatacatttgtagaaaggtgaaaaatctgttgcattttcttcattttgactttgcatttgagatttttaacagaaagaagtgggatcagttgtacagtgaagtattaggtaagttagtacttaatttattcacttttccctccaatatgtggaaggaaaccttcctttttggggtctgttagagtgtgtttataaattgaagtaaaaaataacctttttggttatgtgaaagacaagggtgggcaaggttgtggagacattgaaaccctcatacattgttggtgagaatagaaaattattcacccactctgaaaaagtctagcaattcctcaaaagattacacttacatttaccacataattcagtaattgcctttctaggcatatccccaagaaaaataaaaacatgtccacagaaatcatgcacatcaatgttaaacaatgctattcataatgaccaaaagtggaagtaaatcagtatccatcaactattaaatgaataaataaattgtgtttataaatagcatctgataactatttggcaataaaaatgaagtccttatttacactattctatggatggtcctttaaaaacattaaactaagtaaaggaagccagccacaaaagaccacatattatatcgttccatttacttttagaaagagcctgaataggtgtatttctagaggcagaaattagattactggttgcccagtgcagggcgggtgcagaaatttggtggggagatgagagctaatacacaggagttttttgtttttttagataaaactgattgttatgttggatgcacaagtctgtgaatttacaaggaaatacttaattttaaatactaattgatgaatcatatggtatttgaattatacttcaacaaagttttacaagatattccttgaaccacgatattcaaaaacgctatttgcattgtacgatcacttcatctcttactctgtgtcaagggccctgcaggactctctcacttgccactattcttgacactattataaaataggttacataaaacagggtacttgcaaggtcattaatcttaggtggatgacagcgaatataaacataaaagaaacatcaaacatccttgagtaaatatgaagtaatcaaactttgtctccttgtcatccatgtactcaggatgctcctataatatatttactttggattgaaggagttatgttttaacttgattgatttatctctgtatataagtatgagaaagaaacagtgacttgaaaagaatgattgcattgcaccaggatggctctgaagtggacttcagttcttctgctgatacatctcggttgttactttagctctgggagttgtggaaaggtgctggtgtggaccggtgaatacagccattggatgaatatgaagacaatcctgaaagagcttgttcagagaggtcatgaggtgactgtactggcatcttcagcttccattctttttgatcccaatgacgcattcactcttaaactcgaagtttatcctacatctttaactaaaactgaatttgagaatatcatcatgcaacaggttaagagatggtcagacattcaaaaagatagcttttggttatatttttcacaagaacaagaaatcctgtgggaatttcatgacatatttagaaacttctgtaaagatgtagtttcaaataagaaagttatgaaaaaactacaagagtcaagatttgacatcatttttgcagatgctttttttccttgtggtgagctgctggctgcgctacttaacataccgtttgtgtacagtctctgcttcactcctggctacacaattgaaaggcacagtggaggactgattttccctccttcctacatacctgttgttatgtcaaaattaagtgatcaaatgactttcatggagagggtaaaaaacatgatctatgtgctttattttgacttttggttccaaatgtgtgatatgaagaagtgggatcagttttacagtgaagttttaggtaagaatttgtttaatcgggaacttgaagatctaacttatttgtgtctttgaagcagagcttatataaagccataaagtcagggaagtggagtttttggtaagtgaatttatgaaatgaaaatacaagatgatctatcaatctcacaaacattatagaaaagcttaaattataaggtctgttaaaaccctgtggccatcactcatacagaacaccccaggaaatcataaacctatatattagtacacctaagactttaagcaattacacatctgtt

SEQ ID NO: 10148 - DNA, 6000 bp, Homo sapiens
aagttccatgaagcaggaacttttcttgttctaggaatccatcacccagaagagttcttgacacaaaataagtaggttcttaataaatattggttgactgaatggatgacccaaccatgccccatattctgtggtagaactgagcatcctttggttggcactggtaaattgaaatgccatgaaggcacatttgctcagagtgctctttccctaagcagaggggaaaaaggagccaacgtttaatattcagattttgatttgcagtgttttccgtgaagacatgagtctggtagatgggtactagcaacatcaactgttttgttacttgcaaggagactgaggtgctgtggtctccaagataggcctggtctaaagagcagaccagtgggatgtgaacggtaataggccagttggatctggtggtcggttagtccatagggaaacctgtctccaagcaatggaacagctgaatccgcatgacttggtccataggccaaaaaggaggaacagcttttaagtggcctgctatgtaggcccattcaattcccaaggaggcaggaagccagtgggatacaaaggaaaaaacacctttctgtgtctgggaagttgctagtctgatcacgtgtatgtacatttcacacacacacacacacacacacacacactctctctcacattatgagagtccaagggccccaagagtctgttctgatagagaagtctaacataattctctaccaccgtacctaaaaccagaccaatcttttaaatcaggggcctgggttttagtggcttagtagctcattttaagttttccttctccttccaaacagagaggtctgtgtcctgtgttatgctgatctatgggagaattcctgcaggaggaaggggctgaaacattggcctaaggttattaaacagagctttcgtaataaatatgttgataccatttctgaaagatttgcatatttctctatcacatattgttcaattttattagaggaaatcattctggtatcctgttggaattgctgaattttggggtattatcttaagctccttgattttaatgctgtgggaactgagactcagattgaataacctgccttccttgacattaactgagataagctcctgttttcagaagttagaaccctctactgatagttgactttaggcatgtgttttaaaaacgacagttggatatggttgagagctcagttgctaaagctgtgaagcaacttgggacacacgtttaaccaaataaaattattttccccagctcatgctgtgctgacagcttccaaaaactgtgttcaccttcattctctcctcataaaaaggggctacaggtatttttaaacctggggtttgaggaagagaatgttaattataaatctagattagttgaatgtattcaagaatttgccagactgaatatgaatactcttggagtgtaagtgaaacaaaaatgaggcctttggtgacctattatctatcgatctatatctatctatctttcatcccagattggttttagaatgagaagaacaaaagttgctttttctcatttcttactcttacacaatgaagtggttaacaaaattgatacagagtgacaactttaatgatcattctgttgcaaacaactacaagtccaaacaaatatcagcacaaagaaaatctctattctgtgtagcaacatgttggtcagactttcgccaatgaaccacctatttaaaaaggacttgatattgacaaacatctctgatcagtctttgacgtttatagtaacaagctataatgttatctcctaccacctttctgtttaggccccaatatgaaatgcctatgaatgttataattttgtataactccaggagaaacatccaacaatatttttcaccttttttcccaatagtgaaaaaatccaaatataatagttatatttatggattctgctctttgttgaacacagtgctttacagacaacatatggtgacaagccatcactcttcctattttatgtaatgaggaaacttaaatacagagtctttaaggacctagtcagtcacacaaatactgagaaaattctatgctaataatcctatctgcaggtcacatcggcaccttactttcaataatcaacgcagggccgatcaattgcattattctactacatacaacttcttgttttagaatcaaagaatgtcatgcctataagcgaccagaaatgcctggactacctattcgaaaactttcatcttcattcttcttagagacattatgtcgtcatcacctgctgccactagatggtgcttgtcatcgaaacaaaggtccttcctcctttctgttttctttagatgcctattaggaccttggatgatacgaaagaaatttgattaataagctaagtactgggctggtattctaagaagtcctttagtacagagagttgttgattaaaaagtaaacaaatcattatcagtaaagcttacttacaccatttttctaattccatcagtttttctgctcattcttcttgtcaccaagctgtgtgaaccccaagacaaaaagaactaataaatctttctttgtgcttatgagaatcaagagacatggcacaagttttaggagaggtgaacaaaaatctcaggattcattgttatcacccggaaaagcaatcgaaagtgatcacatgcagagtttataagaaaaattaatcaatgacctttcaaaggaaaacacgtatatctcaactactggacactaatcaataggaaaggaaatagaacactcttttaattgtgggatagcaaacatcaagtaatgaaaatgataacagaggttgtcaacgctttgccaaagactctttttctcattaatttaagacacataccaaatctcacctctatagtactctcattgtctccctgcctcccaccccacaaaccaactttatgctccttttagggtaaattcttgccaatctttgtactgaaatgccttcaggagttacctatttaacttacgtgaaggaaagtttgatatattttgcagcagaatgcttgaaaaatgtgtttcttggactttttctttcttattcaccagcactgagtgttcatggctgcttcacgattataatgagaaattgccagctatgttgaaatacataatccacagtgtgaaaaactgctgaacagcaatggcaaatttttaatacaaaagtgacttccctttgcctgttagcttactttgcggttgctgattcttgctaactgcctgctcagggagtgaaagttaattttaacattagcctagaaacagaacataatcatttaggtgaaaactttaaagctaaatttttgttttatctttggttttgagtttcccatgaaaaattcccagtgatatatcactgcactgggttatgtagaatgtgtgaacatatatgtgagccagatgtgacaacagacacatgacagtacattttaatttcagacatcagattggcgtgtttccttgtgccttctgagcattaactaaggattttaaagatagaaactttttaaaagacacaggctccatacctgctttccaagcactggtgaggcaccatggatctctggatctcttccagttttgaatactagaaagaaaagcctctgtcctcaaattatttcctccctaccctcattttttttttctcttggaggtcctataagctatagctttgtattgaagaaatactggggaccaggagcagttggtatgttaaattatttctcttgagctttatgcattttggtggctactgttgaaaacacagtttggtcagtgatgtccacatacacattacatataatatgtattactagaaaatgatatacacttgcatgatataccatgtggttgcaatccattaagtgactactctctagcagtacccagaacaatagatggtgtgtctgtgctgacagtctgttcatatcttaatggtttacttatgattcaatagtttaccaatggcaatggtgctggatcactgatatattatttgcttggcaaagagtacttgaacctcattattagacttaggaacagaataaatacaaataatcactttgctaaggctgttttcctaactcccaaggaagacagaaaggcatcagtgacataagtgaaggacacagttgacaaccacgttatcttcagacatcttttgttaaaggtgaacaattacttaatactgtgttatggcagcactctatacgccccaagttttataaagtagagtcaagagtgatctgagctgggaaactcacgcaattttagttctgcatgaaagcacaggctctccccactggggaactcttttgagtaggacaaaaagctggacctaggacccagcccagggcgtgagagaaaaggaacctgggaggcaagagcggccggtccggagccgggtcctccgccagctccgggcgggcgctgcgcacagagcccaagcccccggcggaggcggcgcggctcgaggcccctccccgccgccgatgcccgggcggctgacgccgagcagcggcccggagcggtgggggccgggctggcgggcacgagcgagggcagggcagggggccggccgaggccacttacggctttaaatatggatcgcaggctcgcgctcgcggcacagcctccgccgcggccgccttccgtgagcccccgcaccccggcttgctcccgaggggcgcctgggctgggctccactgctgcagtgttagttactagcaggaacatcagagatccccataaatatgcaggagctgcaggaggcaaagtagagtagacgcccgcgctcttacacactcgctcgccgcgcaccacacaggctgtgtagacatccccccgcgccacctttcccctttcctcgcgggccgttcaggttgcagtcctgcctgctccgaagaccctcccgccccagcgcctttgccccgctctcccgcgctcgcctctctccggagcgcgcacccacccaggcggcaaagttgtgactacttgggcgcgggtgactggcgccccgctcgctccgcgcccggcgcagacaacttcccgcggctcggccccgccgcgtcccgggctcgcgcctccagggattccgcggccccccagcctccaaccccggcggcgcgccgggcagcgcttcggtggcggcggcggccgcggtggcagcgaaggcggcggcggcggcggcagtggcagtggccgctgcagccccacactccgccgccaaactggaggagcgacggaagccagaccccaggaggtgagcgcccggccccggcagctgccgggagggtcgatggggtccctcgctccaaggcggaggcgggcgcgggcccgggggccgattccgtagggcgcgcaggcggcctcagcgcgctcctgggagggagagagaggtcaattgcgggccgggcatcccctgagctgggcgcgggcggtgtgtggaggctgcttccgcggaaaagtattttttttccttcttagggtttagaggaagagtttgggtggtctgcttctccctcactgctaagtcccctgcgcgcaactgggcgtctttacgaggactgcggggccagttctgcggcgggctgggctcgggctcagtgacacgtgtgttgctgtgagcctgggtggtcgccctgtgaccaggcacctgcttgagaggaacacatccctaaacccatcacagggggagatttggggactcttggtgctaccgaggccgcggcccccacttcactgccagctccaggacggagcatttacatctctccctggcacgccaaaggcggggggtgagtcaggcagattctctgcaagtggcacacacacatttatttgcaatggatttggctaggggaggcataggttaaactggaatttctcttggccagcgacaacggagctctccctcaggtactgggcagcatgtgagtc

SEQ ID NO: 10149 - DNA, 6000 bp, Homo sapiens
cacttgtttaaaacagtcaagaagatgttaagactattgcagtggatgaaggagattgaactaactatgaatacaacatagacagctagagatttatagccaatgagcagagctagggggttggtggatgaaaaattactaagaggacctttagatattcagggtagggggattcttgttaaactggcttgtcaggatgcttgataacagcaggccaaagacttagatatcaaaggaagaggattagaaactagataaaatagcaatggtgagggaccctccataaactgacttaacaggattctttgctaaaactgggctcgatgggtctagatcaagacctgatcagggagagagctcagaggagcctgactaagattcggtgaaagagtcaacatattacagaggtaaagtcaatgtattggaaccataactttacaagtatttgaagtccttaaaagatagacatgttggccttgtggaggagcatagagatggttttcttctcctaccatatctgtatctgtaaagtatctgtaaagagcgccctaaagaacataataaagttacagaaatgattatgagcttaccatatatgtatgaaagcaagagttgcaattagacaaaaatgaaaggtttgttttggaaagtggtacagctggataagtatgcaaaaataaattagaggagtggataaatcagaatttggcagtatttagcaagttacgagaattgtagttagaggtcagaagatgttatcattgactaacatgaggaaattgtaaaagggagctgactttggagtagagataatatgttcagattaaaatatgttaagtttgaggtgatgacataatacatagataagaattctgaagtaatatcagtctaggaagaggataagaattcatagttactgataagaatttaggactcgtcagcatatacggacacactaaattcctggccttggtaaccattatacacactctgtgtctttccacacttgttcaatagtaacaactatccttaactgagcacgtagcatgtgctaaatactttcctcttttgttcttttctttctttctttttttgagacagggtctcactctgtttcccaggctggagtacagtggtgtggtcactgctcactgcagcctctacctccaaggctcaagcaatcctcccacctcagcctctggagtagctgggaccgcaggcgagtgccaccatgcccagctaagtttttcattttttgtagagaagggtctcactatattgcttaaactggtctcaaactcctgggatcaagcaattcttctgacttggcctcccaaagtgccttttttttttgtctttgctcattattgacaatctccacttgatagatgagaaaattattgaccctcctggttattaaaaagcctcagccaaggccaaatagatagaaaaggtggaatctgaattcacaacaaagtctgttgggatgatgtgagtcagaagccactccttttactactccactctgccttccctcagatcctgccctcaccccgaagtcctttctcttattactaggtgtctaaatcctacttgctatttaagattcacttcaaatgaaacttgtccatgaaaaatgtcagcccttagctctcagagcttttatgcacacattcatggcagttgtcactccctacccagtactgcagttatgtatgtactttgcctagaaccctttagttccttgaagtcagaatccatgcatgatttctctatttgtcttacaaatatcatctcacccagcctagtgccatggatatagtagtcattcaatattttatgaatgaatgcaactgaatccatgaaagtgatagaataaacttagagagagaatcaatgaactgatcaccattctctgccaatgaccagtaataaattttggttaagttagtgaaacagccaggaaaaaaagatagaaaggggagggaagaataaactttcagagattctctcttctagcataaacttctagaagaagagagataagtaaattgaaaagactggaaacatggcatgagagaaaagtagtagtggagctcttagcctctcatttccttctcctttctcaccctaacctgctttaatgcatattaagaatgaataaagatatcagaaaaaccaccttacagtatccatctgccccccattctttaggatttggagaaaggacttttgggtgagaggattgaagatgtgaagggagtggactttcctgtaaagattgttaagtgggagccatgagtatgggccccagaggaaaggcaacatgtttgatgacttaaagttactttctggtatactccataagctaaagcagaagatgggtttctatattaagtggcccagtttaccagagaggcttcagttccatctctcagcacagatgtgagtgaaaatcacagttaattaaatatttagttttttttctaataaaggtaatttatttaaagcttgattttaggagataattgagggaattcttttgagatcagtacaacaactactacaagagaacacagctaggtaaatggaaagagcatacgatttagaatctgtaaatatagaattgaagtccttttttttgttcgttttgttttgttttgtttgtttgagacagggtctgtagcccaggctggggtgcaatggtgtaatcatggctcattgcagccttgacctcccaggctcaagtgatcctcctacctctgcctctcaagtaactcatgcccagctaatttattttttgtagagtcggggtcttgctctgttgcccaggctggtctcaaactcctgggttcaagcaatcctcctccctcagcctctgaaagtgctgagattacaggtatgagccactgcacctggccaggattgaagtgctgactctaggcatgtcctttggcaagtcacttaattcttttgggcctcaatttgtcatttgtcatgtgagaatagaaataatgcctatttatttccttattctctgaagacagattcattgagtatttactagatgttaggcactggatttgtttgggccagggttactgaagaaagaattgagatgtgtagggaaacctgtaaagtgcaaaggactgcactagctacagttaagagtttttacaaagataatctttgtactttgatgtctcagtcttagaaataaactatttaatcccagcactttgggaggccaaggtgggtggatcatgaggtcaggagatcgagaccatcctggctaacacagtgaaaccccgtctctactaaaaatacaaaaacttagcagcgcctagtggcaggcacctgcagtcccagctactcgggaggctgaggcaggagaatggcatgaactcaggaggaggagcttgcagtgagctgagatcgcaccactgcactccagcctgagtgacagagtgagaaaacatctcaaaaaaaaaaaaaaagaaagtatttaatatgagtcctaacatctccctccagaaactacaaaaagaattgtgatggtttatttaatcttttgtaaatgatttctttttaaattctcagcaatggtgcaaagacgattgttcaatttataattcaaatgttatttgcctgggaaatatattatctagaaatcgacttagtaatcaacagttttttaaaaacctacaaaagtagaaatgcaaaatgtagacacatttaaagcgagccaagtactattatattattttaactttaaaatgatgactcctgtggcaagtgattgcccaagttataatgagttcaacaagcttgttcttgtgtgatttctaacaccacatttatatttgaatagtgaaagggctcctttctggtaaatctaatttgctgagtggacatgatgcaaaagataacctatcttgacttgaatatgtttttagggttttgaggtttcaagtttcaagaaaatacaaggaattgaaattccagacagaaagactcaatgcctcaggaagatatatttataaatcatttatattaatttggggcaagtgaaaatttctgtagttgtaaaatatagtagctgtaatgacatattttggcctttaaagtgccactttaataattacaactagatgaacttgagaaataatttgaatgttgtattaacttagaaactttctattcattggatgtatccaaactaaatgtcatcttaattttctcttaatggagaattttaatattattattattgctattatcattatgttggtactttactggttctctgtagcttaatcattgggatgcagatttaagcattgttgttcctggaatatggcagcccatttcatttactcagaaaaatgttaaatagcaggatgacagaaaggtgaatattatactattaaaaataattttatttacagcacttgtcatagtaacactaagaaacaaacactaaaatggaatatgaaacctctgtgttttcacaaatttaactgttctctgcaactaaattaacaaattatcttgatttgaaatggaacttatagtctgtaataaaaggtggtataaccaactatagtttcaggtatatttcttttagaaacaggttatgctgcttcctaatttgcagttatgtttgttgaactcccgtataggtttctagcatagtttgagctggtatagttctcttcacaccaatgggagcctttcctgaaattacattttgttcttgttgttttaagtacttttacatacatgattatgcccacaggtaacaggaaaccagtgtttcaaaagaaaacttgatcacattgctagataatacaggtatcctaaccaagtgcgtgagcgcccagaggctttctgctgctgccagaagtacatatttttttgattggtaagaactgccagatgacgcttcatgaaatataaatgcaacaaagactcagagagctcaataaaaaccttccacccgtcagtctagaaggataagagaaagaaagttaagcaactacaggaaatggctttgggagttccaatatcagtctatcttttattcaacggtaggtaatttccttttgttttgttaactttatatcagtgtaaaatgtgaatagaatttattttctctgcattagagagaagttggcttctaacagttgttctttatgacaaagatcagagtaatgaatctgtggattaatttagtttcttatgtcctgtatgttcctttcctaatatattttgacaccttttttgagacctccagaatgtttgctttatacaattgaagagtaattgatacatttagctactatactatagggttcttattttttaattaatatgtaaatgtatcaatggtcttaaatattgggtttttatttgctttaatcctaatatagtcaatggaatggatgagaaactgtaagtatgttgccctagtcacgttatggatttcaactgtaataaattaaaaaaatagaaattggaataaacagaataagaatactttccatctgttgcttgtacatagaaggaggctctctgttaaagatgcttttgcccccttaatacagcaatgacagcactgaccgaagaggcagccgtgactgtaacacctccaatcacagcccagcaaggtaactggacagttaacaaaacagaaggtattttcttcccattttcatatttcacaagacttttctaaaacttgggagagaaatttggattgtgataaaagcaatattggccatttttaatatatattttattattagataatcagctcttttagcaggatgctgttaaattgaagtgacagataaatgtgccaggaaataattgcctttttaaaaggaggaagttaagcaaatgagacaaaagctgtcttcagttactgtcttgaatgtgaaacaggccacattttctgcttcatttctgcttggttcccaataacccctgtgtgtacag

SEQ ID NO: 10150 - DNA, 6000 bp, Homo sapiens
actagcaaaaggaaactgttgaaatagctgcagaagctaggaactgataagaccctcaaaacccaaggtatggacccagctggctaagaccaactggatccaacatggcactggatttcacctagatttctcctaggacctcgttatattattgttaacattatcaattacatacccaccagtgccatgacagtcctgagaacacccatatttggtgtgaaaaaataggtggcaccacagttctgagaaatctctaaatttttccaggaattttaatgaatattccaccccttggttaaagaagcccataaagacagaaactccaaactccatcaaacaactctgtcttaagtacccccacaatcccctttcttgagtatatgcttttcactttgcaataaatctcctactgtcactattttctgactcattcttgaattcctgcttgcaatggtgtcaagagcctgaacactgttatcaccttggccttagacatccagcttccataacatggaaaaaatacatttatgttgtttaaaccacctagttggtgatgttctgttatggcagccctagcagactgatacagaaacaaaggaatagaggtgccaagtaattaattagaatcactcagttagtagatggcagaggggattaggacccaacctctaaccactgcagctctctcagccaagttattctctcacttaagccaagagtccagatgaaaccatctcatgatataaagaatccagaaacaatacttctatattacctaaaatgtattatctaaaattataaaatataatatattcaggatgtaaaaatctatgtcagccaagagcaatttttttggtaaaatgttaaaagtccacaacactaaaaattcattttaacaatgatcaaaaaagagtcaaagtcagtaaaaggtagatttatgtgagattttatcccagtggagtattataaaagaactaagaattctactaaaaaaaaaatggcttttgctgtaagtcataactaagggttacatgcaaattccatccttgaccccactgaggagtactagttcccctgctattatatctcattgaatcccttagtttccttcaaagttttattctgtataagtatttctcagtttcttactttgtaacatttggataataatagtatttggggggagaaaagataatttttctctctaccccttatgagttctaagctgggatcccctataacaaaagacagattaacaacaacaaaaaccccacgaggttattaacatgtatatttcatatatatgtacaggagatagtcagggaattagtaattttcaaagaggtgactttgaattcaaacttaaatatcatcttcagctgaaacaaagaaagaggagtatgggggtaggggtgcagttatgaggaagtgaccaggtaaagcatggcaaacaaaggtaaagtttgttatgcgtatttaagtcagagccctctccattgataagagtttccagtaatttagtgccatccttttcttcctagaattcagaggaagacatttttacaaatgaaaatttcctttatagatttaaattcaccctacaaaaaggtaattccactctgttctcagagttgctcctatagctgctgtttctcaaacaaatgcttatactgaaaaggcatattctgaagtggcacattctggtcttctacagtatctatctcacaaagttagagtgtagaaatgtaaacacatgactgtacataaaatgcttgaaacaattaataaattttcatcattattattattgtagcatttaatataatgttattgcatatgtctttgtgattattcattcaatgtttaactccccactactagaaaataagtttcctggtgcagggacaattagcccctgtggcacatatcacaatgttccctgctatagagttctcgtctctatctgagcacgcaaaaataacatgctttcttgctttcttgaagttgggcatggccattgacttgccttagcccataaaatatgaacagaattgtcacttttaggtggaagatttaaatacttaattctccacttctctctttccctaactcagtggatgtgaaactgttagaggtggatgtgaaactgttagaggtggaagttatttgagtcaccggcagagactgcagcaacctcaattcttgcctcggaaggaagaatataattgaggggcataaggcagaataagagactgaggcaagtttcagagcaagagtggaagttaattaaaaagctttagagcagcaagaaaggaaagcacagttggaagaggcctaagagggcatcttggacgtcaagtgccccatttgaccttgcacttagggttttacatgctggtctacttctggcgtcttgcattgctttaatgcccccagaaggtcatataccagttaaactccaccattttgcatcttaatgcacatgcttgagttcagtcacccacctcctgagatcttattggaagctgctgattaccagtttcatgtgttccctatttatggggagatggtcagtccctcgtgccagctgtaaccaattattattttagagagacagttaataactgcctggccatcacatgatggttacctgactttcctggtggggtgtggggggagccctctgctgccccactcatgcctatctagctacctactgtaacaaaagcaggtttcgatatggcggtacaacactgatcctgaggacagctactctgaggagtaacctggatccatagcagactttgatgagcaaaaaataaaccattatcgcttaagcttgggagactttgggctggtttgttacagcagcataacctacactaccctggctattacaaccattgtatttccattgcctagcataagggctggcgtaaaataagtgattaaatatgctctgactaaattaattaataaattaaaatttttaatcagcaattaaaatgaactattttaatcaaagaaattatttcaactctatcctgcgtacaatagaaaagttttggaaattttcactgattagtgtgtaggggtcatgattctttgagtaccaaaccattatcttagatatcaaggttagagttgcacatgcttcgcactccagaaagactccttcaagttttgctgaatttcaattgaataaattttttctgtgaagtggtcttcaaaaacctatatttctgccatagagtcacttacttaacctgccctatttaaaggggctaatgcctgatagaatgtcgctgcataactccatctgtgtgtggtccctgcatccatgacaaccaaaacccagatgcagaaattgttcctaatcacatagattaccctagaaaccggaagggccttgaagtcaaaagcattcagagaacatgctgaacaaattgaatttgcagtttatctggccagggaggatggagaggggatgggcacttggtctgagtattttttgtttctcattccaacagaaattactagatttaccaaaacaaagagaaaaaaatatgatccaaatttaatctggttgtggaagtgtgagcaaaatctacaagtggtagtgtgatagagtcaggcagaggaattgaccatagataaggtgctcaggactcctagagtcagcttctggtatgtgagaaagaagtgagaacagagcccatggcatatgaagaagatattacagaaaaaagaaagctgccttccacgcaaatcatttctttacaaaggcttgttaactcctgcagtgccccagctctagtgactaggggaccaataggttcattaataacagaattgggagagaacctggcatctgctttgatcgaagtgtgagaattaagcaagcctaaagtgtagcaagagcagggagggaactgaatgaaaggtcagttctaatctgtaggctttggagaagctttgggctcttgagagggagtagagtacagaggctgagcggggtgcctgggcaggcatcttatcattacttgcgagttgtgtgaactcgggcaagttaaacttctctgtgcttctactttctcccctgaaaacgaggatataatctccaaggattgttgtgagaactaaatgacttggttgattcctgaacagcacgttgtccagtgcctagcacatagcaatcactcaggaaacgtcagcctttattatgggcctagtgcacaaactattcttaccagttatgcgaccttgagaacattgtcttctctgtgccttcattttctcacctgtaaaatggaataataataattcttagaaggattcatgaaacaacgcctagtagggtgtctggcttagttatccccccgacagtattttcttctagtaagaagctgaatgcagcggcagacatcctggttcgggccccaggaagctcagccgggtttaatgtggatgagggtttaatgatgtacacgcagaagtgttttgacaaatgaagaaggtcctcattcttggaacatgtgccggttctccgagggaactcctaaaatggcataaggtcacctttttaaaggctgtaagctcatgtaggaaaagctgagctagattcctaagggcagagatgtgctcacatttctttgcatccctagttcccagcacagtgcaaggcgctgcaaacatttgctgaacccagggtctcgtgtcttgactgtccagcagaggccgctctgggccggggctctcgggacctgagggctgagagaaggaaggccagggggtggcccagtcatcgccgcggggcccgggtgggaggggtttggcagcggcaggcgcggcggcggcggcggaggcggaggcggccccgggctcgggcggctgggatggagcagaagagcgcggagcaccggagggcacgcagctgacggagctgcgctgcgttcgcctcgtttgcctcgcgccctccactggagctgttcgcgcctcccggctcccaccgcagcccacccggcagaggagtcgctaccagcgcccagtgcgctctgtcagtccgcaaactccttgccgcccgccccgggctgggcaccaaataccaggctaccatggtctacaagactctcttcgctctttgcatcttaactgcaggtaattggcgccatcctcccggaagggcaggtcgcggggtgggccccagtagctagcgcgtggtcggggctgaagctaggagatccggcagtgagtcgccgcgcgcctccgggtgagtgcgcaggtgtgtgcgcacttagatttggggtgacgtgcacctttggcggtcccgaaccgtactgagggaggggacgatggggtccttcctgccgcagcccgcgcccgcacaaactccagctttgtagaacaggtggctgtcttagctgcgtgttcgaacccagagtgggcaacacggactgcgcctcaaggcttctctttcttcaccagggtttcggagcgcactctgccaaagtacgggaccagacttcttgttgccgttgggccctggaagggatgaaaaagccggggaagtgggggtgggaggttcgcatctgggaaggcttcagcagcggctgcgcgcctggcggggctggtttgctttctcgagtcttggcggtctctgatctccggcgtcccttcctagttatgcttaggatgatgtggcactaacagcagcggcccggccttggtcaggctcgcaatcgtcactgggggtagcaaggctaccttctgccccagaactccccaaaaacgtatcccatagaagaaactattaacttggctaaactagcatcctctcccctccccctgcaccacctctgaaaggcttcgtaggagccactctcgggtttcgggaccacagacggcgacgacctctggcagcggggatggggaagaggggagccagatgactgagctcggcttggcggggaccggggagagattcagaaagacgctttgaat

SEQ ID NO: 10151 - DNA, 6000 bp, Homo sapiens
attccagtgtgtgggtatatcacagtttgtatatccatttactagttggtggacatttggactgaaatctagaccactttttgactattatatttatagatatatttatatttatattatattatagataatactgctatgaacatttgtgcacaagtgattgtgtgcacatataacatacccaagatgtaggcctcagagtggaatttctggatcttgggcatatacccaagatatatgcctaggagtggggaaatttctggatcatgtagtaaccctatgtttaacattttgaggacatttgttcctttttattgctgagtgttatttcatttgtttatccatttaccagttgatgacatttgggttgtttctaccttttgactattatgaatcaacctgctgtgaacatttgacaggtgtgaacatacactttaataatttcttttaagtataatgaattcctgttcttttaagtataatgaattcctgtaagtagaattacggggtcatatggtaaatatataagtttaactttatgaaaactgccaaattgtttaaaaaatagctgtatcatcttgcattcccatcagtaatgtatgaaagtttcagtagctccatattctcatcaacattttatgttgttagtctttaattttagccattctagtggatgtatagtggttttaatttgcatttacctgatgctaataatgttgaacatcgttttctacttgtttgtcatttatatatcttcctttgtgaagtgtcagttcagatcttttgcccgtaatcattcaataaaataatcattttatccttgcttgaaaaagctacagtctttattcaatccaatttagcttagtctgcatctaccatggaactgaacgtagctggagaaaaatacaaccatcttaagtgatttcattttaaattcaggtagccccttaatgcagcccagcaatcataaggcattcactcttctccttttctagatgactatttcattctttctccaatttcttcaagtctctgtcacttaaaccatcatcttttgttactacttttttgagaaaattgaagcaagtagaaaagaatttttattgcaacccacttctttccagcatctgccaatatactgtgcctttcctcctgttcatattagatgaacctctcctgctcttatctaaggccacctcatctgcttgtatgctatgtctcatccccttttgcctactcaagaagattgacccaatcattctaccctctctttgctatattattagttttttcctctatctactagatcatatccaacatgctggtttttttctgtctttaaaaatatttctgaccaagcacagtggctcatgcctataatctcagcactttggaaggccaaggcaggcggatcatttgaggccaagaattcaagaccagcctggccaacatggtgaaaccccgtctctagtaaaaatacaaaaattagccaggcttggtagtgggcagctactctggaatctgaggcaggagaatcgcttgaactggggaggcagaggctgcagtgagccgagatagggaggcggaggctgcagtgagctgagatcgtgccactgcactccagcctgtgtgacagagcgagactccatctcaaaaaaaaaaaaaaaattcttggactctcttctttaccttttccctggtcccaccatcaagctatactgcctcattccttttatgtcctttatagaaaaactccttgaaagagttgaagatattaaccatctccaatgtctccaattcctcttttcattctttcttaggccattctaaccaggctttcatctccactcttctatcagacctgctcttaaacaaaactttcaatatcctccacattgctaaatccaatggtcagttctcagtcctcatcttacttgacctatcagaagcttttaacacatttgatctttcctttcttttgtaagtattttcttcacttgagttccaggatactttttccacacacggtcttctccatgtcaatcaatgacaactccatccttccagctattcaagctaaaaatcttggaactattctttactcccctctttttcttgcagcccacatctagtttgtcagtacatcctattgcctcaatcttcaaattatatcctgcatttaagtctaaacatttttttttgtttttgtttttgtttttgagacagggtcttactctgttgaccaggctggggtgcagtggcaccatcatagctcactgtaatctgcaactcctgggctcaagagatcttcctgtcttagcctcccaagtagctaggactaccgacatgtgccactgcacctggctaatttttaaaatttttttgtagagacaaggtctccctgtgttgcccaggctaggactcctggcttcaagccatcctcctgccctggcttccaaatctctgagattacaaacactttaactgtataataaattgatatctttatagatcatttccatttacttttttgtgagttattacatttttgaaaatacagtagacttttagaacccacaaatgcttttccttatcgtatcaggaaatactgtgtctaatctacaaaagtcggatttttaacaggctcaaataaaaatggcctgtttctaacaaccaaagaaacaacaaagcaacaacataaacatacactcagacatccacttcataccacctcagcaacagcaacaacacacatacacacacatctacttctcattacgtttaatgctgccttcctgattcaagccaccataatctctgcttgcattattataataacctgtcatttagtcttcttacattcaccctacagaccattctcagcataacagccagagtgatcctcttaaaaaataaatcagatcatgttatacctctttttaaaacctgtgatttgctccttttctcttagagtgaaagccagtgttcttacagtggcctgcagagattgacatggtcttcccaccacccccttacatctctgaccttatcttgtactactctaatgttccaaccatattggcctgcttactattcctcaaacaaaagtaggcatattcttgtctcagggctttagtacgtgctgttcactgtgtttgactgccacagtcttcatggctgatctctttcaagtctttgctcaaataccacctttcagtgagtcttccctaacaatccaatttaaattgcaaacactccatgcgctcctagtctcctttgtgctacttataaacaaaagccaaaaccatagcactcactacattctaacatacttgcataatttacgtacttattttagttatttgactgccttccctcacaagaatataaacttcacaaaggcaagatatttatccatttcgttcactggtatatctctagtacctaaaacagttcctagcacattttaaggactcaaatatttgttcaatgaatgaatgaaagaaatttggttaaaaactggaacaaaacaggaatggaggccagcgacaggagaacttctctacctcatttcctgtaggcctacatgcttggaacttaaaagcaggttgttgtgagcctaaggcctgaagacatgcaaactttcttttttctttctaaccaaactcctgctttttaaaaaatcatattatttctgggagtgagtctgtgctgtgtatttaatcttggattgccaagccagtgaggtgggaaaaggttggaacatatctctattctaaagagtagagttggattttgtaaatataggtgtatttcatgataatttaaaatgttttcttgaagtaatatatgtgtgtacaaaaaaaacacatatcataagtatatagctcactgaattttcacaaactgaatttgtcaatgtaattggcatccatagcaaaaagcagaacccagctaacatctcagatgctcctctgtgccctttccagttactagctactacccagggtgaccactattctgacttctcatgccttggaagtgttttgcctaattttgttcttgatataaattaaatcatacagtataaacatgcttgtatctctttttttactcaaaattttgtttgtgagatttatccacattgttatatatggtcagagtttgttcgttttcattgctatataaaatttcacttacagtctaaccattctactgttgatggatatttggtttccagtttgggggttattatgaatagtgctactatcaacattctattaatgtattttggtgtatgtatgcgtgaatttctttggacatttttgtgttttttaaatccacagtcagtgaaccctaagtgttcctcagcattgcagtcagtatatttaccatgtatgcgttactcaaatgacagctgtagttgcaggcattaccaaatccttccctccttaatgttatcactggactttgtctatacttgggattcttaacatgttgtattttggttaagtatgcgtattcatgttttttattagattttgagtgctttttagtactttgttttacttgcttatgtatcccgactcctgacgaggtacctgaaatatagtaagctagttgagcgaatggtgatagctgtcaccattgccagtgattaacagagcaagtttccctagttatgtgaatcacttagcctagagtaaaatccatgctttagtttgatatctcagtgtcaaaggattaggaatgggaagtcatttctctctgagagaagcccagaactgtgggctcagaactgaatgtgctgtgtggctaaagggaattgctatggctttacaagcctcttggagatttaaagtgttaacagcagtgattccaaggcatagtgtgggggggccagatataaatagcagaacacaagtagcgtagtgtgccactgccaagctactgctgggggtgtttataaaaagaaaagcattcctgtctcagctctcactgtcaacaacatcccatcctgaagacttgcttaccacaactgagagtggggagtcagtttgaggcctagcatcacttaaacttcctccaaaggcacaaaagccaggtaaaccttttgacttatttacactcagactaaagaaatgaacaatttttaggaaaatcctgatcaaagcttgcttaaaacatattgccttgtgacagatatctatcatcttatattcaaatcttttttggaaagagaagtttaacacaaagtagcatgttggtactatattttagtatttttagtaaaaacaaaacaaaactgcttctgaagaaatatgggaaactgaggccaaaatgatctataaaagggaagacttctcccttcccctgtgctgttcattctcatttttagaatccagaatatggtgattggtagggtaaaatagaagcttcatttgagttacattatcataaatactgggatgaatattaggcattcggccaatagttgtataatcttagaattgctgcctacccagttccttcttattcttgttcccgccttcagaaagttatgtaagacacttattttaccctcgggcttctcttgattgtatttgggggaagggggccatctctgacaatccactgctttgtaccactactgacctcatcatctcctctgtcccactcaaaagggcatgacaatgtgcaaagaggatagaagaatggataatgtgcatggacatattcctggggaattcttagaaactgggagctaggggaccaatttgagactgctgttttttagtctgattgtgttatttcctgtgcacgctgaggggagatttagagatgggaagaaaatatgactcccagtgactgtggtgggagagatgacatgtctggaggagtatggaaatgcacagatttaatcttgagcaaatcactgaaattctaaggtgtttttgtttcctcgtctgtagaatgagagcattagaccactagataaag

SEQ ID NO: 10152 - DNA, 6000 bp, Homo sapiens
agaacaagtctgagagtcaccacaaacactgaaacacaaccataagggttctctagtataacacatccaaatttgcacactcacttctaaaatctatgctttgaaatttgaacatagtttaagaatcatcagacttcagtgtagctagggtttcagagcaggtcctggggatcagaacaccgggttcaaatcctagctcagtcactcattaactgtatgaccttgaccagattacttccctccaagcattccatttataaggatgagataatctttataaagcacttagcctggtgcctgcatattttagttattcaataaacaaaaacaataaaaagaaggcctattagatgatagccttgacattccagggaatagaaagatgtccaagctgtgaccagcaagggatttatgatctaaactagggatgagacaaacctcaaagatactgataccataagagaaaacctggtgtgatcgaaaggatcccattaggaataacaaatcccaagggttctacgctctctgtgccagcaacaaaaggacaagaccaaatctctttcttattataccccactgtggagaggcaacaggactatgcagagacacctcttctactggccatgtcttctcccagtggtcattatctactttctctgcttttcttaaaactccagccagattttctttctcccactcagctgataacctcattgactacttcctttgtggcacaaaatgtctcttattttcattcttttctttttttcatgcccttctaatctctttccttcattgaaggccaattcttccactggcattcctgacccatctccctcttgtgccttatgaaagtccaatgaaaaaatatttcctctgcttctcatgtcttcaagctcagtctccactggctctttcctgctcccaatcgtgcttaaatctctcttggtttataggaactgccctgagtcctggtctatttcttttctttttctttttggggggggggggttggtggaaggtggggggggggggtctccctgtgttgcccaggttggtctcgaactcctgtcctcaagagatcctcccacctcggcctcccaaagtgctgggtatcctgttctattcttaagcaacccttcaatttctctccaacctattgcctccacgtttctcaagagagagataactcaatgctggacttcttatcctttcacaacatttatatcttagcattctgaaatccaacttccacccccacaaacactccagagctactgatggcctcttatgtgccaattgcaaccattttcccttcagttctctatcaacttcagttctgcaaagcaatgcctccattccctctcctggccaccttcttgaactgcttttcttatctgattttggttctccttcttctctggctcttccttcccacagtctttagtctctctgactttgcaaacagagttgcttttcattgttctgtcctcatccctctaagccaggattgagcaatcttttcttgcataagtttaaaggaaaaaatatataataaaataaactttaaaatatccatctatatctattcatactttattaaatagaataatatcaattagaaaacgggttctacattatggcccataaaatataatctcaagacagaattgcaatataaatagcaacatggaggcaacttcccaatctttcttcttgcaattgtgtcaagggctcatccatccttcatttctctttataacattaatctttactatggatttaattaccacatctctatgcagaatttccaacatctccagccttgatcctcttaaactaaagaaaccgagttccaacttcctgctcgtgcctccaatttaacacgtcccagcagaactcatcatcttcctcctttgtccgcacaaccgttcttgccttttttgctccctgacaacactatcttcctaggcactcacagttttctatatggaggcaaacatgattgttttgcaagtgtatagcgataagcatgggtatcatcagtgcggcaagaatgtttttaggatatgtggctatgaacctttaatataaacatatgactatgattggagcattttttaaaagagcagcaacacagaaattaatgagccagcacttaagtttggaaaagccaaaaggaaggccaaataatgttctttaaaaatgttgcattagcttcttgggattcccaaagaaaaaagtaaattaaaaaaaatgttgcatgatcaatatgatacaatgtaaaaataattctgatgggttgagaaaataatttttggtattattttaaataaatgaatggacatttatgacagcaataaatattaagagccttttaggtattataagtgaatagtggggcttacatctgaaggattttacagattctctgggatttttatcccttagacaggagtccccagaccttggtctgaggcctgttaggaagcaggctgcacagtaaggaggtgagtggttggcaagtgaacattacagcctgagctgcacctcctatcagatcagtagcggcattagactctcataggagcacaaaccctatgtgaaccgcacatgcaagggatcttatatttttatcagattttttgagacagtctccctctgtcacccaggctggagtgcagtggcatgatcatggctcactgcagccttcacctcccaggcttaagtgatcctcagcctcctgagtagctgggactataggcgccactgccttgcccagctcatttttgtatttttccatagagacagggttttgctatgctgcccaggctgaaagaatcttattttatacagtgacattcattctcttaaaaatatagctttacggttactttttattatacataaaatgaatttcaaggaacggtaatatccacatgggctaaaaatgcatatggaatctacgtaagaaaaatgccaataatgctctagggtgaaattacctggggcttttaattcattcattcaacctgtacttctaagcgctcactccggagaggttacaggtgctaagaattcagcagagaacaaaggacaaccatccccgctgtcatttacactctgaagggaggaaagagaaattaaaccacagacacacagattatagagtgtattagaaatgacgccctaagtgctaatgagaacaatggagcaggggaaggatatagggagtaggattgtaattaaaactgggattgtcaaggaagggctgggcaggggagggggtagtggggatgcagatgacacttgtgccaagacctaaaggggatgagagagagaggatgtctgcaggaaggatgactctaggcaaggaagccagtgtggttgaaggtggcaagatggagatgagtgcacagtggtcatggggaacagatcctgtagggtcttaaaggttcttccgtgtgatctggagcaactggagggtcttgagcagagaactggggtgttttaacaggatcacgctgactggtggtttgaaagtggcctgtgggagcttgctgtgttttgttttgcagcaatgggaaggatgtggttgccacttcctgagatggggaaggtggggagagtagtaggtttggggagttaggtggggagttcaggtctggatgagttgggtttgagatgtctattagacatccacgaggagatgcccagtaggcagtcttcgccctcacctctcctctacctcctctcttatgattacagaagttgtggcctgcatcaaggcgtgcatcagccttccagtaaccccactggcagaaccttgcaccccgttaagggctactgtccattcggagcaaggggcacattagataatttgccctaccagagagagcaattatagcaattactccaaggcaggtgtttggtatctgtggcctttagcagttgaatgtcggagtccaagggaaaggtgtgagctgcagacatagacgtggggatcatcagcttgaagctgttgtgcaaagtcatcagatcagcagaggaaaggatttacaaagaaatatatataacaccgcacagggttgttgtcttgtgaggattaaattaaatacacacttaaaacatccggaatacagacagtgcttaataaagagctgctgtttttattaacaaacttatctgtaggagctcgtccatggacaacatccagttcatacagatgcgtgcgcatttcgcagcagccatacacgcccaaagaggacgagactggatgtgattgagctgactggcatctttagatggatggtcctcagtccagtccttccattttacaggcgaggaggcggaagcttggggaggctaagcgcgctgagctggcggcggagcggagcttccactagggctcccagtttccccgcaccgcgcccgccgtcctccgggccacccatcccacccgaacgcgccaccgctctagcccgcgctccagcccgcgcgtcaccgacgcccgcggcctctcccacctctaagttccaggaagctctcggcctctagctgaccgcgttgctgctgagcttccctggggagaaggcgccgaggtgcccggtgcgggccgaggcagggctgggcctcgcgggcagcaggcggaagaaggaagggcggtggggcaggtcccggctgcgcggggcagttgtgcgcacttgggttcttcacgcgggacacacgtggaacgccgacccctgcgcccctggccgctggcaactggcaaggccgggaacagaaagtgtagggacagaagagcgctggagtcttccccgggagggagcccggggctgcagcccaggggcggggagcggggcggggctgggaaagttgagtactggtcgctcagggccgggctccgccggagtgcccggcgcagaaaccgtaaaaggctggagcgggcggggtaggtgtggctctgtgtgcgtgacctgagccccggtcccagtccctgtagtctcctgcggccgcggcctctcagccatgggcgccgtctggtccgccctgctggttggagggggtctggccggagcacttttcgtttggctgctgcggggcggccctggcgacaccgggaaggacggggatgcggagcaggagaaagacgcccctcttgggggagctgcgattccgggaggccatcagagtggcagcagcggactgagccctggaccttccgggcaggagctggtcaccaaaccaggtattcttccccccgtgactccagggcacatctgccagagctttgaggttcatcgaggaagggagcaaagagacaaacccacctggagctttcctaggggcccattcctgcggacgggctctcctaaggggactgggccatccccacgcccctcggtttcccaggctggttggtacgcgcaggcaggtttcttgtctggtcctccaagggccgcgcccttgccgagtccctcagcgcccgcgcctgaggacttggtcctgcccctccggcggggatgagctcctccacttggcggcgcttggtgcagtgcgggcggctgcagtggcggcgccccttcccggcctttggaaaggggggcttaggtttaggggatcctacaagcctcttcgatctctgcccaagcagggacattttctaagtcccaatccgggtagtctgacatcctcccatcgcacagcccatgaagagctgggtttgggaacacccgaactgcgggcgcctcctgctatctggatgcttctttaggaaggcaaagttcaggttggactctggccatgaaggctgtggctgaggccctggggatgtgccttggtcacccctttcagcactgtcggcagtcccctccacgctgccccagaatagggccggatagtcatccctaggaagggactacttaaataggggacccaaccctgatgagtagaattgacatctgggtttaaatttctgtattttagggaccgtttgctaag

SEQ ID NO: 10153 - DNA, 6000 bp, Homo sapiens
tggggaatgccaaattcattaattgtactacctcagaaggataaggcacaaattaactaattgggtaggctgatttctttgtacttgtttgcaaagtctctctaccccatttcataatttctacctacctcaccaaagcaatatcagcatatccttatttcttcacagtcctctggggtgttgcagtttagcgaatttagaagtcaaatattgttctcctcaagaaatgtagctttcaataatatgaatgatagtaataagtaacacttgtgtggtgcttcacgatggccagacactattctaagtattttacatatattaaccagtttagtcttcataagaatcctaggaagaaaatattaccttatcctaattttgcacaaggacactgaagctaattgcctaaggccagtaggtggcagagctgggatttgaactcaggctagcttcagaatttatgtgcctgttataacaaactaacccccacccccagctttagaagttgcttgtttctgctgctatatatttgtactacatcatggaccaggcagattttgaagtataaaacttaatataagttttatacttatactaagtataaaaacttagctttcctttctaaccctttacatctaagcctcaggttttcttccttgtaaaacaggagtaatatttgttatgcctagcttgtagattgttgagtagaagaaatgaaataatgcatgcgaaagtgctttgtaaagtgttatgtaaagaattattacttaaattatgaaggaacatgtcatttaggatatagcttcagctgtgtttgatgaaaatgttgctgaaagcaaattaggtcacagctagattcaagctatgattcaagctaggttcaagctatgactcaaacccagggttcttggtatagaaactccatacttctaactacaccatagcactctctcctctgatactctctcactacaatacttgatagtacaccattattttcccgtgcaattccattaaaaataaaaatgtaaatataagttgtttttcaagattttcccataaaatgtttctctggtggcctaaatcagaaattcctacctctaacttataaacaaagctgacagagggcaacagagaaagataggtcaagcgacaaaagctgttacttgggtatctaagcaactggaaacgcttggctgaggaagatttcttccgcccctggcaagctggggacattccagcagggcacctttgagcctctgatgtgaaaagcagctcagattcacattcccaccccagaggggcatgtttatcagtctgggaacattctgagggtattcagggaagagtggtaacaaactgcttcatctactctcactacttcaggcaacgtctctgcatcttatgctcttattacttccagcaaaagagaaggtaaacagtaatctaaaataaaaaccatataagcaataacgttagcactctctctcatctctctagcaaattcctcattaggagttagaaggtgaaaaaaaattttttttaaaattttttttttaatttttttgagatagggtctcactctgtcacccaggctagagtgcagtagagtgaacaggggtcacagaggcctcgaactcccaggcccaagcaatccacccgcctcagctttccaagtagctgggactacaggcacacgccaccatgcccagctaatttttaaatttttgtgtagagatggggtctccatatgttgcccaggctggtcttgaacttctgggctcaagagacattcatgcatcagcctcctaaagtgctggaattacagatgtgagccaccacgcccggctggaaaatcttaaaatcaatccaagaagtgctggctgggttgtactacgtgattaggcccatgcatatgcttagggtttccatgaagcccttcagcaggataaatacaagaaaaattaacaggtaaagccttagaaaccattacacgccagattttgtgttaccaaacacaaatacaataaatttagagaacataagttccctgaatgaaaacgaaagataaaaataaaaaagaaagaaaaaggaaaaattagaaaaaagacatagaaaaagtctgagaacacagagttccgtaagccagttgtggttgagtatattgtacagtatcttaagtaaaataaagtcattactacaaccacttttaataagtattaaaatcaacttctctctgatataaagtgaaaatgaagaaaagtgtctatgtaagtctaaaatagactttaaatgaagaaaccataaatactatacattcatgggttgcataacaatgtttcagtcaacaatggaccacatataccactgtagcctataagattataataccatatttttatagtaccttttctatgtttagatacacaaatacttaccattgtgttacagttgtctaagtaataggctataccatgtagcctgggtgtgcagtaggctatgccatctaggtttagtataccctgtgatgttgcccaatgatgcatttctaagaatgtatccccactgttaaacaacatatgactgtataaatttcccttgttgtgctatacctttgccatcccatcatttcttcattcacctcttcagcaaacattgttacctatagaagggtggtttttggcactgtggaaagagctagacctgtaaagatgaataagccagtttctgctgtctggactcagtctattcactcaactagtggtaatagctataatgaagaagattgaaagaaattgctctcttagctaaaacacaagaaggagcagagcttaaggaaggtgaggtaagtagaacctcacattctattttggcagtctttgcattggtcccacttttcctgggttggggaatactgtttcttctatcacgcactactgtcctctgttgttcccctctgtcactcctctcactctcttttttcctcctgcagcaaagggaaaaagtcaaagaggccatgagaggactaggcaaaggggaaacaggaagttgttcaggtaccttgtgtagtaggtctccttttcttggaccatgggggaaagcaaaggctggattctgatcgtctaagagctaaaagggaccacagaggccatccttactatccgtttacagctgaggacactgagggttaataacttaccaaggccatgcaattagtggcattggcagcactagaactcaggcttcttgacttccagagagttagaatggagcacttctaatcctttatgcagggtagggtagtagccagagatggaaaccctactactggcttcagccattattctgattatcttcttcactatcaagcactccttcatttccgatcctccaaacaattggacaatttattaatgtagtcaccccatagttctctgttcagtagggacttattttcaaatcttctctgtcatttcagttatccaccccataaggaacaaattatggtttctcgacatccttttgaaaacgtgcaacccaaactaaccgcacagcttcaaagatctgtttggtgaggtaaaatgatgtctttgtgttctgcttttcaatgcatcctaatttgacttttggttttgctcatttgttagtaaattttcaacactttacttacttttaccgtgtcagtaaagaccttgaggaatttacatagttgatctatttctataagggtgctctcctgaaccttgtcctgtgtgaaggcccgccttttttcttttttctctttgtttctctctttttttcatttgttagcttgtcagtaatgaccgggtggcggatacatgtcaagaaaactaatcaccttctaacaggattaagactagaattaatgcagatcttgtgcccttcctgttcccgctttggcagcccaaggtccaccactgctcagagactagctggagggcaacggcgtcccatagcatctcacactgtgttgggatcctaggtggtgacctttgtgagattcagtactgagtttctgggagacggcgctgcggttgtgatcggaattgttggccgacgcacctctggacgcccagtgaggcaaaagcatctcctgttttcaaggtgatgacactgggctggaatgccgcggggccaaccagtccgtcctgccagacaagtttctggtccagtgagcctccgacccgccgcgcgtgtcaagctgacaaggccggggaggcgtttgaagcagcagtgttgagcgctgttaacatttagcgggcgtctttgagtagctcctccagccctcgcagcggcccagggactagcctgcaagttctcaacgctcacttccagcccgcgctggccccgcctccgcctcccagctcctcagcctcctcccgccccaccgctcccaccttttctcaggcccccacctgccagcacgcagaggcgggggcggggtcgcgggccgggctcctgacgtcacctcacggggaggcggggctgtgggaaccgcagtgcagcgcagaggggcggggcctgcggcgcgagacctggtgcgggaggcccgggcagggagaagtgtgcggggccgggacaagccggctccgagtccggctccggggggcggggcgggaggggcctgcgcggcggcgggagcccagagccgcgctaaagcgggtcaagcgtcctccttttctccccgccccttctcctcctcctacctgggcctctgcgtggagacgcgcacctggcaaccggaggccgcgtctccgccttctctgctcgcgcctggcgcccggagcctgcccgggacctccgccggagccgcgctcgctgcaggcggcctcgagcgctctctcgttgatgccgttttggaggtgaccggcgcggcggccgctctatggtggggccgcgttagtggctgcggctccgcgggactccagggcgcggctgcgaggtggcggggcgccccgcctgcagaaccctgcttgcagctcaggtttcggggtgcttgaggaggccgccacggcagcgcgggagcggaagatgttggagctgaggcaccggggaagctgccccggccccagggaagcggtgtcgccgccacaccgcgagggagaggcggccggcggcgaccacgaaaccgagagcaccagcgacaaagtaagtggagccgagagaggcggacgccgcgccctggctgggtcctggttggaagcgggacacttgagagcaagggtggggcccgtccagcgtcaggtgaggctgcacgctgccggtgcaccttcctccctgcctggcactgcttcctccttctccagagggggtcgggacccgggatcccagtggcggtgaggttcccaggatgaccgcggccgctgcccgggagaaatgggccactcaacccggcttacagtttagcttcatcctcttccggtcccttcttcaggatctggggccgacgctggaatcaggagggaacctgtcctcctaggggctgcagtgcagttagtagctgccacctcacctctcttttcagtagagggaacaaagttagtaaggactagagacgtgccaccgtcggctgtatcatttcatcggatcctgacgcgggaggcttggcttctcgcgctgccccatatgcacttacattttctccatcctttttcagtatgatagattttggaggttttagagtatcatgcacgtgacataatagtaatcttccagcttcttttgagtacacgacagacagtgcaattcttctgtctaccagtagatttcatataacccgacgttaattcatgaagacttttcacttccttttctatagattactcttctttcacatttaagaataagtagatgcgatattactatctgtttaaagctagaaaaggaattcgggcgtgtttggtaatatagtggtgcaagtaagaacttgtgaagaaatgcagttttatgatcttatggactggatggtttgggaaattggac

SEQ ID NO: 10154 - DNA, 6000 bp, Homo sapiens
aaagaagcttacaacttggcaaaaggcataggcaaggtgattaagcactgacccagagaggggagttttaaaagccacagacctcattgcttcccaggtctctgctatcaccagcttcttcccccagcagctagctttcagaacctcaaaaatgcctttaatgaaatatagaggactcaagtaccctgcttttccatatgttctaagatcaaatgcacacattatcttagattcaagatcttcacgtatttttgtatagtgtctgttcaatgtctacttaaaaaattatcagctgggtgcagcggctcatgcctgtaatcccagcactttgggaggccgaggcgggcagatggcctgaggtcaggagttcgagaccagcctggccaaaagtggtgaaactttgtctctacttaaaatacaaaaatgaactgggtgtggtggtgcacacctgtaatcccagttacttgggaggctgaggcaggagaatcgcttgaaacttgggaggcaaagattgcaatgagccgagatcacaccactgcactccagtctgggcaacagagtgagactccatctcaaaaaacaaaaaccaaaaaacattctcagtgctatagaagcagtttagtgcactggttaagactgagatgctgcagccagacaattcatgtttaaatcctgcctcttccaatttctagcatggccgtgggaatgttatctaacttctctgtgccttgctttcctcagttgtaaaatggaaataaaataataccttattatgaggcctcaggttgataataaatgtgagctacttagtagtgtgcctgtatcatggtaaccactccataaatgtggcttttattatggaaggtacacatttcaccaagttattatattaacaagcaaaaatttaaatactctgtttgttgagaggcttaaccacttattttgtatatgtagagtcaacatgtagcagtggacaataagacaaccacagcagtaggaacagaagagcaagaaaaagatctctttcttacactgaaaaatatttccttcacctgattcctaaaataccatacctgaaaagaggcagacttttattccacaattagagagaaatagtttaaaagcacatgttctagaatgttacttagcattgtatgccttgatttatgacaatatattaatggtggtcaaatcctttaccttcagttttgagagaagaggggggtggaaaaggaaagtggtaggagtgaggatatccatgaagaggaaggagaaggggaggctgacagcatagaagcaagctgtgtccccaggtctgtcctatttctctacttataaattccccaaatagttcaattccagtgggcctgggcaaatgtctttcttaatgggaaatatgcctgcaagtgtttgagagtcctatatacactgccctggtttccttatgtagaagcagaggggaaaaaaatcttgcttttgctaaaatttgtcatgcacccaatgaagcccctcctttctattcttctccccccagtggtctctatttacttatttatttatttagatatggtgtgggcatgtgggggtctcactatgttgctcaggctggtcttgaactcaagggatcctcccacctctgcctctgagtatctgtgactacatgcatatgccaccacatctggctcctatggcctttaaaggcaccaaaatccaaggctacagttagcaatataggaagtgtcttttgagtctgctgtcttggtagttacaccattgtcttggttcaagtattccttctttcaatgacagacccttaattagttttgtgctttcatttctccctctccaggtacctctaaatgatctcctgaaaatcccagtccaccatttgactccgtggcttacaaatctccagtgcttctccattacctaataaggaaaaaatcaatttcattagtatgtttgagaaggttatttctgaaccctgcttagcctaagagagtcatctgctgcaccttctcctcatcacttggatagcagcactgagataccagctgttctctaaacacgccatgctttttcatagggttctccttgcttaggatgtttattctctttctagccccgctttgatctctaaagatccttcaggacccttatgaaatgtgactactctaggaaggttttcctgagatttctaggcagaatagttcatttttctatgctccaaaaattgtgtgttcatgcattaatgcacttctcatagaaagttctatatattttttaagtatcttgtttcttctgtattatgagtttcaagaaggaatggacagagtttgcctctcaaataccaggacttggtttgtcataggcactcaaaaatgttgatttttgaatagcttctttccaaggctccccattcctgcttacagaaatgttaccatctaaggcccacctcaaacacagtttcccctgtaccccattttctcccacctggagtgctttttttttttcatcccaaagacctacaggaatttcctttgttctctgatttggaattttaaaaaatatatttaaacaaggtatttaaaaaaatctgtctccttgtctgcaagttgattgaagtggaatctgtgtcttctctatccagagatgcctgtattccctgaatcagtatcttatacccagcagattctctgaaggatatttgctgaatggaggagttaagccaaggaaagataatccttagtgcaacttctgaaaagatacaggtgacaataccactagctccaaaacattctgcataatgtctgctttatttcactgcagtttatgagtgctccaattctaagggagattatacagctgtcaaatacaaattatcagtaattcacacagtagaaaggatagattcaatcaggtttctttcctctttaaacttgcttaatgttgatgagatattgacaatgatcaacacattacatttttagttctatggatttccagtaaattctctaagcttttctatgtatacaatcataagctctgtaatgaattataatttggtatcttattttcaatatttaaaactcatatttctaaactcacatttcattttcgataatttattatttttagttaattacataatagctcataattccttgctttgtcttttattttaatggtgtagaagttataatttccgtgtcttcaagcccccttctccccacaaaacacttagttaatatgaggatggagatgatgaaaaattggattgaggaccaggtagaaggtaatttaggtagtcatatgctttattgttttgaaagaaaggaggtggaaaagggaaggggtgggagtgagggtatcagagaagaattgggatgagagtaaaatgaatggattttatcttggaattcttggggcaagaggatgagtactggtactggggactggaacagtggttgaataaggaaggtcagatgatgtcaatgactaatttcacttgttttggaaattttctttcagatacctttcttcttccagtttggcattagaaatcacaatgcagatatatcatggggcaaaaagacctttgtggagactctaacattgcttttatagaaaaaacatgaccacatcttcatacactcaataaacactgggggcaccgcctgctttaagtgcaagctgcataaaataaattgatacacaaatgaattttttattgataagtgcaaaaagattacatttaatgtttaaaaaagatttaatagaaacaatttaagaaaagggagtagttgaaagaaaatagtaggctaagaattgaatatagaaatagatatgaagaaaattggaagaaagttacttcagggtgaaaaactgttaaaaaaaaaaatgacttagatcacacacttggtggtgaccagagactgtttgtcaatattttggaggaaaaaaattttacagaaggagaaaataagtaatgctggagagtgggaagctgaaaggtattgaaaggaaaagagtatttggaagtcacgagatatctccctgggaaatagagttggcaaaatggctgattttaaagaggttaactattctccccaaatttctgactgtgaactagcttactttatatttacccacttagaaagtgtttcaacacttaaagacttagcaaggagaccacaaagtataagacgttacatacttttccaaaagaaacacgactaactgtaaactgtcatcaaatacaaatggaatgggttttctcttttgggttttatttttttatttttaattttttggtggttgttttcgtttaacggtttcaaaaaatatgtagaagggaaatatttcatttcccttggacgctcaactgtatatatttcaagattcttaaaacccccacctcaaactgcaggcttaattttaatgtgttcattttttacaaggtgtgtcaacgttttatcaatttctgaaaagtgtctatggccccgaaaagttgaaatccacgacattatatcatctctgcgagccctttccagctctcaaggtacaataattccacgaatctttgttcttcaaaccaggaggttttctggaaaccttcttaaacaaccaggacaggacccatgagggaaatcttggggatgctctgagcagcggacggggcttgggaagcgcacccctgtacccgggctgcctccggcccgcaccccgccgctccccaagtcggctccgcactccgcacacaggcggcggcgctggggccgctccaagtgcgttgagaagtgtaatccctccgctaagtacttggctctcagtctccaatcactagtgggagctggagagggcaagtgaaaaaaaaaaattccagaggcagccgaggagcgagagggaaaaaaaaaaaaaaaaaaaaaaaaagtcccgcggtggcggcggcggcggcggcggagcggccgcggcggccagaagttgacggcgcagccgggcgcggggcgcggagtcggcggggcctcgcgggacgccgggcagtgcggagaccgcggcgctgaggacgcgggagccgggagcgcagccgcgggtaaggcgcgcgcggcggggccccgtcccctgcgggtggccgagttcccgagcgcgcgggaggcggccgagccggcgagagccgggcagagcgaggggcggcgcgggacgggtagcggctgggtgcggagctgggcggcggtcgccctaggcaggacggagcgcgcgagggagagggcgagagcgagggcgggctgcgcggccgtggggcggtggcggcggcggggagggggtcaggcggtggccgcctcggctttgtgcgcgggcggctctgccgggaccccgaggcctcgtgcctgcgcaggcgaggagtcggggcagcggcggcggcgggcgggacacgtgcttcgggctgtagggacgccccaaggcagggagtcggacctgcgagcggagggatggggcgggagggcgagctgagggcagtcgcggaatccgggaaatgggagggagcccggcggggcgggggcccagggccagcccaggcgggacccgcaggcacccacctgccccggacgcctcccgagacccagccttgccgtgggggaaagtgcgcagcgggctggtcccggcgccttggactgggctccgtctctgcttcagttgcctgtctcttctcctctctctcctgcttctctctctctatgcctctctctcaagttctgggtctttcattctctcccttttcttcctttctcccttcctctccttattgctatcctttgcctctccccccggtctctctttccttccgtgcgtctgtctccctctccccaccgcctgctctggctctcccagtgtgtccctcctctgtcccttcatcctcttccctctgtcactttcgcacaatcttttggtctctctctctctctcaagaggctttcgctcccggtcttcctggctcccctg

SEQ ID NO: 10155 - DNA, 6000 bp, Homo sapiens
tgtgtaagccactgtgccaggtgtgcaccctttactgaccagctgtccaggaagccaactcacaggttctctgctgaaccagctcttcctcaccctactcaatcagaattccacatctccatagcataagcaaactccctctggttaaggtcaacaaagacctcaatgtcaccaaacccaatggacattttctagtctctatttcacttgctgtctcaggaacatttgatataaatggcatctcatctttctcaaaaagaggcttttcgttggcttccttgtcaccacattctcctggttttcttctctctctggacctgtatttgtagcctcatttgcgatgttttcctactttacctaaactataatgggttttcccttggacatcttctcactctctaatatttccagacaatctcggttgattttccgtggaatcctttactattacatgctggctattctcaaatttgtatctccagtccatgcctctttttctgagttccagactagtatcatcagctgctcacttttcatttatacatctcacacctcaaactcatcaagtttgaaactcatcatttgccccccaaaagctgctgctgtctcagcactccctgtcttggtaaagggcaccaccatccaccaaagagctcaaaccaaaaaaaatatagaagtcatctttggcttcatcctcatatcccaactgatctgcaaatcctgcaataaacatcctcatgcaaaattaaaaaaagaaaaacctttcaattcctgagacatatgttcgtttagaaggtaacatggtgattctttttctttttcttttttattttcttttgagacagagtctcgctctgttgcctaggctggagtgcagtgaaaggatcttagctcattgcaaactccccctcccagggtccagcgattttcatgcctcagcctcctgagtagctgggattacaggcatgtgctaccatgcctggctaattttttgtatttttagtatagacggggtttcactatgttggccaggttggtcttgaactcctggcctgacgtgatctgcctgccttggcctcccaaagtgctaggattatagccatgagccactgtgcccggaccatggagattcttagataaacagccatgggcacaaagtaggaattcaatacaaatttgtgggttgagcaaatgactttagatatgttcagattcgagttactgtaagaggaaataagtactatagatctacatgttttcctaaatcagtatgttttatcaaatcaaagaaatacctgtaaaacttgatttatgctgccttggagaaaacaatggacaagaacacacttatctatcatccatttctctcccttgaaacactcagtgccattatttttgaaaggtgatgaattgcaaattttgtcacttttcatacatggtaagaacaaaaggtgcagttaaaaaacaaaaaaaaaatcatctttctgtgaaaaggatgttactatttcttaaaacatagaaattaagatgagtaatttgctttctcatatgttgataatgaatagattgaaaaaacttcgtatcatccattatcaattatattatttaatatatgtacttggggatatttaaatggtataataaaatgacctaattacttatttcacaatatttaaactgaggcacaatagtaaccactaattcaaaactacccattcaacagccttccacacagaggcttatgagggaactacagggtttatatcagccaacagtgcaggcagaactgcaagctttgtttggagctttttgactttatccatgtacacaggccaaaaagcccacaatatcaattgagatctgtagaaaattgtatttagacttatcccataatgtccaaatatttggatcatgaagtagggagtaggtgggatattcacgcaaacttacttatagatggctatacatttgaatctagtcattcagtgttaccaatggataggacacccatgcttctgaattagctctgtgattgtctataaaaactgctgatttgaattttgactgcatcctagcaaaccaatccatttgctattgccttctgggcaaaatgcctgggctttgtaaatttgaaaatgagctccttattgaaggggaaaaataaaccccaggacaataactttcgattggtggtctcctctgggttctaacctttaaaagtagctctaaaagagtccattttccacaacaatgatgttgagcccttggttaattttaggagcattttcatttgggggaaacttctgtattgtgacaacatctttttttggttttatattttaaaaatttggggggaccgggcacagtggctcatgtctgtaaatcccagcactttgcgaggccgagaagggtggatcgcaaggtcaagagttcgagaacagcctgactaacatgttgagaccctgtctctgctaaaaatacaaaaattagccagggttggtggcacacacctgtaatcccagctactcgggaggctgaggcaggagaattgcttgaacccaggaggtggaggttgcagtgagctgagattaagccactgcactccagcccaggcgacagagcaagactccatctcaaaaaaatttttttaaatttaatttttgtaggtacatagtaggtatatttatggggtacacacaatattttgatataggcacataatgcataataatcacatcagagtaaatgggatatctaccatctcaaacatttatcctttctttatgttacaaaccaattatattcttagttattttaaaatgcacaattactgttgcctgtagttgccctgttttgctatcaaatactataccttattcattctatctaactatatatatattttttacccattacccatcccccctacccttcccagcctctggtaaccatcattctactgtctccatgagttcaattgttttaaatgttagctcccatgaataagtgagaacatgtgaaatttgtctttctgtgcctggcttatttcacttaacataatgacctctagttccatctatgttgttgcaaatgccaggatctcattctttgttatggctgaatagtactccatgggtatatgtaacgatttatccattcatctgttgatggacacttaggttgcttccaaaccttggctattgtgagtagtgctgcaataaacataggagtgcaggtatctctttgatacactgatttccttttttgggcatatatacctagcagtgagattgctaggtcatacggtatctctatttttagttttatgaggaacttccatactgttctccatagtggttatactttttacattcccacaaacacaagggttcctttttttttccacaacctcgccagtatttattgcctgagcaccttttcatatacctgtttgctatttgtatgtcttcttttgagaaatgtctattcaaatcttttgcccatttattactcggactattagatttttttttcctatagagttgttggagctcctcatatattctggttattaatcccttgtcagatggatagttcccattctgtgggttgtctcttcagtttgtttcctttgctgtgcagaagctttttagcttaatatgatcccatttgtccattttctttggttgcctgtactgtgacgacatcttgaagttgcgagtttggggattgcctgccttgtatattcttttctgttaccatcatctttaatagccacaaatgactgttgacccacatgatatctgcactagaaacccaaagattcccgtcattatttttgttgattatatggaagcacccataaaccagcgcaaatcctaaacataattatcttgtccagaaggagacattaatgtaaaacttatgtcaagaaagatttagccacattccctcggattggtcattcctagttagagtccttgaggctgccatcgtttactttgaaaactgcccagcaggtgtatgaatagcaactccaggacaatgtagaaccattaccattttaaagacagcaatcccccttttaaaaaactactgaggccttcgaagaaaccacacggctgccttgggccccaaaagctgcggaaaagcgcagtattcagttaagcaaataactacttacactgtttattttggttacgattccttaagtgagaagtaaatcaattaacaggacaaatgacacgatggttaggcacgaaagggacagtgctgccacctcattagcttggagcaaccttccagctcataccatgcggactgatgactaaccttgccaggcaacgctgtgaggtttggaaacccacctctttgacctaggcccggtcaacaccgataaaccctctgaatcaacgctggcgctcccaagcccactcacacgccgtcaggaagcagtttccgaaacaggccgggtgcgggggtgggggatcccgttccagccccacccctgaaagttgctgggagtggcacccaaagaactttcccagattgatctctgttgccgctcagggaggtcagctccaggccctcagcctttcggccgggagccaaactgccctgcctgccaagcccctccttctctgcaccttaaacagccgcgaggggagagtcggctgggattttcttcttaagaagtcgcgcaggtttttcgagctccactctgcgccaggagagccacggcagcaggaacgggcactgctgccaccgggccgacgggtgagtcactgtttggaaatggagtgggcgggcgagggtgtgagagaatgaatgatgtcaagagcgcgctgggcgcagggcgcagggagcgggccgcgcgcggcgggcggggagagcgggcgcggggccgcggtcaacactgagcgccgcgccgtgggccgagtggggcggggagacccagccctcggcgcgcacggagcctggccggtgctgcagcgccgccgagtgcggcctcgggggcggcggccgcgggagggacccggagagctgcttcccctagtcaggccgcggcgtgggagggcgagaccccgagcaaactttctagcggcttcggcccgagggtggtgacgcccggggctggtcgcggcggctgcggcagcgggctccatcccctggcaaatccccttcccgggagcaagtgccttcagctgggagtgtctggagccctggccaccagcgggtaaggagcgcgcggaggggccaggaggaggatgggctggggagcggagagtcctccgaagcgcgggaggggaaaggtggattgcgaagcggggacgtggctctaatccggcccccaccctccccgcccagggcatgcttcctcgattttgtggtctggaggagagatgtgtgccttagtctccttcctctgagcagtcatctcattcatttgcaacccatttcgggtaccccggtcctggcgttggaagggcacaggttaaaccccagattgtccagaaccactccggaggtcagggctgaagttcagttggtggaggagggactgtgtgtgtgtgtttgtgtgtgtggtttttcttttctttctctttttttttttttttttttttgagaggcacttactgatgatgtgtgaacagtaacagcccagctctgggcagcccacaccgaaacccttcaacgtgtggcattccagagctgctccctttacggaagggaagacttggtttctcagcgaaaataaggggcggggaacccctgtcaacatccatccagaggtatggataatcattaattatccacggcttgaaaccaactcaaaatgttatgtcctgtagtcttttttatttattaatgttgccggtcctctatttcaagtcttgcctgctctgaaatgaccttaaaatcattttgacatgtgtgttatattttgaagagattcaactgtttagtgtcactggattcggcgtgggttttcaatctgta

SEQ ID NO: 10156 - DNA, 6000 bp, Homo sapiens
aaaaaatgccctttggaaccttgctactcaaagtgtggtccatggatcagcagcatcagcatcagcatcacctgggagcttgctagaaatgcagattctcaggtcattctaaccctacccaataagcatcttcattttaacgtgatcatcaagagattcatatgcgccttagtctgggttgcaccactatacaacttatatcagtaaaaagaagagtaagctttgttctaaagtttcaaaggactgcctcacttttctgttttctggaaatgcatatgtggcttactccgaacttgtgagtattgggacttacgaacaatggaaattttggaacctaacctgttcatatgtaagagtttctaaagttccaaaatgggttctgtattcctctggtcttctgaaacagagtacagaacataatttaatttttctttgcaattgaggaccaaatctatgaatatctgttttggtcctgatatatggtgatgtcataaagcgctttcaagttataaagcaggtgttcggtatgtgacagttcccttcactttatttccttcagaatactaggttataaatttctcagatggcagagacttgtggactatgtttatcatatttccagtggaatacatagggttgttcaatgtaactaattgtgtcagaataccgtgcatttttaattcatttttctaattgtcttgtttttcctgtgcttattctgccaactaatagagattgctcctctcaaactacctatattaacagcatttccttcccttgccttgtgattcatagtttctaatctgctgtggactagttaagtgtctaactacagaaattacagcatgtctgaaacaacagccaaatagtttatgtgacaatcagagaatttcctgtaagtgcatgcactattgttcatgagttgactatgtggtaattatttgccaataatctcatcttttatttttcttttagtatcttagttgtgttttagaccactgaaatgtaaatgagagttaaatgacatcaacataagtgatcaaatattattaaagtcagtgaaattatttattctcatgataatgcgtggtgaaactcaactggaatgccataatgaaaagaagaaacaaagattcactaagagcaaaaaaaaaaaaaaaaaaacacagccaggattgtttttaattcaagaaatacaaatacaagtcagtaggaatatatagaaaagtttctgcatacctttgaaaacagaccatatcttattcatttttgtatccccaatacctagcctattataaatgtaataaatctgtaaatggatcagataaaggaggaaaaagcagaaaactgtttcttcatattgggagatggacacctaatagagaatgccactaaaagggaaggagtgatctacaaacgccaaatgtgatttacaaactagagaataaaaaccctagtgagaaatatggaaagccaggctacgataaagaattgacatttcttggctgggcatggtggctcacgtctgtaatcccagcactttgggaggccgaggcaggcagatcacctgaggtcaggagtttgagaccaccctggccaacatggtgaaaccccattatctactaaaaatacaacaattagccaggagtgatggtgcatacctgtagccccagctactcaggaggctgaggcaggagaatcgcttgaacccaggaggtggaggttacagagagccaagatggcgccactgtactcccgactgggtgacagtctcaaaaaaaaaaaaagagctgacatttcttgagctagagataggcgttcagttgtccaaggctcccacttctgttatagagaatagagtcctaagttggggatgacaaatagtaacacacgtattatttcacttccatatatgcagcagagattaattcaattacccactctttctcactgaacagacttggcctcagcatctgcatcaacactatacctcagagaatctgagttgacataggaaacatcataattggcatttgtgacactgtaatcacaaatctacaaaatatcacttttattggtctgtaaaagattgaagagatgtcctgaaagaaaggaccatcatcttccaaagtaagagaatgaaccaattcagcttaactctgctattcaaaagcagtggtcctcaaacttccccatgcatcagaattgcctggagagcttgctgtagggccctatctccaccacttctgaatcagtatacggtccagggtttgggcccacaaatctgcatttcaaaaactctgagatctaccattgtagagtacactggaacaaattctaaatatgaaaaactgaaaatcttttgacagcaagacagtaaatcataactagcatagctttatgaagaaaaatgtaaattaacccagtatagtttatagtaaagcaatggtctggagctaaataatccttggtttgaccgctggttctgctaattccaggttcatgatttttactaagattacttcagctctataaacattagtttcttcacagataaaatagggataagaaaaatatcccatggagttattgttaggattaaatagaaaaaaatacatatctagatttacaagcacagtgcctagtagatggttcaatcctattcattcaattcttcatccttttttcacttatagtagtaatggaaattaaagcaaaagagtgaaatattttcataaaggttgtagtgtttgtcaggaggaaaaatatctaccttctagaaggggtgccacggcagcgacagcacaaggcccgtgcgtctggggttcctgtaacaaaagaaaggcatatgaatgtatgatatttaatgtaagttttacatggcaccagagccttcataaggaaacgaagacctgaagaaacctgagcgttttataccaagcttgatgaagagtagactgttatggaaaactgtgataagacaaaaagatgggctaagggcagtaaactgggggaaacctaccaaggcctattcatttagattcctcttggcgtctctctgtcttcacaaataagactgcttcttttctccaggtatagagagggcatctctcacatgagggtcttatgacctgcttcatgggaaggtcagagtcctcacacctgccatttctcaaattccatcagcttaaaacattcaatatgccaaggtgttatattttggggtagtgtgccctgaacaccatcataaacatgctagaaaaattctacagcaaattagtggacaaggggaaggagcttaggtattaaagattgtggagaagatctattaaaacacagggccccaatcctcctcttaaggagtctccccttaagagacagggttcactttcatcccatatacttctgattaaaaggagcctcttatacccaggagaatacattccaggtgcagaaagccaattacctagttattcccttacccacgtaattatagaccttaatccaaattcaaaggactcctgggagatgctggaatctgtaattgtgtaatctctttgatgaagcacagagtgtgatcttttgctcatgtggggctaggtttctgtggagaagctggaaatgctgtggaaaagggcttgccccttttgtgtatatgaactctaatgtagttgaaattcctagaagtcaaagatataaatctaactactaaaattcatttagtgcattaaaatgccagttattaatttacggcaacaactaaagggaagctttgtattattctaggactacaatgcaatttatgctttgcataatcattcagtaaatgacttattgctccagaaataccatcttgctagatcccattctgaattcagtgtttctgagcaatctcatctccaatacagagtgatgacatactcaggattccaagacggcaaaatgacttgggtaatgtagtctagggcctgccagtgagtatgctgagacagaccagaaagacttaaagattccactaatgtagacaaagcaagctgagccacaacttctcggaacaccaacaggatgcaccaacaatcgacaaaaaaaaaaaaaaaaaaggagataaagtttaaagtttgtcttccagcattcccttaccctattttccccttcctcttccctactttatcagtgggaaaagttctcaataatgcaattcttactgagattcttgtgtttatcagagaaatgtttcctctttctttgccaaggaattatatattcccaacagacatggcgcttgaatgctatatttcctttggaatcaagaaaggggaggtgggggaatcaaaaattaaaaaccaaacccaagccattgttcctcttcgaggaagggtgggtggtcagtcgtcgcctgagctccgaacatcaacccgcggctctcaagttcccctcccagtaatgctgggcccagcctcgccgcggccgatccagcctctgccctaggtggaagcgggccacccggtcccttcacccactgaggcccagtcctttcgcctcaacacgaaggcacctggccgggccggagcagcagccgcggggccggcactggggccacggaaccccgggccagactcaggcctgggccagctcggctccggcctgcagggggcgctgcggcggcaccggcgcgaggcccgcgcgtgcggggagcgaccccaggtgtaagtcccggggcgtggggcgcgtgggtcaaggcggagcgacccaggatccccgcgcccgcggcggccgccgagtggcagcgctggactcgcggagaagcttgggtacctgagccgcggtcccgggtgacaccctcagtgacgccaggcgcgttccttcctcttcctctctcctctccggccccgccttcccttccctccgcccacctccctgaagcggagccgccgtcgccaccagcgccgtcatgtcggcccccgccgggtcctctcacccggccgccagcgcccggatcccgcccaagttcggcggagcggccgtctcaggagccgcagcgcccgcgggcccgggtgcgggcccggcgccgcaccagcagaacggtgaggcgggcggcccgggcggagcgcggggcctagcaccggctgggcggcctgcacggccacatcggggcggggcgggccgggccgggaagggcgttcggggccaggcccggcccgagggacgggagcgggcgcggtgcggaggccgcggggtccgggttgggtgcgggtagggggcagggaaggcacggcgcggggcgcgcgggggtgggacgcccctggcgtgggggcgggggccggcctgggaaagctggggccgtggctgtttatgtaatgcgaccccaggcccgaaacggcctcgggcgagtaggggcgactgaaaagctgggagcccacgtagtaaaacccagttacctagcctggacgcgggcgagttgccccgagcgaccccttggctgcgagagctggccagaagccgaggccgctgagtgcgtggtccggagaaggctggtgcagccacccagcagggtggattgtgcccttcctgtctcaggaaaattgcttcggttcccgaggcccagcgaacacgctgccttgaggaaacttaagtttgcactcaagtttgtagacaaaagggtgtaaatatgctatataagtgtaactgtaaccctgacccagttcggcctcaagaactgtcattgccgctgcggctgctgctcaagcttttggagtttgcttgtagtgtttgaaagggagcagatgtaaacggatttaaacgaacatctttagatctgggtgtttttcctagctccactttcagagatgaaaaaacgtgccagagttggccctgctttgaggcagggccttcatacaggcagcagccaaatgcagcacgaaagccgctttcatattaaggtcgtgggcttttagtaggctgcaaaatgatggatatgcattccctaatgctgagatttgg

SEQ ID NO: 10157 - DNA, 6000 bp, Homo sapiens
gtgttttggaggtttattttccttctcatctattttgaaagtcctcctttttcctctccctttcctttgcctcttgtctctttcttcttctccttttcctcatctttcctccctctccctttattgtgccagtcattggacaaattcatcattttcccaccaataaaaattagatgtggcatgctgaacattttatgtcttaaaactactcctgacatctgcatcagttttcagctcttggaaaaagttaatctagttcacttagtcttaaaaccaactgaaccttttaaaacagttgttgacgccaaataaaagatgacaaatagggcacaggcattggaaatacaggtgaatttaccagcatcagaaagaacatggccaatatggctttagacctcacggttagccaagtcagttgcaatgactctctcctttttcaactctcacagctcactaaacctttaaagtttggaaatggctgaattgaccaagggtgtttatagaatttatgagtttaataatagtggccctgtggcaagatggaaagaaactggttcgggccctccttgttccctatgtatacagcctaatttgcagattctatttcctccattgtgaatctaacttgccactttttttttttttgagactgagtctcgctctgtcgcccaggctggagtgcaatggcatgatctcggctcactgcaacctccgactcctgggttcaagcaggattctcccacctcagcctcccgagtagctgggattacaggcacccgccatcatgccctgctaagttttgtatttttgtagagtcggggtttcactgtgttggccaggctagtcttgaactcctgacctcaggtgatcagccttgaaccatagcattcagctcagatcactgattaaagggccagccaaataatcacacagtagtgttaattgctgactacatttcctgagatgctcctagtgcccaggtgagccagcagcacatgttatggtatggctatggcttgtttgttccaacggaaacgcatgttgaaatcggatccccagtggcagtgttgtgaggtggggtctaatgggaggtgtttaggtcatgacaactctaccctcatgggtggcttggtgcccttctgtattctacaacagtaaatgaattcttgctctggcaagactgaattagttcttgtgggaatgaattagctcccgtgagactgcgctgtcatagagccaggatgcaccttgggttttgcaactttacacgtgtctgcttcccttttgaccttccctaacgttgtaatggtgtgaaagccctcgccagaagccaagcaggtgctggtgccatgcttcttgtgcttcctagcctacagaaatgtgagctaagtaatcctcttttctctataaattacccagcctcaggtatatgttatagcaacaaaaaacagactaagacagcaccgtgtatacacagaaggcccaatagctctgtaggatgtgtaattcctggtacctaatagaaaagctttaaatggaagctgtaagtgaaaaagagaggtgcatacttggcctttgatgttacagtgagtctcttgcatcagtctaccgcctatgggaaggaatttgccaagaatttcctcacctactcaagatcagatgtgatttccaggtcttcaccccagggaatgtctttctagtcttttctggaattcgaacagagtttctctcaacattcctggcacagtatgtctgttaacccctcccattctggattattgtttttccttcctctccttgttcatttatttgttcatttgttattcactaagcaatcaataaacatttattgagtattgaatagggaacagatatctattgaatgttaaataaggaacaggagcagatactggaattttagtactcaaagtagatcacgataatgtatgtatcaaaagggatggagattgtcatatagaacctacagtaaactgttgttctttcactccactggcttggacctgataagtggaaattgaccagcagtagtcgtttgaaattatttatatccaatgtagattcattcaacgtaagattacccaatatggtctatttaatctaggagggtgcctgtgatggtgcacatgctggcccttctacctctgctcatctggctgtattaggtcaccctaatatgctgatcctcacaagatgtggtgcccttcattggatgcagtcagctcacacaggttggtactaataagatactgtggctagaactgggctgtggactcaaaacctacacacacacacaccccatatgtggacttagggtattttatttcttctggcaaaaaaaaatgcatttaaatagtatattcattatggtagaatttcaggcagagtagtagagctttttcatagcaggtggccattcttaatcttccttaagtgtacccaacccaaaggtctattatcttctctgtacataagacctggtgataagattgttgtctttgtaaataagggcaagtttaagagatttcatatatgtttgccacaaggtcaagtttaagagatttcaaatgtttgccacatctgagattttaaaaaatacttccagtttaacataattttatgtacattcttccaaatactttttgcttttcctttcactatgtttaggtaaatttgagccacatttttgcctttcattcctaagaaacatatcaaaatatttgacccatcaaacatttattgaaatgtcagatgatcttttcaataaaaagagggtttcaagggctaaaattcaggaagttaatgtgccaaacttaaacatactgtgatctcaagaagtttagggttgcttcagaatgtaaaattaatcaatacaagatgggcctacaatttagaaaaacatatccctttttcctttaattctttttctgttactactattttgtgagaaaaacagcagaaatgttacagagtaaaatggacccgtttgcttttaaagttttgttttttgtttgtttgtttagtttgtaatttagaaccgtttgaaacaacgtttctcagagtgtgctctgtggaacagagggccctcaaaaggtacctcaccagaaaaagctgtcttgtcaactaaatggggaaagtactccgtcgtgtttcctctctgagaggctcacaatgtgtgtcaccatctggaggctctgcaagaatggagagtagtaaaagaagatttttcactttaacccagcattgtttgcttggcaagtagatctgttaatatccatggattgtatctggggaaataccaagtttttcatagttacttaacccttgaatatttatcctcctcagagcatggaagcaagcagtagaatgcgatcgttgatatatggactttaatttttttaattttatttatttatttatttattttgagatggagtcttgctctgtcacacaggctggagtacaatggcacggtctctgctcactgcaacctccgcctcccagcttcaagcaattctcctgcctcagcctcctgagtagctgggattacagatgtgttccaccacgcctggctaatttttgtatctttaggagagacagggtttcaccacgttggccaggctggtctcaaactcccgaccgcaggtgatccacctgcctcagcctcccaaagtgttgagattacaggcgtgagccaccacacctggccagatatatggactttagactcagacaacgtgggttcaaaccccagttctgctatttgccaggtgtgtgaccttgagcaatagcttaacctctctaaatgtcagtccatagctaagctgccagtaaatatgaagttcattgagatttttcttcctgagcttgtcattcagaaacaaaatgatagatttgcatggatgatggatttcccaacaggtcaattttcacatctggaatctactttaaacgtgctctaccacatcaaagtctaaggaagtcaatctcacttggaggcacactgcagagacaagtaggccttcttccttgtccctctgtcctttcagacttctccccctcttgttccctctctcttcttaagctttccagctccactactgctttggctaatttctttgggttccccctctctcattcacccagcaccagctgaactgatttaggtttacctggctatgctttccaaatctaattcgacaaatatttactgagtacctaggtggtccttgaatcaccctgagcacccaattccaggatatgacttcttcaaaggacagaattggaatgtttacataatatgagggaaaaaaaataaaagaaaacacttagcttctttagcaagctatctgataaaatagctgaaattcaagaagccctttagttaggagggagagattgcgaacacaacaggaagaagccccaggctgagtggcaaaggttgagattttctatcgtaagcacacctcacccaaacgcttgctccctgaaagctgctgacggagctttggcgagggctcatcctcccgttggctgataagcgaagccctgttttatatttaactcgctgcagtgcaggaggggtaggggtggagatgcgtcgtttataaggggagctgtgacaatcttcttgccagccctcttcctcccactcggctcctcttacggagtcctcattccaccccccttgtttccgcattcatcctgagtggctggtgggaacgtgaaaagggagaggaaaaggcgcaagaagccagagagaggggtgtgggaaaagcgaaaacaggctgccaaatcaggggattccttccaatttaaaaaggaagtctgctgacgttagttagttaaatttaacatctttttatgtgtaacacttgactttggaagcaaaaatgaactttgcggagagagagggctctaagagatactgcattcaaacgaaacatgtggccattctctgtgcggtggtggtgggtgtaggattaatagtgggacttgccgtgggcttgaccagatcgtgtgactccagcggggacggcgggccgggcactgcgccagctccttcccacctgccttcttccacggccagcccctcaggtcctcctgcccaggaccaggacatctgcccggccagtgaggatgagagcggacagtggaaaaactttcgactgccggacttcgtcaacccagtccactacgacctgcacgtgaagcccctgttggaggaggacacctacacgggcaccgtgagcatctccatcaacctgagcgctcccacccggtacctgtggctgcacctccgggagaccaggatcacccggctcccggagctgaagaggccctctggggaccaggtgcaagtccggaggtgtttcgagtacaaaaagcaggagtacgtggtggtcgaggcggaggaagagcttacccccagcagtggagatggcctgtatctcctgaccatggagttcgccggctggctgaacggctccctcgtgggattttatagaaccacctacacggagaacggacaagtcaagtaaatattaatttttgctttacctcccttaagctcacatatctgctttccatttcttttcctttccttttcactttccgcttttaattattttgttggtctgatattgatcggctcttggtttcaattctggctgtccatctgggaagccaaaattgttgccctattgtatttccaaaccctgtcataaaacttgaaagtagtgaatgagcttcgtagagtcaaaagtcagtgtaagtcttttattccatcaggagaaatcataatatactgcaccctatcttgaagatttccataaattatctcaggtttgagaactgcctttggtaaatttcactagtgatattcccaggctatgtagcaatatatatacagcaatatatatgaacttttaaagtggtattacactaaatttacgtgaaacatcagtaaatttcagttattat

SEQ ID NO: 10158 - DNA, 6000 bp, Homo sapiens
tgttctcgagccactggagagcagcttgtataactctttggtgctcttccatatcaaataatgacagaagaagttgtttgcaatcaacccaggtaggattgtgcattaggaaaatgggctgcattaaatctataagagcctgaggcttttctgtataggagggagtatgttgtctcctatttcagagatcagtagtagagaagggctgataaatgaagagccattctcccccttggacttcattctgtgcattcaaataaatttgtccccatgtttatcggagggacatctgcattgcttgggcatgacctgacctaagatagccaacctcatccccctggaattcctcccttgggttttcaggtaagggctctgacttctgtctgcgtggtgttgcctgagggatgctttcttctgagtctgagcctccagaggcagccagggcagcctcctgtctaagccttgccaaggatggataaattggtgcatagggggtagagtttctaactcttcagatggggcctgtaggacaggttttttctgcttttcctgtgactctttttctttttctgatgacttgcagtctctttctattgttcctggttttgtccaagccattaaagtcttatggtaggtctcaaagcaggtctgcagccacttagggcgggtctgaattacacttagctgggagtctgtatacgggaactgatctgggtgcctgggctattctccaagcccagtgaccacctgaaacacttggccaattatctccttgtgtattgtcccctcggccagccaccctacattaaaagacagccggtttatctcacaaaaggttctcagtttctgtggagttagcttaaccatttaatcaccatttaaaccttttgtaaaagtttttcagcatgcactccagtggagtaggctttgatgcttttcctcccatttcttccctcacggcatgctttcactgtcactttcactcttggatccaccagaccaggtcctattatgggaggttcggatgctgcttagccaggagagtgccttcattcctgttacagctagctgcagccatggtggatgctgcttagccaggagagtaccttaattcctgttacagctagctgcagccatacagctggtcctatgggctgtatgcagtgttctaggtctggtttttcccacactcgcctcagagcacacagtgcatgctaagagatctgtgcctccccatgtcacaccccgcattggtctctcctgagactgtctcacacacctcccccgtccctgaaactgttttcctttctgactgacgtgcgagccccacctgcatctggtgtcggttagggcgtgagttttgtctgaatcaatgggcctctcccattgtcccaaccccctcgggtcagatcagtcatcatgccctgggagatgatcaggctccccttccgtccttatgggacgggtcttgccttagggcccaaactttaccgtggttcagatggctgtgcgctgctcccgtgaccatcctgcaaccccttccactggttccatttgtgctgtcgggggaaggccccagaacgcgggagggcagttctccttctgggctgaaactctcctggtggtgccaaggaccccagatctcccatgtcctggggctgtagcccacaggcaaaggagacagaaaatgttccctctccaatcccggatgagcccccagaaatgttacaagacaatcaaagactggagagactgaaaaaggttcaggagagtctattaaggtgatcaccggcccagccggacatatgtccagaaagtatgagccccaaactaagggcttttcctacttttaaacattttaaggcaggaactacatgaggtgggaagcaagttacagaagcgagaaacaaaggcagttaatcaagcattacaacatttcttacatcttgagaaaaacatgtcttgcaacctaaacttattggtcttgtgactgcagctgtgcaggagcttgctggcctgtaataaacttgagtaatttggagttggggagtatagataaggtccactgtccacagagacaggacaggctgttaacattctcctttaacttgagtgtaagggggcagggatcacactttgcagaaactttaagaggattttaaaatttctattactactactattaagttacgtttgatttcattaatttcttcttcaaattctaggaagtctgatcccagagttaatggtgaatgattacaaaacttatataatatctcacatatggttgtttatattttccaataaagttatatggggtgaataattataacaagtatttctgaaaaaaataacaattgagaatactgatatatatagtccacagaaataatgagggaattttaataccatactccacattggctgaaactttctcactgcaggctatgctgtcccattcaacattctataaactaaagatgatagggagaatcttgtttaatctgaatgggagcttgaaggatacattaaatatggaaaatatgcatccttccttaaagagaagtagcaaatgttttcattattcatttattcaaccacttagccaataatgttaacaattaaaggtgggagcattaaaaaaaggaaaagtggggtggggcggtgaaatgaacctcactgatttcttgcttttatcatttcaaactccaaaagtgtatttcaactattcatatgatgattgaataaacttgttttacattatggaacacccttactgtgtagagctgtgagaaattcaataatcagtatttaatgtggacaaaaatagatagattagagaaacaataaacatggacatatctacacataatatatactccttttctatccaaaaatctgacaaaaaccttacacaatggtcagtttacaccattttaaggacaaggatgtggtgaaacaattttaaacatttttatataataaaagaaaaaagttgttttaattgctaatgatcaagtttttaccaagaatttacatatgcatcatcaaacagtagcttgaaactgaagcttgacctttgagaaataaagcttttaaagtaaatgtctaaattctcttttctttattatgttacatttcatttactttaggttttctagtgcaatttaaataagaaataaatagagagtatggtaatcaggtacaaaggctgtgaaaatattccctgcattttgcacagggaatatgttcaaattcctaatctgcaaagaagaaaagtgcattttcttttttgaaatggcatttgaagatctctccatccatgaacattcttgagcatatggattttacaataacagcagtgtatattagttttttaatttatcattaactgataacatatacagtaaaatataatttccgttttcttatctaagggcagaaaatcccaacctatttctgaatctcactttggaacaaggacagaatgacctgacatggcatttttgatttccaacgtttaaacgcataacgtttgtgtgctatggaagcatcttagcttctggaatttatgctcgacacgaaacataaacaataaacaattcagtccacgttatatagacatatctcatatatatatgagatatatatatataaaatatcttacgcacatgcacacttagactttctcggttttcatgaaactcacaatctacctcaggcgctcaaaggcactcggcctctcaggtctgaggcaccacagagaggcttccttgggcacagttgcttgctggtcaagacgccaacttggcaaggttatgctgctggcaaaggcagattcgtcagaataaagtcgccacaggctcaaccaggcaaatcatgaatggccctttcagcaggagcctgagaggagggatgttattcagcccagcaaccctatttactttttttcaggatccccaaactcgcgttttttaaggctttccgctacaagagagccagaattgaagcctgggttggcggcagtgcaggtacctgctcacctaagcatccctcttttaattttcctaactcctccacccacttgcccaagtataacttttgaatggattcagcagaagtgaggcaggaaaggcaggaagatgagaaaaggcgcgacatcaacacgcagagctcactgagccgccttgatgataaaaggcgggcacagggactacgtgggtggtggcagaaagggcgcgggacacgcctcgcaaagagggaagagtgggcggggccacgtgccgttgtcagagttcgcaactcgagcgcccagagggctcgcgaaaagtcccagcctgcaagccaacctcgctcagcggacgactggccggatcccaacgcgctgccccttgcccagcctgcgagcgcgtggtacgaaggcgcgtctgcatccatgccccagcccggggagctggaggcgctcgcagtcagaggcgagtgatgctaggctgagcgcgtggcggcccgtgtcgtgccccgctgagccaagtgcggaagggcagcggcgcgctccgactctgctcgccgcacgcagggcggggcgcggctggggggcggggggcctggccgcccgctgggagctgcggacgagcaggcgcgctgaggacccgagggaggacacggttaaagcattgctatcaactgtgaacccagagagccctccttagccaacacgctaactccgaagcctcccttacgcccccgaaccaccgaaggcggcgacacctgattcagcgcacaaacacaggtcccttctgtcccggatacaattacgcggcagacacacactcaaactcgcgcggggcagccaagagacgaggtgagcggagggaccacgccgttccagagggcggaagggggggcggtctgggtggaggagaggggcgttgtttgctccctgaggtgagtgccgggcgaatggctgctgtccaggggcgggggggtgggaattagaaagcacagacagggttgggctgaggaagttagaagtggttagtgggggttggcggggtagggagaaaggctaggggttgagggggtgtgaaggagatctttttaggctggcccctcatagcgcccgcgatcctgtttctgccatatggcatccgttcgagggttctctcgcgtttgtgcgctcaaggcagagggagggtataacggggaggcgattcggccgaggaccttgtacttgacccctgaagggatgggcaccgcggagcccagaggccagagccagctgccagggcagggatggaggtgggggaccaggaggagcttcgggacctcttcaactcccctttactccgtcttccccctaaggaggaacaagagcgggatgtgttgggggtggggaatgtcttggggctgtacaagctcgctgagacttttcggggcccgccgtttccgcgtgcccgcgcgactctcgacaatggacagtgtacagtggtggcagggtttcacgggtccccgcgccgatttgggaatggtacggggtgcccttgcattagagaagcctgtgcgggcccccgggattagagaagaggtgagcgcctgcgggcggggagagaaggacgcgctgctggcaaaaagaagggcgccttccatggactggaggagcggcgagggagcctggtatgtgtgttttggatttgaaggaggcaaaccgcatcggagagtgcaagtagatgcagtgcgtcggggcaaaaggacaatctgaggaggtgggcggggtacccaatctctatatacaagctttctggtttaattgagggtttataaaattgagtacggtaaacctgccattgtgcagcacttccttaggaaaggaatagcctctgtacctgtaccgcgagttcccatcacctttcagcatctaggcggggagaggagagaaggtagagaacttctgagagagttctgagaactaacgcgaatggctggattgcgctaactaggcgt

SEQ ID NO: 10159 - DNA, 6000 bp, Homo sapiens
ggagtagtcaatcatcataacacaaaggaaactagatttttgtatttttcagactcaaaacacaaacagcacataaaattttatttgactgatttttttttctgtaatttaagacaacccatagtgtgtattttgtctactaaggctacaaaactaaggtgccatgacctttttactagcccaggtatgtttctaatgctctaaagaataaaacaatgatctgaaaaagagaggataaaacaaatatgaagaggttaagagacattttggagaaataagatattttaatatccaaagcaacggaagaaaagggtaagatgaggtaatacattttaatttttagaaaaagaagtcataaggcaataaagactgtcattttgattgaaatccatttatctgcattctgaaagatagtatggaacaaacaaaagttttcaaaggactatttactaccaaaagacacaatacgtgaagaatctgacaagaatgcatgttcaatgtctgtcatcaacccacctccccaaaaccaaaagaaaatatatgcacacacacacatatatatatgcatatgtatacacacacacacacacacacacacacactttggaatcagtatcacaaaccagtgcccaatttaaaaacattcctggacctcttattgatcaatttctcttacagaaaggagcagagtatagtatctgaactgaaacagtattattagaaaatgatattgtgagcattaggatgtataattcatgttgctttcatttgctcagaccattgtaaaaatccataaatcattttttgttcatgtattgcttaagtgcaatttgtcattttgcattagagggctgcttcagctcattcagtgcttttaattcactgtttagagtttaacaaaatgttgtccctgcttgataactgaaaaggcactgaaatgtgaagccaccccaatattaactaggttaaacaaaatggagaagcacatttctactttcaatatcaagataatggtgcttgatgggatatctagtattttcaatcccaagaacaaggattggtttgttctctgatgggcttgaaggattaaaacacagtaactaaagagttacctgaatacttaaaattgcatatgctataaatctttcccagaaattccagtcagcattcactttttactatagatgaacaaaaactaacacaatgtttgtggcattggttccaaagccttgtcttcccacctcttaagttagattacactaccacaaataaacctatttcatgcttacccataaaagatgcaatgcactttgggtcttttgtatttgttctctgagctgtgcttgctgagaatgacaagtgccaggaacaaccatctaggtcaatcctggtggagcctggttattgataaagtaatttttccttccaattctaaaaaaaaaaaaaaaaaaaacttccctcaaagctctgggcacatagcaataataagaggatttagaaacaaattgctttcaagtcatgttaaatcactgcaaacactcatttatccaaaggctggttaacaaacttgtttctgccccaccctttgcagcaaagggcagagaagaaagcaatcccttaacccagtttcaaagtttgtaaaacacacttgtgggatccttagcgcccccctgtttctgctgcacttaaagcccaatgaaataaaaaatgtgcactatcactctaatatataaaccaggacttttatgaaaactgattttgataacctccctccaaataataaaactattcctctgtttcttagggtgcagtttgtcctggctcaaacagtttgcgctcctagggggtggacgggggagggtgaagaagggattacgtacaaaatatttccttctccttttccgctccagtaacggggggattgaggaacacagaatatacatgatgctctacacttcaaagaggtagtcagcctcattactgaggctgccgtatatacaaacctcatctcactaaattctggggtccacgggagtaagaatgaaaaagaaaaacgaaaggcagggatctgtttgattgacacagcaagggaaaaagtaaacctgttacattttagaggcattttaaaaggcaaatttaaagtgttgttttgttttgtgggtgacggggcatggttgttttaaaggctctagggtaaaggggcatagaaggctattaatgccactatctgatcttggctccaaacaaaatgctcttggaattgcccttggctggagctatctagcgggaggcggaggaccaggctctgttctgttcggccgggaagaagaccctaccgtcactccgccggtccctggctggcgccacaaagactagaagtcggagaggcgagacctctagggggcctgggctcagcgacgctggtgcggacacagacccctatgacccaagaaatcttgtagagcccccaaaaggcgagctctccaaagcaaaattctctggcctgccctatgctgatttcgccgctaggagacgcctgtaacccacgtttgcggagagagttccattcaaacacatctgctaccaaaaataaaaataaaaaataaaaaaaaataaaagcagctcaagtgttacagtggatgtagtgattatttacaggcaaatctggccatctcatctccacctctggaagctctctggctttcagcatatgccccaagtcagctcaaacttcatctacatttcaggggtagaaaccctcttccccagtttctggatctgcattgtcattcagctgcatgtctcccacatgcaaacacgcgcgcactcgcgcgcacacacacaagtgtttccatacgtacaaatgaacgcattagaaaattaccgtcattttttaaaaggctccaggattctgacgagtcagcttgaagagctcaaaacatttcatttcaattctgcagatctgaagaaaaagaaaggggggaggggtggaagtacagatgcaataccgtattaatattcagatacactataatctccttttcattgatccacaggtccctttatacactgccgctccattctcagccgcagacgtgatgctaaaatcattttaactgcagcggttttcgcttggctttggccagtcttcaatttactgcagctggaaaaggattagccatttttgctggaatcctttccttctaagcgctcaaaggcaggacccatcttcatgaaagagccaagtgcgggggccggggggacccggcgttgcggggagttggggcgcggaaatcagggcagtagacgtgcattcgcgggactctcagaagcacgtctcaggctactatcacgcccatggacactagccctccttaactccttgccaggaggaaatggcaacgtatctccaggtcggaaaacgactctacttttcccgcaggttgtggtggtgtattcttgggtcattcattaccagaaagcagcaaaggaccttcctatctctttgcataaaaaggagattgaataggggcttctttcgtgaataaacaaccaattccttgctagtggcccattaattaaaaatatatatttatagatctttccttagagaactggcattctatccactctccagcattaaagagttcgcgctgtgttttaacttcacaagaactagctatgtggatgtgccgcgttgcccctgcgcctccggaaggggcactcacagctggtcaagcgcgtccttcggaactcggggaggctccgttggggcttacacagagctaagccctgggccagggaggatggatgcaagtaccgtgcatgtgcaaacgtgttcgcagatacccgcagcggtgcacactcgggcccctcgtgtgcacgggccctgcccaccaccccgcccgcgttcgccgccgccccactgtcctcatcccgcgggctgaccccaggattggcagaaatcagtggtctaatctagcatggtgggtaaagggatcgatctccaattgccaaaaaaaaaatagaaaatagccggtgttcccagccgctgcgtggcacttggccgcacaaggcgcagggatatcagaggcgctttgcagcgcttggcggtgctgtgtgccggatgccccagagcccggcgttaggatggcgggcttgtaggaagcggctcaaatcaactcctcagtcactgatgaacgcgctcacggctcgaagctaggtcctcgagtgagttaatctacttggtaagtattttgtgaatatgtattttgggaggaaagaagcacgtcgaacgcgtctgcccgtctgtaagcgctgtcatccccacatcctttagcgtgaattcctccgctttttaggagtcacctccaccccctactccgtatgcttcgcgcctttcctcacggccccgtcagaccccctcacctttagattgacacatgccatataatactcacttttaaaatgccctgccagtctctgctagggtcccttaattaggtaacccttgccaattagtgggccctgcgctactttttcccttctcgatgatttatttccatgatgcgtattagggaaaataccttaaaggaaaaagaatgttagcatcattggaaatcccgctcctaggagaggatatcgcagctgttgctattatgttttcgcatttgctgatgcaaacaggggaacctctctattccctccccattacctgcggctggggactgggaactttccgcggcattgtccccagccagcgcctcgggacctgcggggctgttctcgctctcacactcacactcaccccggccgctcgggcgagagttctgtcccgccccgcccggctgccgcgtgacgtgtctgtttggcggccagtttggccaatcatcggcagctcggtgggtggtgctcctgggcgattggttggcagaatgagggcgctgcgcaaaaacggagaagccgagcgctcggagctcagaaactgccagcccagaccacaggctcagaggctgaagcaggaggaaggaaggactggaaggaaaaagagacaggttagagggaaagaggcttgggaagaaaacagcagaaaagaaactgctcattacacttacagagaggcaagtaacggtggagatgaggacagagggaaccaagactctgaaagacaaaaaatacaaatagagcgaaagaggaaaaaaatgtcaagaagaacatccatccggagaaatgaagagaatgaaagttttaagctgcagagccgttctgtgcttttccggcacaaaattatatcgctgattttaagcccttttgcatttgccagccgttgacattaagaggcatgtttaacggtgccaacagcatctccttttccttctcctcttcctcttcttcttcttcctcctcctcctcctctttttcctcctcctcgttctcctcccatcagcaagaagacaaaccgaggacagtcttgaaatatcgaaatttcctctttgggatttgccagcgccaagactgtcggaataaaggacgctgactattgtattattgttattttattaattagtcagtggaaagattacagatgaggaaaggggacgcctgtcacccttcctgtgctaagatttaaaaaaaaatgaggctggattgcgggaagctctaaaatgaagcaaaaggagtaagatttttaaagacagaaagccacaggagcccccacgtagcgcacttttatttgtattttttcagatttttttttgtttcgtggtggtgggggaggtgattgggtggctgactggctgcgggaagctacttcctttccttttggagatgattgtgctattattgtttgccttgctctggatggtggaaggagtcttttcccagcttcactacacggtacaggaggagcaggaacatggcactttcgtggggaatatcgctgaagatctgggtctggacattacaaaactttcggctcgcgggtttcagacggtgcccaac

SEQ ID NO: 10160 - DNA, 6000 bp, Homo sapiens
ctttagctcatttcttcacactcagggctacaaagcaaaatgctgcagtttctgaaatgggagaaaatattccgtaggatgactaaaatttcctaaatttttgcaacatgtagcaaaatggagcataatttcaaattgtgtttatctgagctttgcttaaaaacttactgtgttaaagccactattaaacccagctactcaggagactgaggtgggagggttgcttgaaccctggaagttgaggctgcagtgagccatgatcatgtcactgcactccagccagggtgatagagtaagaccctgtctcaaaacaaaacaaaacacagaaaaactgctgtgtagttacaagattcttcaactagtcaggacttctagcaagataatgtaatgaactctgggtacatggagagttatgtggtcattgataatcatgatcactctgatagttcctgggaaagaggtgtattttctgtctctttctgctacctggcctgatggcagtgaggacagccctgctgtagtgctcagcagaaacctggatgatgtgctgtcaattttggaagggtagcaagtgaacagagagggtgagaccagggaataatttgcgggggttgcaattggtttgaggaaaaacctttttttttttttttttttttttttgagatggagacagagcttggcagagcaagctctgtcacccaggctggagtgttgtagcgcattctcggctcactgcaacttccacctcttgggttcaagtgattctcatgtctcagcctccccagtagctgggattacagatgtgcaccatcatgcctggctaatttttgtatttttagtagagatggggtttcaccatgttggctaggctggtcttgaactcctgacctcaggtgatccacccaccttggcctcccaaagttctgggattacaagtgtgagccaccatgcccggctgaggaaaaacatttctatagtttaatatatcatttcttttcatctattaccaaaattatactgaaagagttacatttagagttcacatttcatgaaagcagttcttttacatggttcaggtttgtttttatgtgatcaaatcttggcctctctgtttcaccttacctagagtatagttttggtaacagtgattcagtagtaaccaaagtcctcagaaagtcttttaggtttcttttgagtttacatagataataaaaatattttaaaaacattttactatcattactgtcttattccattttgttgctataacagaataccacacactgggtaatttataaagaaaagaaatttatttctcacagttctggaggttaggaggtttaatatcaaggtgctggcatctggtaaggacctttgtgctatgtcatcccaaagcgggggggcaagagagggccaagctcacatttataacaatccactcctataacaacattaatccattcatgggagcagagctctcatggcctaatcaccccttattgtcctacctcttaataccattataatggaagttaaattttaacatgagttttggaggggacaaacattcagaccatagcaattaccagtatgctgtttgtcctcttattttccttttcatagaaaaatgtaataaatggaacatactagaaggatctatgggaacaacattcagggaaaatgccattcctcttcaaccaatccagggaaaacgtacagagaaactctaatttttgtgagtttttgttaatgctatggcagtatttcagctgtgggtcacctggaaattttatcactgcagaaggtgataaacatttcattatacaatgctctattcttttatactttcctagaggcaataactacatataccgacaatgaagatctttttaaatagacacgtggggttttgaagcacttgagattttattgattaattgattttttatttttttactttgtgtcaaccatctcttagaatctggatttgggggactgacttaagattggctgggagaagtcagtagggaacctcaggatttgtccagaagctgggaagtttcattttttttttttttttgagacgaagtctcgctctgtcacccaggctggagtgcagtggcacgatctcagctcactgcaagctccgctttcgaggttcacgccattctcctgcctcagcctcccgagtagctgggactacaggcgcccgccaacacgcccggctaatttttttgtatttttagtagagacggggtttcaccgtgttagccaggatggtctggaactcccaacctcgggtgattcgcccacctcggcctcccaaagtgtgggattacaggcgtgagccaccacgcccggccggaagttgtagattttaaaccagttgactagtacaggtgtacccaagagtttctcaaaataagagttaccaacacccaaaagttacagtcatcagccagggccacaattctctgctcagctcctcctgctgttgttcctctcttcccgagccgttctctgactttgagagcctctgcctgtccccaggcctaatgtagacctctccttcgagatctgtcatttgggaggttattatagtagatggtgatatgggttcagggcagctagtttgcagtttagaatctctgccatgtactgaagcccaaaactattaaactgagtatacaagaatgttttggtgctgccccagcttcttggctctactttcttatctaatcttagttgtcaatgatttcaagagcaaacagccaaggaagcctgaagaccaacagaaactttgagcagacctggcttgcaactatttataaattaattttgttattccttctttcctgtatatgtgtagttccatgaattctactttgaactggttataacatcttactggttccctcatgaatgagttacataaaaattttgatatgttttcattttatgttgtatgaaaggcatgatttttgcctctgaaagtattttttaacattaggtacattatatgctaagtacttgtctagatactttatgtgtttattttgcagacacacagaacacatttgtatatgccaggtgctgttttaagtgctctataagtattaactaattcaatccttagaataggattatgtcatttaaacttctcttcagctcttattagccctatcttattaaatggaggctcagagaggcccaaggttgtgttattaaattgtagggtctgtgtgaggctgaggcaactgccctccccagaagacactgggagctccctgctagggactaaatgtttgtgtcccctctgcaattcatatgttgagaccctaacccccaacgtgatgttatcaggcatttggcagataattagctacaggtgaggttatgagcataggcccccataatgggatctgtgcccttataagaagtgaccaggaagcttactctttctctgtctccaacatgaaggtgtccttctgcaaaccaggaagagggccctcaccaggaactgattggccagcactgtcatcttggacttcccagccttcaggactgtgacgaataaattgctattgtaagccacccagtctatggtatctttgttatagcagcttgagccaagatataccctctaatggtgctgtaggatggggtgaggaaaggcccccagctctggtttttgggaagctgcatctttatttttattatttgtttgagacagggtctcactttgtcacccaggctgaagtgcagtggaacgaccttggctcactgcagtctcaggctcctgggttcaagcaatccccttgcctcagccccctaagtagctgggactacaggcacgtgccaccatgccctgctaatttttgtatttctttaagagatggggttttgccatgttacccaggctggtctcgaactcctgagctcaaaccatctgcccatttcagcctcccaaactgttgggattacaggcatgagccatccttccaggccagaatctgcatctctaaagagcagattctcctgcctcagcctcctgcgtagctgggactacaggttcgtgccaccatgcccagctgattttttgtatttttagtagagaaggggttttactgtgttagccaggatagtcttgatctcctgacctcgtgattcaccctccttggcctcttaaagtgctgggattacaagtgtgagccatcgcgcccggccggtttatttttttaaaaatggctgggcacagtgacttgtggctgtagttctagctacttgggaggctgaggcaggaggattacttaagcccaagagttggaggctgcagtgagctatgatcgtgccaccacacactccagcctgggtgacagatcaagaccctgtcttaaaaaaaaaaagtatgattattatcagagtctctaggtgacagtgagaggcagcctggtgcaggggatagggcacagttgtaatctgctagactgggttcaaatcctaaatcggccattcagagcgtgaatacattagaactggcttaaattagcatttaaaatgtcaacaggattaagtaagtagttccttctcactttttccacaggaggtgagaaaggtctcagcaaggccctaggagggaagggcgtggggatgaaagggatccagagagtctgtgcattggcagagaagatagtgtaactggcactgcggctggagggctggtcccacagtgagctacagccctgcccgctggccgtgggagaggcttaaaacaaacgccggaagcaactcccagccccataaagatctgtgaccggcagccccagacctgcctgccttcctgacttctgttccagagcaaaggtcattcagccgcttgaatcagccttttccccccacccggtccccaactttgtttacccgataaggaaggtcagcattcaaagtcaagaagcgccatttatcttcccgtgcgctctacaaatagttccgtgagaaagatggccgggaactcgatcctgctggctgctgtctctattctctcggcctgtcagcaaagtaagaggcatgggaagttcgtgtgtgtgcgcgtgtgtgcgtgtgtgtgtgtgtgtgacaaggcttgcgggagagagagggagggagggagatgggtccggtgttttgtttcctacttgcccttgcaggtagctctgggtcctcagagcacagtcgcctcagggtcacccatgccgcctgctaccctccttcccaggggcaagcagagactgagaacattccagagattagttctcccaactggaacgctgtggggcctcagagctcagcgattctgcatcatctgtgattacgacccacagcccgttcaaacgagcgttagtagcctgctaacctgcaggaagtggtgtgaatattaattacaagtgttccaaaggaaacgtgcctgcttctaaacctggttgtgatttcttgaacgttgatgttttaattaatgtgttttcttaaataaactgcctatggtggtatgattatcagattgaaaaaaacttccttcagaaatattagctttagattaagtaattagctctaaattttaaaacagcttcccactaggattattcaatatctcgactgcctggttaaatagagggcttttactccatgggagtcacatttgctcaattcatattatcttacctacaatgtcagctggggaaaggggtccgagtgcaagagtgcaagacttcttaccaagcatgcatatttctttatatttccaagtatgcctgtaccaggaaatagggccaagccgtagactgctcaggttacacaaacagccagaagcaggaaggcctcacagctgaggatccagtccaggcctccgtgcatgctcaatgtcttgcctagccagtctgttttgagattgtatgaagatcttgaaccttcagactcacgttttgtggtttgattcacacaatctgttgtggagaagagcaggat

SEQ ID NO: 10161 - DNA, 6000 bp, Homo sapiens; identical to SEQ ID NO: 1126

SEQ ID NO: 10162 - DNA, 6000 bp, Homo sapiens
tacctctgcatcacagctgcctcaacctgttgttaattttatattaagctgtattaattggggctaggagtcttcataatgctaaatgtaaattctttgttttgttcaatgttcttattttatggttggcaaacaaaaacaacaaaacagcattgacaacaacaacagaaacaaccaactgaagctgcagcttttaatctttctaaagacaataggctaaagtgaggtcctcataataagatgctagtcaccaggaaggaagccagggaaaatctcctcccagggggtaattgatccctattggcctaacactgcatgtagcactgagttaggaggctccatggagaagtgtctgcttcttttcctctgctgtcagaacaaagttcacaaacaactttgttttccccacacctttggagttagctagttagggcccctatttatgtccaggggaccagacctggacatttgtaaaagaactgaatatagatggatagctaagaaaaaaacaaatgttaagattatcattatttatagcccaatgatttagtaatctaaaaaaatccaagaacaacaaaataatccctaagaaggacaagaattttaaaacatgcagtttagaaaaccaaatttctcaggcctagagctcaagtaaaagaaaatctgagataatgaagtctggaacactgggcctgcattctgctcctgactctgtgcccttgggtaagacattgaacttccccaccccagattcatcctacaccctaaggagggtgtaggattttgtagccttcctagtgatggcatactattaatcagaaccttaaccagctctattctcactatcccagtaaaatgatgttaaaaattagacctcgtgacatgagagaagaggggaaattaattacagattacaaagaaattgtgggatctaagtttagggtgaggtgttttattgaacctctagggttggtcatagcacctgccatatagcaggtattcaataaatgatgtgtaatgggtggttagactgatggaaaggcaggccttcccagtgacggtaaaggacctggggcaaaagagacctgtggttgagtcctgatccccacacattagcacactgactagacgaagttataagcttcaatttcttcctgtgtaaaatggagataatacctcatagggttatgaggattaaataagaaaatgcttagttcagtgcctaatacacaggaagcacaccgtaaatattagttattattattactaatactgtgatcatatcttccatccaaagacttctctgaggagcagggggcatccagagataaaaagcctgcaggtgggaaatctgttagccttctagggcgttaggtttctgtggaactctgcacctcttccctgtcctagttcttaagaacagaaactctccagggacctctggtgaggtagccgtgggaagatgaggtgcagaagtaagctgggacctgtgagcctcaatttcggcctcttctgcgctgagacccaagcggatcttgcttggcctgtatgcgttactgggggaaatggacgtgggcctgagcgcggcaggtgcgagggcgctgccccggggccgaccaccctgcggggacactgtagctgtcattccttcttctgcaggcgggtaggggaagcggtggccaaagtgggagtcgaccgctcagcacagtctgtctgagtgttgaccaggaaagtccaggctctttctaaatctcgccgccagacctggtgacgcattcgcatgtatttaaggcgtttgcacgcagaacgttatcacagaatgtagccacctttcttaacggtccgggaaaccagaggtctctccagctactcagggtagaggaatttctcctatctccatgtgacatcttctgatttagaagaactaatgttagatttctcttgggcctttccacctacagctatagtcttccctttgtttagctaaaattgaggcaggtaggaaaatattattgggggcataagcctattagtgtgtaaacgtatttttatgaagtgtgcctccagggagccattaaaaactgacctctcaaccacagaaatagatgagattttgagaacattgagaagctgccttttgcaaagtaaatttgcaatggtccttgacgaaggggggtcgggggcggggagaagtccagccgagagaggagctcattccacgctatatttttgcagttgaaaagctgcctaatcatcgctaaccgcttcccgcataagagttctgggaagacttcagaaacaaggcaaatgaagacttttcactgcctccttcgggctgtcgcttccggaagccgaagtcctagcacgcagagcagcaggagagggttactttcaggcaattccactgagcaaaataaatcacttaatggcataacgttctggcttaaaaaattggaatttatcagaggcaaaaatatccttcaagaaactatggacactccgcgccctattcatttccatggcagcagagtatctgcatcttgagccacctatacagattcatgcctcgtatcgctctcacctcctttctttttgaagtaaagccctttcccaagaaggcggccagaaagtggaccccaccgggggaaaaagaaaaatgaaacgcaaatcagcttggcactgcttgcgtcttccaaaacgcggtgggacaaggctattgagtctatagctaattctttcatgtatataaaatgtatacatatgtatatatttttatatacataaaagaattcatatatatgtatatagctatgtggagccctgaagcaattctccatgcttttgtctccctcaagttccccaggtggaggcagtcataagcattataagccgccttagtgaccaccagggacggaaaccgttaattatcacgtttcctttcatctccaggggccctttggcccgtgacacaagaggcttcggtattggcgctttcccagaactggcccagaggagccagttcagagtgtgaggtcgggtctgcattgaacgtacacaccgaggtctatcagactcccccgattttagcgaagggtgctgactgctgtgctgctagaggctagcaagctccctgtgcgcagctgatgagtttcagcaactcgccacctgggcgcttttctttaaattttgggagtaaactgggaaaataaaaaaatctccacgtccactggctctctccccttctccaacttcctctttcgactcgtttgtgggagttttctcctctttgctgggactataatgtgatgcgcaatcgtttgtgaatgaacaaaagtcaccggcaagcagggagacggggacagatcgctgacggcagattgagggtggcagcaaaggcccggcctccaaggataatggggagccgttttccctcacgcctggtctctatggcccccttcgtcttccaggtaaaatgaatgttccttcatccatcatccgcagagtaccctcaggcgtgcgtagaatctgctgatgaaacctattagcgccgactgggcagctttgtggagccacccgaggctctccattgtggcctttgtctgcagaatttaagcatttacataatgcattagcacggaactcagcacccggtggggacatcgcgtgccaagcctggcgcggccaacgcttcagcggctccctcacccggcagctccctaggaccaccctcgaggaggcattggagtcgggctgcaggcgcacgggcaaagaacttagcatctcatccaagtacttcgccttccttggccgtctccgggaggttatgcttaaaaacataaaaataaaaataaaaataaaaataaagggaggcggacaaagtttcggtgggtgaactgaagctgggtccatgtgaccctgaagccggagaaataaacttaacatgaatcttgctttcctggcgggcgttgggaccccgccgtttttcatgccaaccgttggaagcttcgtactcaacggccacaggtgcctaggagcgcagagaggcctcgggttcaaatcaccggcgcgcagggactggactcgcgggtagcgacccccccaacccccccccccccgccctacacacacaccctcgcgccggctgaaagcatggaggattcagggcatttgaaaaaagaggggctgggcgcggtggctcacgcctgtaatcccagcggtttgggaggtccagaagggcggatcacttgaggtcaggagttcgagaccagcctggccaacaccagcctggccaacatggtgagaccccgtgtctactaaaaatacaaaaattagccaggcgtggtgcctgtaatatcagctacttgggaggctgaggcacgagaatcgcttgaacctgggaggcggaggttgcagtgagcccagatcgcgccaccgccctcctgctctgggtgatagagcaaggcactgtctcaaaacaaaacaaaacaaaacgaaagattcggtcaggaaagaatctgcaggcattcgaggcgctcgcactttgcaaagtaaatgcaatctctttattaagccgaagtccctcatatctatccttttagaggaaggtggtccaactcagaaatctctcccaagaggactttccaccgaagactaccgcgaagtgccaggaactcgccccagtcccgacaggtgcaggacctttcgtgccgccacaccttgggactctacctccctaaataggccacttaaaagccagtagtgcaaccgggatcccgcggcgataaagaatcactgtgcagaaccctggagctgggagtcggcccgcccccctcccaaagaaaccgggatcccgcgtcctccccgccgctagcgcagcgcgccagcggcgcccaatcagtgagctttccgggtctgtgacggccttcggctccgccccctcgacggccataaaaagtcgcagcgaagcctgcacctccgagcaccgcgcgcggccctgcccccggcacggcccccaggtgcgctccttctccggctgcttgtagcactggtctcactgtccccgccgtcagccaccggttccttatccgtctcattccccattgtggcttggctgagccggtcgccaggcctcgctgtcctcctttgccttcctctctcctcagcggccgtactttgcgccgtacctcacctggcctgcaggtgagcagcagcgcagcacccctgcccggcgagcttaacttgcccagcccggcccctgccggagtggcaccggcacctctccaagacgccctcttccctgcaggatgaagaaccccatgctggaggtggtgtctttactactggagaagctgctcctcatctccaacttcacgctctttagttcgggcgccgcgggcgaagacaaagggaggaacagtttttatgaaaccagctctttccaccgaggcgacgtgctggaggtgccccggacccacctgacccactatggcatctacctaggagacaaccgtgttgcccacatgatgcccgacatcctgttggccctgacagacgacatggggcgcacgcagaaggtggtctccaacaagcgtctcatcctgggcgttattgtcaaagtggccagcatccgcgtggacacagtggaggacttcgcctacggagctaacatcctggtcaatcacctggacgagtccctccagaaaaaggcactgctcaacgaggaggtggcgcggagggctgaaaagctgctgggctttaccccctacagcctgctgtggaacaactgcgagcacttcgtgacctactgcagatatggcaccccgatcagtccccagtccgacaaggtatgatgtgtgactcccaggggaagtgggctccgcggagatgccccctcccatccctgaccttttctcttccccgcgagtagggatctaattcctggacacctcccctaccacttccataccatcctttttctttttccttttttttttttttttt

SEQ ID NO: 10163 - DNA, 6000 bp, Homo sapiens
aagattggtaaaattacgtttttaaaaattcaagatttcataaccaaaatatgaagacaaaccagactaaaaaagataattggaacatacataacagatcattagtattcaaaatatgtaatatctaaaaactgacaagtaaaaaaaacaacatagaaaaatgagcaaaaatgcctgtaatcccagtgctttataggaggaggcgagatgggaggattgtttgagtccaagtttaaggttacagtgagctatgatcctgccaccacactccagcctgagcaatagagtgagatcttgtctcttaaaaaaaaaaaaaagagtaaaagatatggcctcagaaatcacacactgcatttgctcaatatcctggtagttacaaaagtcagcactgtaaaatgcaggagaaggctatactggggcatgaacaccaggaggccagggatcactggggccatctggaagctggctaccacatatataaaacaatattttgtagcgcttttaaaaaatatatttgtattaaaaatataaaaacacatgctatattatgccccctctagtggttacctctggggactctggggagggaggaacgggacaggatcaaacaggtaacaaagcaaacttcaaatgtatctaacatttgcaattacatgcatatgtgtgtctgaagaaaatatagccaaatgctaacatttattacatctgcatggtagaaatacacggattttcttgaaatcatttacctttcctatatctttgaaatatgtcaataaagttttaaggtaatgaatccaaacaaatggaaataaaatgtgcttttaataataatttatttttacacattttaaaaattgcaattttcaggagatgtaagaagaatatttttctaatactgaaataagcatatctttggtatagaaatcacaccctatgtgtttatctttaactaaaaaaactaatcaagaactatgacctaatatgttaaacaaaactattctttgcccatccatctgtcccctctcatagccccattgtggggcattagaatatagttctgtacctatctccatatctacaaagaattaagatgttgtatcaaaaatgtccagaagttatatatggtagagaattagttggcttaatcgttgacacacaacacaaaacaccaaaagcaacataagatacaggatgcaaaatagaacactgtcactaagatcaaataatacaaaaaaaatcacatcatttaaatttgatgcattgcaaacaaagtaacttctttagaattattatgtacacaacttgcaaagctcaaaaagtaatagcacagagccataaatctgataaggcactttaaagatagcaatcaaacatatacaaatatcaaatacaaacactgttaaactgcaaaagcagtaaccacagaaataaatagggaaaaaatatgcattctttctaaacagtctttccctttctgaagtaaagtctttaaaaaaaaaatcaaacaagtacaaaaaatatttatcatatatttttaaaacctatcatcaaagtccaaatctctgtaaaaaaagaatgtttttcttcaagtcaaaaaagttcagattcatacatttcctagagaaacaatgacagtcttcatgctaaatataggaagaaaaaaagctttcaattatgtttgttaactcttttattcaacaaacatttagtgaatgttgtgtgaccctgttttaggtgctggggatatagaataaagacacaatcattagctgtagacaacttagcctaacggagctggatccaccactggcaaccttaaagttacctcccttggtccttaagatgaaacgcaacttcaaagtctgccatgcttagcatcttgttgcaaaacaaataatggtctacctagtttgctactggtagcactgtggctctattaatattaaccgtctattgatgaagttaactttcataaaggattctatgaaagttcagaggcataaagtatttaaggacaaacaagtactggtccgcaacaaaaatagcatcggtattctgctttcacaaaaaccaagaaaaccaagaaaaatttcattctgagtatatacagaactgctggacagaggtcatcctatatgtgtggtacatgtacaaaatatgacataagaagtatgaattattgcagtcattattaaacaacgaagtatgccaaatcagtcatcaggtttcaaagaatcatagccttctttcaagaggtcccgccacgttttaaggaaacgtgcattttctgtacatttgaaggcaagttcttccacttgagctgatactgcagatgtggcttcaagaagtttggttaatgaaaaggctgcctaaaaaaaaaaagtcaaacataattttatttttaaaattctcatctcattttataagcaggctgaaaatagcttaaggctttgaatccaatgcccatgttattttctttcaaagtaatcagttttcaaactacagcactggctctttcacggaacctaagaaattctttaatattgagtagactttgaagaaacaggtctgctagaaaaatatccattatgtctgagatatgacaaatcagtatagttgttttctttttttttttttttttttgagacggagtttcgctcgtttcccaggctggagtgcaatggcgcgatcttggttcactgcaacctccgcctcccgggttcaagtgattctcctgcctcagcctccttagtagctgggattacagtcatgcgccaccacgcacagctaattttgtatttttagtagaaacagggtttctccatgttggtcacgctggtctcgaactcctgacctcaggtgatccgcctgcctcagcctcccaaagtgctgggattacaggcgtgagccaccgtgcttggcccaggattgctgttttctatgaaaatacactagagtctcagctcaacaagatgacttggaccccttgacactaagcgccagatatatctgagagatttcatcataaataattcttactgctatttgggtaacatgggcattgacctgtgaacactttaaacaatgaaaatgtatagatcaaagaacagaaactctgagctctgacaaataacattaaaaaatcacacacaaatgcagaaaacactcagctcctggtggaaaattcacttttcagccaaacgttttcttcaccaatgatataaaataaaacagtgttcctcaataacacattagcacttcattctacatatttacttgcaatcagtttgttctgcaaaaataaaagctggttaagcactctagtcatccttaaaaaaaaatacttgcggagcaatgagataatctagttcatcccctagtttccaatctgcaggaaaggtcaggccacagaactctcccaggttacactctacatacctcattccacttgacccactcaagagaacataaaactccccttccctgtcttctcccctccagtggtgtgtgagttacggttgggaggtggggtgctagtttctggggattcgagatttaacagaaactatcctaagtatgcattctagcaatcatacaaagggaggagtcctgaactaaaccgtcaaagaagccaatccacgtgacctaaacccttcaagctgggtccagcgctaagcaggcctggggcagacaatggcattatcagctgtccctgggcaggtggccaactagaacagcaggctctaagtcccatggaaagaaatcacagcctgatctcaagtacccacagaaagccagcaaactcatgcagtgaaaactattctccgaaacccatgcaatgaaaactattctccgatgggaaaggaggaggcagagagccagcaacaggcagcgcagagctgcgtggcttcgggttactgcggatgattgaaaccagaaggcgagacaaaaagaaaccagtgaggggtggggcgggtggaaggaaaaccccttaagactcctcaccactaaatctaaagggggaaccctcagagaggggtggcactttagctgctggcatcccccccgcttcccgcccgcacgctctggggcgcagaagggccggtcgtcccgggtcatgggggttgggggaccgattccctagcctcgcgagccccgccgccgccggtcttcccagaggcgccgaggggggacgcggtcccgacaccacactcacgtctccgatctgcagctccacttcctccagctggtccaccgttgggccgctgctcctgctcggaactggccagcccaaactcactgggccgcccggggaagatgctgcagaggcgtctgaagaggagggagaagagggaggcggcgggggcggcgaagaaacctgcaactcctcagggtcggccatggggaagggttgggaccgcggaatccgacccgagaagccgaaccgacaccaactgtcttttaaccactcgcgcccaaagccgaaaggccccgcctcctaacgccagaaatcccgcccagtctcctcgtgggtctcagccccggaccacaaagacgtttcatttttcgggacagccaatcatatgagtcaattcaccttaggcaactcacggctcctgcgcgagcctccaatcgatctcgaagggcactcgtagagaaaactacacctcccaggaagccgtgtgcgtcgccccgccttctactgcctttcactgcgcgtgcgtcgtgctgtgggattcgcggacccctctggccgcgctgtggctgtttcaccgctccccggctgggacttggagtcccttatctttccctggtttggtacatgacccggaagcctcggctggccgttgcgtcatccatggcgccggcgcagagcgagaaggaggtgggaacgccgtgaagcaagagcggtcggcagagcggggaggcgaactgcagcagagttcttgctttccggcaggtgatggcgccccccgcggcctagaggtccagcgcccgccgcgagcagcggacagtcctcctgttgtgtccgaccgagagtcctggtgactttgaacatgctggtgccgctagccaagctgtcctgcctgggtgagaggaaacgggcggtggggataagtggaggagttagggcaaaagggacaaggccggtcctgggggctgtaggcacctctcgccccttctctcatcagctttctcaggctatctagggcaaaggtcacgcgctgtcagcctgttgggggaccctggcttcctccctctggggttgccccagttggtagaattaatatctaggctaaaggtcaagggcggggaaaacttgtcaacacgccctcggcatcaccaccacctgtcaacacacacacacctcggtggactcctgaactgaggcttcccaaatcctggttctaatcttcaaacctctgttggaaatggaaaaaaaaaaatcgtatttgcccagtttttctccctggtcctgacctgactttcgtcttcggagccattctagttcagtctaaagaaattgaagtctgatctgtcacatcatggttaacattcatatgttgaccaagtcacccaagtgtatctggagccagtttttctgcgttgtctaaaattaagggctgggcgtggtggctcaagcctgtaatcccagcactctgggaggctgaggcggatggatcacctgaggtcaggagttcaagaccagcctggccaacattgtgaaaccccatctctactaaaaatacaaaaattagctgggcgttgtggcccactcctgtaatcccagctactcaggaggcttaggtaggagaatcacttgaacccggaggtggaggttgcagtgagctgagatcgcaccactgcactccagcctaggtgaaagagccagactccgtctcaaaaaaaaattaaattaaattaactctaagggctttatcgtgttatgggtattctgtgaaccatcgtgacagatgaagttggatggtctttttaaag

SEQ ID NO: 10164 - DNA, 6000 bp, Homo sapiens
acctggtgtaacacacttgaatatgtgtgatgccaaactttttaaaatacaatataaattatgcttatttattattttctttagtttaatcttggtcatgttttggtgtgtatttttaatttttttcttaaattaacactttggcatgaacattactgcaggtttttgatgaatataatgaatgtatggaattcaattgaatttgcatggtcttcggaattttttctgtgtgtataaatttagctgctattaacagaagagagaactttctgtgagtagccatgtgtgttgatcagatacagtttttctgagatcttcaattaatctcactttaaaaatgaccaaaacatgtctttcttgaattaactttgaataaaagtttgtatattatttgtttcacagtgttcttgatttttatctatttagttttgtgttaaagtttcctgttagtttttttgctcttttatagtttgcattttgtcacttcacaaatctgcatttttaatttattgccaaagtgacctcacctacaagacaaaactattaaatgaataaccgaagtcaataaaaatggttctgtttccaaggaaaagtaacttcaactatcaaggagaggtctgtcaaggattggtaaaatttaaaccttttatatttttgtgtccctgatatgggtagggcatgagataaggataaaacaagtagtattagaccaaaaggaaagtcaaagaaaaaaaatacctactccaaagtaactgagaaataaactgtggttttgataccaaataaaaggaattgaggaaataggaatagtggagtcaggtaggcagctgaggtgctggacacagcagaggaagggaagagggggaaggaggaggtgatgggatattgtgaccattcctcaggaattaaaaaagttggcatgagctgttgctagaccagttgataatcaagaggaaagattgctatgataacatttcgattcaaatttaaacatggaaccacatttaatacttagttgaactttccattataaatgaatttaatcagaaaaagcctatgctcagttgatgaaaacatgaatttctgccttacagcacatcattgtcaacaaacatattgaaggtctaatgaacttggagtagtcagctgtttctgacagaggcaccaagaaaaatgtatgaggtctctgtctgtcctgatcacttccaaacactaatgttctatatgaatctatcaattaaagatttatctgaaaaatcttaaagcttttcttaaaatataatctcagcctattaaagtaacaaagacttaactacatagcatgtcaaatacctctatctttactttcttaatctttgaagctttaatagctatactataattgccaaggtttgtcagtagctggattcatagctatgatttcagagactttagacatacctccttcccccatgccaacctttgtctttccagtttgaaatttttttaaaggcatatggaagtgttctcagcctgttccattgttgtatgaaaaataagaaggcagagaggtgtcttagaaatcctgccaaggaagcagccccacgtttgagcagagttcaaggctggatccacatacctgcgttgtgaagcaactcgtctgcctgctttgttgggatctatgcctccttggctgaaagcagtgatgactgtggttaaggcggaaggtgtatttactgtcagaagactatcagttctttccctgtttcttatggagtctggtgtatgattcctggtatttattatctctttatcgttccttacagcataagaacccaggtatttgtaatcctaactgctgttgcgttatgagacttaactttatgaggtgtaaaagggtcacatgaaattacatagcagtgtgctgacaccatcttggtttagttttgtcttaagcacactgcctcctactgacttccatggctgccagtgtctcattttggagaggaggctacgctggagaatggaactatattttgagtcaagattctggggttctaatcctggctttaaggaaaaaagccatgtggtatattggaaagcccatgggcatagaaacaaaagggttctgggtttgcagctccctctatcaattgctagctgtgactttcaacacattacttaacctctaatccttattttgtttttaaaatggcaataggagtgtctgtgtcacaaggttgttgcgtttgaaagaaatgatgcatgttaatatgcttgaaatccagcgggccctcaataaattacagctattgttccctgagccccctgttaatcttcattgtagggaaataagtgagttgagctgctgcatcagcatttttttccagctctaagcctttaaggtttaaaataatctgacccctccatacacctacacctgctctgatttagaaaatgtaatactgtggtagaattccaaatcagaaataattgctgacatttactgatcatatcttgtatgccagagactgtgcaaagggctttacatacgttatctcatgtaatcatcataaataactcttcgaggtgtaggtattattatttcacagaagtaccagataagacagagaagtaacttatccactgctaataaaatgccaagcctagtaagtgtggcccgatagtgtgtgctattgatgctcacctgatagaggatggcaggtttgggcagagagaaaagttgggtggcagtgcagtcatcacacaaccaataggatggggagctctggagctgggatggccaagcaaagtagccctacattggtttaggggattttatacccgtttcaaccagttacttgactagctgttgcctagaaagggggtatacccgtggggagaggtgcttctctttggcagtactcagcagctggaggaatgcctgcttaggtcttgaagagggggatctgggtggtgtgccacagcatccactacaggaccaacagattcatatgcccactgcacagtatacactgagacagcagggtttgcagaagagaaagagtttagtgatggcagggtgccgagaggagatgggaggaaaccctcaaattcatctctctgaggagttctgtgctggggcttttaaggggatcctggagggcaatgggctggaaaattagggtcctcgattggctggggtaaggaggaatgaaaccatcaggatgtgggaactgcattctttggtgagtcagctccttgtcagaccagctgagtcagtagtttcatcagtacgaaggacctgaaaggttatctcaaagcacaaacttaacgtttcataatgttcaagttgttgtctatagagcagttaggggaaactataaccttgtaacagagtctacatgattctgaagcaataggcaaacaattatgaggaaggggtcagacagcaagctgacctaattattaatcctcagtgtgctgcaagcttggtttaatttcgttccccccacccctttttcccagattaacttcataaagtatataggcatggtttcagacaccactgtaaaggcatcctaaagacagggctgactctgacaaccaagggacagatcccatttcttttcatttgacgtgaccgctgtcatgatactttacaaagaatgtgtgtgccaaacatgagggatagacgaataagtacaggtcacactgaatctaaaaaagacacttttcaagagggaacttcctcaaggagatagtacctgaattgatggggcggcatggagatggctgattattccaggcagaagggccagtttgagcaaaagcatggaggaatgaaacaatagtattctgttttcagaagctgtatatatttgacacaatatacacataatcaaaacatgtgtacgccgtaaacacaatttttgtcaattataccttaataaagaaggaggaaaaagggccttcactagcccaaatgatgcccctgtgcggttttttctttaaaggcacctcttccgttaagtgaaagttttagtatattatcacatctgtacagttttattattaaaccccagtacacaatattttaatgttgagagatggtgtaaactgagctttagagctgcaaagacctgcgtcaagcccccgcccccgcccccgcccccgggcactcatcgtccagcacaacaattgcaacaacacctgggcgttctctgcccatgtagcgaggtcaaggtcctgggagccgaactctcccttgatgttcaatctttttaaatctttcccagcctttatttctcatctgcaaaatgacgataatcgcatttgaaattctccgttttcaaaatgcaggaatttattaaaggatacgtaggctggggaaacaagggagacgaaagatctaaatctaaatggtagaccagaaaaaggaaggcaagggtgtctggaaacacaaaacagtcaacatagattttaagactcatctatactctcttcttcccgggtttgggaactgcggttgctacacaggtcacatttgaaataaaagtcctgggacggcggccggcgcgacactctcccccgcacagcgcaggctctcactgggaatctgccgggaccgcagttgccaaggcgactccgcgctgcagggcgaggcggccatccgtctgtgcccgccccctcacgccgtggcgcgctctcacgcttccccgcctccgggcgctccgcggtgccgaccattggctggctctgcaggtctcactatcctcactccatccgcggagccaatggctgggaccgccaggagctcgttcgcgcgagtcacacgatgtcggcaactgcacagaccaatcaccgcgccgagaaggcggggcgggagctctcgcaggccaataacgacaggacgggccgcctggcccacccggctccacccccaagccaggcgaggcaggttccgaggttggaacacctggcgagtcctcggtgtcggtggccggcagtcatctcgcggccgttcaggtgagggggttggaggagtggctcatgagcgaggaagggggagcaggcgggctcccacccggtgctccgtgagatcgaggggagcgggttctgggtgcggatgcacgcgctgggcgggacgctggcagtggtacccgagacggggcggaaggagactggagtgaaggtgggcctaggctaaggtacgtgctagaaaggatgaaaacggagtgaaattcttaagtgatggaactaggctagggcatgtttcttgccctttaaaatgtgttgtcttcgggagacaggacgtagaagatagttgcagcacagggtgataggctggcgaaagttatacaaaagcaggaaccactagaaggaggtaagatgtagtgtgctttgggagtagtggggttgggaagggcgtccgagaggaggttactgaaggatgactaggagttgaatgggaggacatcacctgtaagggaacgatatttccgtgggcagagaggaatgaagcagtagcaaccatgagtgatcagatactgcaaaaatgtgaagtgtaggatggcgagaatgtaagaaatgaagagtgaagaagtctggaagggcctcgtgtgcatcaatcacagcggggcttgatctttatgcttagggcaagcactcccttgaactttgagtgttttaaggaggttatctctgatgtttaaatttatatagatcgtggcattgcatcttagaaataaggtttaggaagggcaagcttggaggcagggcaagtccagaaaatgaaggagctggtgaaatccgtgttaaagtgccaaaggacagagactggctgacagctaaacttcaaggtttctgagaatccacaaataactaaatttatctagtcaacctgttccagaacaggcttccagtcatttaggttgcccaagaatgagtaaaggaaaaggaaattcaattttccaagaccttgtttcccctctcctctttaattccttgttcggttagcaa

SEQ ID NO: 10165 - DNA, 6000 bp, Homo sapiens
ttttttcttttgtatgtatgtatttatttctttttctttatctattgtatgtattttctttatggtttccatgtttctttgtctctctcttctccttctggacacccataatcaatatatttgttcacttggtggtgtctgataattcccttagactctcttcactctttttgattttctttgctttttgcttctctgactggataatctcaaatgacctgtcttggagttgactaattcttctgtttgatcaaatctgctgttaaacccttatgatgaatttcttatttcagttattgcattctttcacctcagaatttccatttggttcttctttatcttttctatttcttcataatattctcatttatttaatgtgttatttccctcattttgtttagttgtctatctgggttctcttgtaacttgttgagctactttaagatgatcattttgaattctttgtcagacaattcatagatctccatttttttagggccagttgttgtatatttattttgttcttttgattgcgttttattttcctgtttcttcatgttacttgtagctttgcattgatgtctttacatgtgacatccatgtcttaatgacatgttctccactcttaatgaactggctttgatagggaaagacagcccagatagagtttctgggtcttgttcctaggtcctgatccaggtgttcagtctttttcttttcttttcttttttcttttcctttcttttcttttcagcactagcaatctcttgctccctctggttcccatgtcagtctcatctgtgctccatatgagatgagatagaaactagctcttcagggagctcactgaaaggctcaggacattagagtcatgatccactcctccttctttcctgaaggagaggccttagttctatgccttctacagatctctccgagccttgccagccatgggaaggtgcccattctcctagctttcccaggcatctggactatgccatgtctttaagcactctgtaagaggcacaacagaagccagccccttgaggggtgtactgaaaggccagaaatgttggatgctcaccctactctctatcccctgccctccctacaccaggaaaggattgtagtctctctggtgctgagttgtactcgcaggtaaagtgaaatagcttttcttatctgtttcagtgtggctgattgtgattttttgtttgtctggggtactgaaatttcttaacttaatcctgaacttcttatgaagctaatttgttacttatatcactgttaaatctgtgtttctgttgggaaatgagggctggaacttcctattctgctatcttgctgacatcactctatccttgatgttcttgaggttatttatgtctattgtatctgtatgggggagatgtatgtattagtggtggttctggctcagagtctctaatgtggctgtggtaaacctcagatgtcagagatggagccctcttgaggctcaggtggggctgagatctgcccctgcccacccacatggttgttgacagacctcagttcttaactgaatgctagaccgaggatgtcagtttctctcaggctgtttgccagatgcctcagttccttgctatataagcctctccacaatatggcagacaacttccccaagacaagcgatggagtgatgggggactgggggaaggaaaggagggagagagagagggagagggggaggagagagcgcacacacaagcatgagagagcaattaagatgggagctgcagtctttttaataacctaattttggaagatcatctcattacttttgctgtgttatgttcatgagaaaaccactaagtcctgcctacactcagatggaagaaattaagtttcatcacttgcaaaggaggagtataaagaattgtcccatcacaacactatatgatgtcatgctactgcatatctcttcctaacactgtattcagtgatacaacattggtagtttgaaatcagccatggtgggaatatttaaaccatggaaattagcaaacattctaagtcagacttttccccccagacagctgacatttaccagcacacatcaggatgaatatagagctatgtgttcacaaaatttttatgaagtagacgaattttaggaagggctttgaaagaaggaaataaaatattattgataaagaaaaagatagtttcttaatttaaagataatagaggtgaagcaagaagtggagggagacctagggagtttaaatatgctcttatggatgcctataatgacatgaagaaaaagcagctctttctttctctttttgtttcttgtgtgtgcatgtgtgcacatgatttgaaatggagattgcatactaaatttaactatgtgtacacacattaaagacttggcatacaagatttttctttaatccagcaatcaggatgggtatataatcttttacataattgcctatgaagccacaaacaagtaatccatacgccagtaaagttgatacagctgacctatacctaaaatagctcagaaattcaaagaccaaattttagttcatttgaactgatgccttggtgtatgtagtacgaccaataatatgtgaggagtgccaccatttatcaaatgagcaggaattcacttcaaaaagaaaatttccagaatcatagcattttaggtctgaaagagacagtgggaaacctacagtacattatttctcaaaatgtctttgtcaatcaaacatcaacatcagaaatgactggtcttctttttaaaacctagaagcttgttaatacctgaaacccaccccagacctgatgaattcataggggcttaagaatctgcacattctataaactctctacatgattctgttgcaagcaaacgttagagagtgaaaaatccaaaccttttattttatagattagggaaacaaacaactaagctgtaaaagagaaccccctgcccaacaagtgagaccacatagtaggcatgattttacacattacaatttttttttctccaaaataaaattttttaaatccagcaatcagggtggatatataatcttttgtataattgcctatgaagccacaaacaagtaatacatatgccagtaaagttggtacagctgacctacacctaaaaatagcccagaaattcaaagaccaagttttcattccaaaattttttattttggagaaaatagaacgcatatcctttgttcaaagagacagctaaggaacaacacaggacttcaatgaaaaatatgttgtttatgtgtgtagttactagtcagtatgccccacctagccacaaattagtgtggttactctaaattgctaacatgaaaatcttaacctcctacttctgaagttatttggttttagctactcaatttttttttctaggcttccaaggttgctgttttgggcatggttttagaaatataattataagtttgatttcaaacttctggaccatgtaatcaagcacagactggtcatagtggaaaatatacaatttttagctctgcctacattgacaaaaaaaaaaatggctggatccacatcaattcaacttgagtgccatgtgtttacagtgacagtttctccccgaaaacgcaaaaaaaaaaaaaaaaaaaaaaagaagatccatgctgctgtagtatatgtacataggggtgtttaaagccagcccctccagcagcaccttaccaaccatgtctgtgcttttatttattgatccaataagatgacttaaatatctaactccttttccacgtaaaagtttttattatgtgcaatgcattgttaaacaggtgaagaatgaacaagtttagaaaaacaaagaagcttaacatggaaaattacccgcatggtgtccacttttcctgctcggttgcaatacccaatggattatttattaatttagatttgtgctgtccctgaatccaaacagcagcctctttagagtaacatctgctccagacattgctccaggaatataaatcccgactaaggggtggatatttaaagctgtaaatgattttttatttttacaatagctttgcaaaaggaacggaggtgtcatgtcatcatcagagttttcttaacaggatttaatcttaatgccaaactaaatcctttgtctaaagcatcagcagagttgtacttattttccccatagtattaaagaggagggctggtgcaggcacagccatatgacattgccttatttattttgtctgtttgttttctggaagaatctaggaatgtgcataaatacaattaaggacagtatctacaaattggaagaaagcatttctattctcttaaacctctaaatcaaagcacttaatgttctgatttccagcaagaccttctaataaatgaaaacccaacccttgggtttgtgttttgactcttgatacaattatgaaagacgcatcaggagatggcaagtggctgccagtacttccttttttctggaatattctctaattcttggtggatcaagatggaaactggtaggcttggaatagatgtccctttaaaaggctccactaacaatacaagaatattttttccatacgcagtgacgtgggtgggtcatgggtgtctcaatgacagtaacgttcccgaaccccggaccttagctgtcatttcacctgcgtcgtcccggacgccatttggctgttgacgtggttccgagccagcaaataacgccagcagccctcccagatccacgccggcccgtctctccgccggccccctcctcgcagtggtttctcctgcagctcccctgggctccgcggccagtagtgcagcccgtggagccgcggctttgcccgtctcctctgggtggccccagtgcgcgggctgacactcattcagccggggaaggtgaggcgagtagaggctggtgcggaacttgccgcccccagcagcgccggcgggctaagcccagggccgggcagacaaaagaggccgcccgcgtaggaaggcacggccggcggcggcggagcgcagcgatggccgggcgagggggcagcgcgctgctggctctgtgcggggcactggctgcctgcgggtggctcctgggcgccgaagcccaggagcccggggcgcccgcggcgggcatgaggcggcgccggcggctgcagcaagaggacggcatctccttcgagtaccaccgctaccccgagctgcgcgaggcgctcgtgtccgtgtggctgcagtgcaccgccatcagcaggatttacacggtggggcgcagcttcgagggccgggagctcctggtcatcgagctgtccgacaaccctggcgtccatgagcctggtaagggcgctgccccctgacagccctgggggcatcccggaggggggcggcagagggtgggactggtggcggtgggggaaggagggagggatgggcccaggggtgcctcttggtaaaaggtatctaaggtggaaggtgggaagtggagggagggatggaaatggggaagaacccgacttagagcgccagtggcccaatttctgctttcccgtcccatccccccagcaccaatcccatctccccagaccttaggccaccctctagtaagtataggcttgggaggctggggtggcgggggatgggggggatagcaatacagaaaaaacaaatcctgacgcacgcaaccccagcggtcgctctcactttgctgtgtgaaaaacccaaaggaatgattgcgagtcccccgcaaggggggttggtcttccttgctgacaagagtagaaagataaggtgcagaaggcagtgattgagaggaaaggagaacgagggagaaagagtcatttatcatgttttctctaatttccagaggaccagtttattggctctgtgtacccatctctacctgtgtgtgtatacgtattaggtacactcgctgctgtggatgcttggggaatcttagggatattgccaatctggggtggtggtgta

SEQ ID NO: 10166 - DNA, 6000 bp, Homo sapiens
ataggatatttagtcatttagaggtcactgactctaatttaacctgagttcttggcaaccacacatagataatactgaaatttgtttgcaaataattccctatggctacatattcccattttaatgtagctgttttttttaaatctccgtacatacaaaaatatgaacttaaattaaaattaccctttcttcttagttctaagcagccttagtaggatgctgagtaagggggaaacaacagcctatcaattgatgatgatgaccatatgtaaaataatcacttttctaatttaataaaacctccaaagttttgtccttggaagaaaaacctcccagtgaggaggaatagcaattgaagtaaacctggcccctcttctaagttttgtctgccttttatattttcaatcccattattcattcagcattccatcaagaaatactcactgagccctttccacataccagacacggataacaataacgaactagatagacaaggctccaccttcatacacatttttatctgggtataggaaaaagaaattaagcaattacaatatagtggtaatcattagggaagaaaagtagagggtgcagtggaagtacctagcaggatacctaccctagtacattggtgggaagagatataggggtgtggagtgggacatgtgagagagtctagaaaaagcttttttgtaactgacatctaagcgtaatgttaagatgtcagaaggtatttcaggcaaaaagaactccccgtacaaaggcctgaaggtaagtgagttacatttagaaacttagaagttcagcttggctgcagcatagcattggggtagtgtagccccaaaatggatacaattccctctgctgggcttccctgtaacagagttgacatggtggagaaattaaaaaataacaaagctttaggctctgacctcttgcacattatgctgcctgaaaacatttatgttccagatgcagaaggctaatcagtctggcaagaattctgaggttggaaaaacctgctttgaatcccagcttgagaccagtaatacccacaacaggttgtgtagaggttaggtgaaataataaatgtgaagcatcttacacacactaggtgctcaaataattctctcccttcagttaccttgcttctgagcccccagctggactctgagctgaggacaccatgtcaccatccaccacacatgaccccatgacttggcagaggacgatgcttttcttggccatctctatgtccatctcattcagttctagtctctaccctcttctttagaggaactgcagcattcataaaacaagaattatagccacacgcacctgagacttgttccattacactaattgtactttatatttgtatatgtacttgatctcaattattccttttgagaacatcataaggttgagtattgtaatcactatttggcagataaaagccctaggttcagagaggtacgtgatttatcttgactgaagctttgaatgtagctcctcattttctaaacgagttctgtcaaccctacaaaggctgcctcccagcaaatactgcaatgggcatatgttttaaggtatatttgcactttttttaaacttttaagttcaggggtacatgtgcaggtttggtacataggtaaacttgtgttatgggggtttgtacagattatttcatcacccaggtattaagcctagtacccacattagttatttttcctgatcctctccctcctcccaccctccaccctccaataggccccagtgtgtgttgttcccctctatgtgtccatgtgttctcatcatttagctcccacttataagtgagaacatgcaatatttcgttttctgttcctgtgttagtttacttgcagtttcttttaaaagttattaagactcagagaaacataaacttttacaactatatacctattcatcaatatacaactgtataactatatactctttcacacatattttaagttctctgtgtaaaactaaagttggggggtggtagtggtggcaggatgttctcagaatactagggccttcaaaggaccatcctcaatactttgatgataggtatcactttccatttgcatacttgcccagctatgctcataacagtaaaaataaagcttcctaccttcttaagaataaaaaactgtctcccctgtgaaaataacacaagtgaaagacttaattattcaggtggacttcagctgctgatttcaaatggaattattctcttatgatcacaggatgccttgtaagttacctgtttcaagcccagtctctgcctagggaactgtctcctatgaaaaggagtccgggtggaccatggtggctcatgcctgtaataccagcatcttgggaggccaaaaagggaggatcgctggaggccaggagtttgagaccagccttgacaacaggaccagataatagaccccgtctctacaaaaaataaaaaaaaaattagctgggcatgatgactcacacatgtggtcctagctactcgggaggttgaggtgggaagatcacttgagcccaggagttccaggctgcagtgagctatggatgtgccactgcactccagcctgggtgacagagcaagacctcaactcaaaaaaaaaataaataaaaaagaaaaggagtccacctcacttctgaacagttcaagttgagtccataaatgagcctatttctgtcttccaaagatatccatataagacttttcccaaccaccccccgcaaccttgcttcctttcagtgtttctccaaaggtggtgcccagattacctggatcaaaatcaccagggtactgattaacaggagattcctgggtcccaacgctgacctgaatcatcaccaagaaatggtgcattcgcttttcatatcacattacccagcagattcatacttcgtgaattacacactctagatctctgtcacacaaaaaaaatggtcttaggcaaaatctctcatcttctacttaaaacaactggttttaacctaaggggctgatataaatgctaagtcaagcagtgatttgtgtttaacacttgacagtccctcttccaggtactctatatagtggacttttatacaatatgatgtacagtccttcagccaaccaataatacacctaactacaatccattctacatttccggaaccatgctgttcatgaggatatcacttcagatattttgtggaaattttgaaattatggcatctacagaactccctgatatactagctattgtaagccaagccaaaaagcacatgaaggtagtttggtataattctttatctatcttgataattgaaattgtttcactgtaaaactttacataactgagctttgttttaaagcaaaaaacttgcagatgtgagacagtacgagaaaaaagaatcagctgttaccatcttaaaacttaggatagcctaggtgtggtggctcacagctgtaatcctagcactttgggagtacgaggcagattgcctgagctcaggagttcgagaccagcctgggcaacaccgtgaaacctcgtctctactaaaatacaaaaaaaaaaaaaattagctgggcgtggcggtgtgcacttgtagtcccagctacgggggaggctgaggcaggagaattgcttgaacccgagaggtggaggttgaggtgagccaagatcgcaccactgcactctactccagcctgggtgacagagtgagagactccgtctcaaaaaaaaaaaaaaaaaaaaaaaaaaaaaaaaaaaaaaaagaaaagaaaaaaaaccccaaaaaacttaggataaaatcttaaaacgttttgttcgacttaaatttaaattagcagtttaggatatagtacactgataatgtaattacatacattctgctataaaggcatagacatctttattgggagatatgggcagaaaaattatttcctcagggtggggcatttggctaaacacttgccaatatcctttactgtgtaatttaggtaacacaggcagaaaaggcgtttgaaaagcagaaatcaagtggcaaatatcagatctgagggacgcaatgagggtggagttgaaatccgtggtccttggatttgaaacttaccagcccgtgaacaaggttggtattgcttttggcataagacgacagcctttcttttcattagctcaggaggaatactggctttccaagtgagctcctccaatccagtgatatttgcacatctcacctgggcctttcggttacaaattcaccaccttaaggagccgtgtgaaaaagcaagaacaatcaataagaaggaaaaaaaaaaacccttcagctataaatcagccacgtggagctgctgcagcagcagcggtagtcccacttcctggttggcttcctgaaagcctctcgacaaggggctcagggaagtgggtctaagggagaggtgcagacgagagcgactccaggtccaacggagggggcggcgggccacgggatcccggagggcacaggcgttaaggacggagttattgtccataattacaataaaagtttggggatctgaaagctttaaggagctgagctgcagggcaaaggctaagaaccggactcgggaaaagtgcaagttagttacaaggtagcagggactgtgaagggggctcgcgtggagagcaggggactgcggatctggaagggggcaggtagagaggaaggcagcctggcagagcgaggcacacgggtcagtcggagctctgcggtggccgccagaggggagggggccacggggaggagcggagggaagagcccggggaaaggtgtagccgaggggagttccggatctggagctggaaagggcaggcagcggagagggcggcagccgtagcggtaggggtgggggaaagagggggaggagagccggaggagggggaaggagggaggggagagcggtggcggcggctgcgccgggctgtgagtctctcgccgccggaggaagatgaggctgaagattgggttcatcttacgcagtttgctggtggtgggaagcttcctggggctagtggtcctctggtcttccctgaccccgcggccggacgacccaagcccgctgagcaggatgagggtgagtgacccgcccggccccctccggcggcagcgaccggcaacttgttttgtttgcccgcgtgtggagggagcaggggcggcggggtcgcggcacggcgtgggcaccgcagctccgcaggtggtgctggcgcagcgcgggccgagggggtgccgagccccgcgcactccgacctccctggccgccgccggcccgccccctcgccgccccttcctccgctcttccccgccccgggctccgtcgccgacacccgcgctgccgcggcagcggctcgggcggccgctctccgcgccgggactgcgggcggagcgggcggagagccgggtccggggggctgcggccgcccggcgtcccgctctggggggccgggaccgcagcgctcacggcccggggacgcggggttggtccaggctgcggcctgtggcgcgtgcaggcctgaaggaggcgagatgccgatgccgccaccgctggtccggtggaccaggccccttggtccagcctcccctcccgcagccgcccgtctgggggtgttcgcagccccgggctcccccggcccgcccgccggggagtgggagggcgatggcgccccgcctccggctcttacggagagcgcgcctccccctcaactccggcggcggggagccggggtgcgatgcgcggccgaggcctcgcccggaccgccggtccccctcgcgtccctgggcgagggaggggcggttggccggagatggcggaggggcgtccccgccccgcctgcccgccgcccccagccctcagcgcctggggaagcccctgctgtggcagtgctcgggcgctatccgggggaagaggagcagttcctcttccttggctgcggcagggctgcttgg

SEQ ID NO: 10167 - DNA, 6000 bp, Homo sapiens
aagagagacagggaaatggctgcttggtggagtagttagaacacacatttaccagttaagtttaccatctaatatggtttgtagtgccccaaaacaatcacaacagttacatgaaagatcactgatcacaggttgccataacagatataataataatgaaaaggtttgaaatattgcaagaattacaaaaatgtgacacagagatttgaactgagcacatacttttggaaaaatgatgctgatagacttgctcaatagatggttatcacaaatcttctatttgtaaaaaatgaaatattggcaaagtttaagaaagcaaagcctaataaaatgagatattcctgtaaaatcaacccagcctgaggaaaataatcagtggatttctagattggtcaatagagattgccacaaataaaatgtaaagagataaaagagtgggaaaaaagagagcagagtaacaaaaagctatgaggcaatatcatctggtctaacacatgtgtaattagaatatcaaagggagaagaaataatgagcagaagaaattttttaaaaatgtgcctaagaattttctgaaattagtgacagacaccaatccacagatccaaagagctgagagaacaacaagcaggacaaattccaaaaagacacatctacatatatcatattcaaactgttgaaagccaagcaagtgagcaaccaaagtaacacacacacacacacacacacacacacacacacacacacacgagagagagagagagagagagaatcttaaggtagctggtatgggggttatataatttataatagtacttaaaatgaaatgctttggtgtaactaaatataacagaatgtgtggagaatctgtatgctgaaaaggaaataaatctgatggaaaaaataaaagacaatctaaataaatggaaagctacacagggttaagtatttgaaacacttaatatttgagatgtcaattcttaccaaactgatttttatcccaacaaaaatcccaactaacttctgtaaatattgacaagcagattcaaaatgtatacggaaaggcaaaggaaccagattaaccaaacaatttttataaagaaaaaaattgtgagggggatctgacactactacattatagtactgttataaagctacagcattcaagactacaatattaatgaaaggatcaagtcataaatcaatggagcagaataaatatcttagaaatagacccacaaaatgtagccaactgatttttcacaaatatagaaatagaaaaggcatagtctttttagcaaatggtactgaagcaattgaacttccatatgcaaaataaataaatgacacctcggcagacacttcatgcctaatataaaaataaactcacaatggattatagacccaaatagaaacataaactataaaagttctaggagaaggaggattgcatgaccttagcaatgaattcttaggtatagtgcaaaagcatgagccatatgttttataaatacagtttttctatttatgtttgataaatagagtttatcaaaattaaaacattttgctcttcaaaatatattctaatgaaagtgaaaatacaaacaacagactggtagaaaatatttgcaaattacattagagataaagaacttgtatctagaaatgtagagaacatttaacaatcacaagaaaacaaactacctaactaagatgggaaaggtctcaaacattttgagaaagaaaataaacagatgacaatcaaaaccatattgagttacctctacacacatatcagaatggcgaaaacaaaacaaaacaaacatacaaaaattgataatagcaaatgcttgtgaggatgcaggaaacagaaactctccttcattgctgttgggactgcaaaatggtatgtacagccactttggaaactgacagtttcttacgacgttaaatatatattcaccgtgtgaaccaacaataccatgtttggtttttctttttgttttttgttttttgtttttgagacggagtctcacactgttgcccaggctggagtgcagtggtgcgatctcggctcactgcaagctccgcctcccgggttcacgccattctcctgcctcagcctccagagtagctgggactacaggcgcccaccaccacgcccggctacttttttgtatttttagtagagacggggtttcaccgtgttagccaggatggtctcgatctcctgaccttgtgatctgcctgcctcggcctcccaaattgctgggattacaagtgtgagccaccgcgcccggccccattgtttagtttttaacctaggtaaattagtaaaagtctgtgtgcacaaaacctgaaacctgtatgcaaatttttctaaaagctttataatcaccacaaagcaaaaataaccaggattccctttaacatatgagtagattaacatgctgcaaagtacctatacaaagaaacattactcagcactaaaaagaaactgttgattcatacaacaatatgaagaaatcttgatttcattttgccaaatgaaagcagcaagacccaaagggctgtatactgtataatttcatttacatgacattttgctaaatgagaaaaaaaaatcagttgttgatcaggacatttagttttgatcactggagagcacacaatggaaatttagaatgaggcaactgttttatatggttctgcagtgatgtacaaatgacactacgcatttttcaaaatttcagaaaccatacaaaatagtgcattaaatgtactcatattaaaataaaaactaagcttttggaaatccaaggatgaaatgaagactgtgccaaataaatctaagtacagggtttaatctcactgaagtgtgtgagagaaacaagaaagagctcacaataacgttgggaacaatgttttgactagaccataaaattaaaggcagaaagaactttacataagcactttattttagctggtaattttgatctcacagggtaaatttagccattctggaactacaactcctaaagttgtacaagtaagtaaacaaaatgtagacagttcactacatggaatggaatgggaaccaaattctttatatcgaaaaaggaaattacaaatgagcaagtgggagaggctagaatgaccactgtggccatgagttacaattggaaataaaagattgagttcttgtttcttttaatatgcataaatataagtaaatacagaaatacatataaacgtgtgcatatgtacatataactttctctctctttccagaaaaagtaaacaagcaatgatagttctatagcaatgagcaccactgttgtttatatcatggattctaaatatgattctgcaatcatatttagagaaatgactgatttctttggtcatatttggagaaaatatggggcttgggcaggaaaaatacaaatgattctggagcatcctctggtgctagaaagcaagcaagggctgataaatacataaacatacagataaatacatagggcatgtcaaagtgatccaagagttatcctgaaacctcaaaaaatctcccaagacaaccctagaacaacttgagtaacaaaataaacaatgtcattattgaattacatccattagatcaaataaacacgtgcccatactgttataaataatcaaataaattaattgatgaagaaagggaaaagcttctttacaaatggtgaatgtagaagaatggcagaaataacaagtcaacaggtctgaaaatatctccccaaaatatttattaagtactatggtagttgaaacatatgcctgtaaattctctgatactcctctctccatggtggagcttgagggtgggttagatttgttaagaagcttctaatgaatagagcaggaaaagagacaaaaggcagctttccagtggagaaatctatcagtcgctaacttagccatggtgtcaaagtaagccatctccaataacaaatcatgttgatatcaagtttccctgacatattagaaaaaggctttaaatgatattcttcacaaaatccatacctcagttgcactgtgagaaccacagaaacccatatcaagggccattctacaaaataccttccaaagtatattggtaatgaacaacaaggaaaaactgacaaactgtcacaaactggaggaaactaaggggatacgatgacttagtaatgtggtaacctggactggatcctggaaatgaaaaaaaaattaggggaaaatacaggcaaatcctaatgaagtctgtaacttagttaatagtattataccaatggtaattttttacttttaataaatgtatcatggttattcaagatgttaacattaggggaagctagatgaagcatatatgaaaactctacaagctttgcaactcttctttaaggatttaatcattaaaaaattaaaaataaatgaaaaaaacagctgcaacaatggtctatacgttgagaatttcaaaaagatgctgtttactttgggattcaagtaaaaacactatagttgttaaaccctagagtactcttgaaaaagacggttttgtacactttaaactgaaagagtataggaaaaataatttcactcttacagctaggaaacaaaagggaacaaatacaaatgggataattattgaagtttctgcaagggggaataaatcgctcaatgtcccttcattgcataaaggcaaagttctctaattattaaagaaaaaaacctcaacattttgattgataggccctgtgacatctgtcatacatcttgacattgttacctaacttctccctgggactgaataactatcaggtgccgggtaccgctaataaacctcaaacactttgcatgccccagtgcataactgtcgccctcagactcttaattgagaaacattctttcctcctttgtgacatcacatccactaaccaaatggggtggtgtgagtatctcctataaaataaaagctctcctgatggcctgttcctgcacatttcctgaggacgccctcgatcacaagcaggttatagctatttaaaccttgccttacctgtactctttacacaaattgaaggtcaaagaagtagtcatacttctgggcatagattaaactgattttgtaatactgtttaggctgaacctatcagtttcagactaaaccctccaaatatctgcccaaacttgccccataccctctaaaaccaaggcctaacaaagcactaaaatcaatagatgaaaacctaattgagaaatgaatcatgaaactttgtactattccttgtagtacttctctaaatttaaaaaaaagaaaaagaaaaaaaaacacagggcagtgatataaatttgttcagaatctcaggagtataaattgaataatgatctcccacttctctgtagtaacaaattcaaatattattttgtctttggtgcataatgaaattgcatattttacagctgtaaatctgttttctgttcctttagaatctgtttaattcagagtcatatgtttgctttcttctgagaaattcgataacgtacactggtaattatgacttagggcttattgagatattgtcttaatttttaaaagtctttaaccagggcctcaaggaacttacatttccctatattctaccatactttgtggcattctaaagtttagctgagctctaggactgactccatccatctaattacttgttttatctctaatagtctataaactttctgatggggactaaaattttttctcaaagtaaagtgtatcatctgaagcataatatatcccaaggaggtaaatttctcttttctgaaagatcataaccattcagaatttttctagttagtaaccaggagattttagagatgattctttgggtctcattcactatagccaacaatgggtttccaaatgtattcattttctgtggctagatattaaattagcacagagttaggcgcaaaaagcaacacaca

SEQ ID NO: 10168 - DNA, 6000 bp, Homo sapiens
aacaacaactataacaaaaacctactgcaataacttctggcctggtctacaaactggcagtcgcatccgtctcaaagaaattacttatctactgagagcctacatggtcatgacactcaactgatctaaaatcctcaaaagttcgttattgtctcctgaattatgatcaaacttattagcctggcactcaagccttttacaatttgtccttggcctacatattcaatttagctttacactttaccattttacccatttacactttaactgttcgttacctgtgtgtgacatatatgctttacatgagaattctttcaaaaatatcatgatctatgatttcaaggtatctcaattcaataagaatttttttgaccatctactacgtgcaaggctcagtgtcctgggcactgaaagggatagaaaaatgaacaagacctgatccccactctctatgatgaacaacataattcatagtcactttctgaaaaccatttgagtccttaatgtgctagatctataacatgctccattgcaggaacttccctggggagcttggtgctttgtggactctttggatattcccaataacaccatatttaattagaacgtttttattggccgggcgcagtggctcatgcccataatcccggcactttgtgaggccttggcgggcggatcggctgaggtcgggagttcaagaccagcctggccaacatggtgaaaccctgtctccacaaaaaatacaaaaaaatagctgggcgtggtggcgggcgcctgtaatcccagctactcgggaggctgaggcaggagaatcacttgaacctgggaggtggaggttgcagtgagctgagatcgcgccattgcactccagcctgggcaacaagagcgaaattccatctcaaaaaaaaaaaagaaggcttttattatatctttcagtttatcccctttttaaaaagcattatctggccatgtgcacacagctttatttaaagatttccttataaagtgatttattgttcttacctcttcttagcttggtgttacagaagaataattatttgcaaatatgaagatcaaaactttacatttattctaggtttctttctatccttcagaaatacagttaggcatgtctttcccagctgatcgctatttactcaagcgctgacaaagcatgccaatcgctccccccattactgccactaggttctgagctgaaatcattaaagagtacaagacacttagtttaaaaatgctacgtattaatttaaggtctgtaatactatttcagataaacagcctcagtttccttcagtacaacctcagtgtttgactagtagtatttgcatcaaaaagcattaaaaataaaataacacgttacaatgttgaagactaccattcataatgaaaatgtaactattattaatacttgcttaccaaataatatatcaacaatttttgtgaaggagaaactataggagatgtgagaataaacagacaaaacacagtattggagattttaacaaatctctcagaatccaagaaaatgaaggtaacaaatattactacagatgtaaaagacataaataacataatcaataaggcagatctcataggtatctatcaaattctatatactattaagaggaaataccttctttcaagttgcacattgaattttcacaaaagtgacattttaggccacaaagaagacctcaataatccaaagaatagaaatatacaaacagcattctctgcctacatgatttaaaatcagacattaatttaaagcaatcaaaaggaaaaatggtactttctcttggaaattcatagtcagaaattttaggatacagctaaagcagttaccataacaataaacatgaaaaatataccaactaaatatccaatttccaaagctaataaacaaaaaaagtggaatgaaaaaagttgatagtgttaaaaccaaaaattaatgagttggaaaacagtagagttaattagtaaatgcagaagtgctttgaaagaaaacaagaaaaaatactaattaaaacaataaatgaaaaaggtagaaagcacaagtatacataattagaattaacaattaataatttaaaaaaaatagaagaatagactcccttgggaatttctaccaaattttctatcaaatttttaaagaccagatccaaatgctacttaaaatatcccagtgcacagaaaactaaggaaaacttattttccttgttatattagaaatatatattttctaatttgagtataatattacaatcaaaaaaacacatcagtttcactatgaatattgattacacaaactaaaaaacaaaaaaccccaaaattagcaaagaaagcacaagagcatattaaaaactaattcatcatgaccaggtggagtttattccaggaatgcttactgggccaatattataaaatctattcatataacccattaaataagcagaggaaataagatagaggaaagaagtagaggaaataagatagggaaaatgcatctgaaaacaatttagcacttgtttatatttttaaaaatttcccaataggaatagatatttcctatcaatatgcaatatatattatataatgatacatgtacacacacacacacaatttccatctcaaagccaacatcttacttgatggagaaatgaaaggaaatttcctgctcaaatcaggaacaaaaagatatcagttgtccccatctgactgaatatcatgttggaaatattagctactgaaatgaataaacaattggaaatataataattggaacggaaaaggcaaaatgatatctaatgtaggtgatataaatgtctagaaaatctaaagaaacacttggaaaaataaaacagaataagaaaattccctatcccatccctctcctgctctttttgtggacttttatgtgtttttagcactaccagtaagtcaagttaaaaactgtggtgtcataataataatactagtttcatttgagtgttcacaatctgcattcactctatgctttgcagacccccactcttatttaggcagttgctaagtaacatagagtttgtttccgaaatgcccctcctatcagtcttccttttgggtccatcactcactctccacatataactggtaaatggttgcctgtgtagcgatgcttgttttacatgtaatttccctgatataaagtcaacttcttgacctggttttctaccataacttacctttccaggcttatttctgcttactcttttatacatgcattgtttatcaggaccagccttctgagtatctcttagatatacctgtacttgcagttcaacaacaagaattatttccctaaaacatgctataataataatgtgtcttgtttaggctttgtgttaaataatttgcacactgtgttgtcccacattaccagggctgtaattccttcctcctttgctatgtaacttcccagggtatttttttgttttacatttcagatttgtttttattttattaactctacctgattatatacttttgagtgtagaaagtgatcagtacaatctctgtatcacttgcagtatagatggcattcaataaaaatccttttttttctttttttgttaacaaactgtgccagcctggaagttaaaaactaagattttaaacgcaactaaggatctctctttagtctctattttatcgatttttcattagttggctctatttgagcagggagtctgccttattagtgctgtattctcaaggcttagaactattcctggtacacggtaggcacttggtaataatcctacctgtatggctatacaaaaattaattgaatggtcatgaataatgcaaagaagcaaaagcttaacaagagacaacataagccagtatcaagatcagatgttcacagttttctggtttgttcctgatcacattccaggacagatatttttgtttggtttatggactgaaatttttaaaaaaaatttatttcagcagaccctgaatccatttttataaaaacccttagctgtgaaaggaacaaaggttttggcagatagtataatcagagtcaggattggctcggtttgaaccctaatgcccttcaggatattgaaaatgtgataaaataattgcattatttattaatgacccaacgaaattcttatacattatgctgtagagcaattccgcagccattatcttctttgctcctaagaacccagaaaggttatccttttatttatcagaaatcaccatgttaaaatgcaaatacttaggatcggtagcctcaacccttatcttctaaaacatctttagctatccatacaaagcaaagcattaataggaattggactgacgttggaggtggaaatactgatgcacgtgacagctttaaggacttgggcggctaattccccactccccactgctcctcagatcctccaaaaaaagctcaagtcctaactttgaccaggtttgacaaagaagggagaggaccaggcgttttgtaaagtgctgcttccaaacgccacccgtcaggacagattctaaaccaccttaacttgctgccggtttcaagtgaaaataaatggtacataagtaatcaagaagtcgcagtcccagacctctgaccaaagaaccgaaaaaggacagcgaacgaccggttcccaattctctgaacccaaaggtcggagaagcaatttagaagaggagggggtgggtcttccacaacaaaccccgcccctccctcactcgtcgctgattggtggcggcgttaggccgcgacggaggggcgggcccgcggctgagtctctccctttccgcgccgccccgtgcgcgctgtgggtgtgtttcgggaagcgggcgcgcgcgcgctcgcgtcggaggaccggaaaggaggcggggctgcggcggcgcgcgctcccggaacgcgcgcaccgcagacggcgcggatcgcagggagccggtccgccgccggaacgggagcctgggtgtgcgtgtggagtccggactcgtgggagacgatcgcgatgaacacggtgctgtcgcgggcgaactcactgttcgccttctcgctgagcgtgatggcggcgctcaccttcggctgcttcatcaccaccgccttcaaagacaggagcgtcccggtgcggctgcacgtctcgcggatcatgctgtgagtgaggccgggccggcggtgcaggacgccgggaccgggctggggcggaagccgaagccgggccgccgcgccggggctgccgtgccggggccgcgggcagggcgtccggatcgccctcctgagcggcagttcgcccccgagggcggtcgtcaggggtggacgtcgcaggcttttccggcgtcccctcggaacttgcacccctccaccgtaaattcccgggcttgctcttaaattttaattttgagcgttcctcaggtcggtgcctccgcttgcttcctgttcctcacttccctccacccacgcctggccaatgagggagcaacacaacagcagagccggcgccgccgcccgcctgggctggcgcctcccgcgcgtccggtgccgctcgtggtccgcatgcgaggccctccaggcgctgccgccgcgctctgggtcgggcttccgtggggtttcctggcggctctggaggccacaggacggggttgtctttgtgtcattcatcacccgagtttgccctgtttgacattccctttacagttgttgcctttgcaccttcagaaggcagtaaacagttggagctgctttgaagttggccagagatgttgggcactgagagaattaagcatcttagccttctgatacagcgagatttttgttttgttgggtttctttatttctttttcttttgccaaccacttgaagaagtctgcgaaaacgccaaaaaatgcagttcgaaatgacagtgccatttcgctattgcctattttgtccttgattttattctctggcacttttgtctttaa

SEQ ID NO: 10169 - DNA, 6000 bp, Homo sapiens
tcttacttcctctgcttcctgaatgttttctttttcctgtggcagtgacacagaacgtctagctgactatgaggaaagggtcatgaggtaaaagaacgcatatggaagaaaacccttattcattaaaatagcaaaatattgttcttcagtagtacagatgataaaaaatagtctctgataacatttgttgcctactgattttaataatagaaataaagcatgtttttaaaaatgattgataggatatgtgaaacacaaaacactagttcaaaatgtgtttagaaaatggacccagtcagctccaggtgagtaacggttttattcacagaggttgcccgtgggcaaaactggaagatgccagcctggaaggtgtgtggttatggtcggaaggcattattatgcaagcataaacattagcttcgttgtgttgtatgatactcaatgtgcttgttggactcttcaacaaagtaaagagaggtgctaagattggaagtgggaaaagaaaggttctgaatctgtctgggaagtgcacggggtccgcctgtgtctatcaggggtgtgctacgggggtcccccaggcctccctgcctccagcaaccaagaggccaacctgaatcagtttcccccggaagcagagtgccttctaggagaagtccctctgtcttttctatgattcaagggctcctctgccccctcaaatcacctcctttaaataataaggcgccaaatccttctaacaaaactttttgtttcacgaacattcataaaacgtaaaaagtacaagttccggtggaggcaacacactgaaagtcactctgctggaagtacaaccagaaccccctcttgggtccttgtccttgccaggctgcgttggaattgcctgtaggcaccacagctatgtctgttcctggcatgtaagcttctccacatagcctgggcaacatagcaaaaccaggagaccacagcaaaacctgcaaattaaaaaatatatatatccgggcatgatggtatgtgcctgtagcctcagctactcaggaggctgaagcaggaggatcccttgtgcctaggagtgcatggtttcagtgatctgtgattgtgccaccgtgctccagccagggtgacaaagcaagatgctgtctctaaaataaataaataaataaatgcacatataaatatcttgatcctcttcgcttaatgctgaaacttaccatgtgaacaaacactagtagtgtgttctaattcctaatactttaaatgtacacttgcacacaggcattatgttatcaccaccattagcacatcctttattgtttttctttattccttgtcactcttactctttagcaacttccattctctattcccagtttggtaagagactaagtctataagagcttccactaaaattccaaaaggctaactttccaccctgctctcatttctacatggccctgttcccaccagcatctaagatcccatccacgattgaaagtagagtttcttctcatctcctagatgccttgtccattctcctgctggaagaaagccactaagtactgggttgggcgggtggacacatgttctgccgagcgccattctctcccctgcctgtgtaagtgataccaggatcttgtgaccacaggcagctcatgctcccgagggcatgtaaggcctctcttttctgagaaagtccgtggaagcagaggacagtgtatgagtttccatggaaaacctcttgtcaaggattccagctatgactccttctatagaacaggataactggagagtagccaaggagaaatatatctcccatttagaaaatatccaaaactctgattggtaaaattaagtgtaacaaagatgatactacttcctgaattcatatattaattaatatttaatttagtttaaatgtctatttaaaatcttctggtgatgtttaaacaattgaacaacttgatagtaaaaataaatccagacacataagcagataaaactttattttttaagtgattgtagaatcatatatcagcctatttttaaaaaatgaagatcaaataaatatgtcatagtgtggatatttcataaattaaagctattatgagaacttaatatatgacaaactagacttagtaatataagacaaataatggagagaagaaaatatctacttaagaattagtattgggatacccaagcatgatatggagaaaagtgaaattagacccatacctccatacaatataaaacgtagtgttagacattttaaaaatagctactcaaagtagaagaaaaaaactgatatatgtactagagtaaatagactgctatatctataaaagagatacatttacatcagaacatgaaatagatcatcatcataccatagatctgttcataacactaatagaatgatataataaatatcaaaaggaaaacaacaaaatgaaaaacattcaacacatatttattgtcccaaatatataaagaattgttgttaatataaatactctgctttcactccagcagtagtcaaggaagattaaaagtttatacaaaagggaaaccttgtcaaactgtcaaattaaattgaatcatatggaatatatacagcttcatagtaattaagtaaatacaaactaaaactcataaataactcacaaataaccaactctctatttttttaaagccagtgttggagaagagtgtgagagaaagcccatctatataactggtgggttggtatttctgaagagcaatttgtcaatatgtagcaaaagctacaaaactttaaaaatcttaaatctatccattccatttgggaaatatatgagaagaaaaaacttagaggagaaaatgaagtttgtgtaagtttcaatgtagcagtattagttttccttccttccttccttccttccttccttccttcctttctttctttctttctttctttttttttttttgagtcagagtctttctctgttgcccaggctgaagtgcagtggagtgatctcagatcaccatgacctctgcctctcgggggtctcgtgcctgagcctcctgagctgctgggattccaggcatgagccatcacgccaggctaatttttgtatttttagtagagatggggttttgccatgttggccaggctggtctcgaactcctgacctaggtaatctgccagcctcagcctcccaaaggtatgagccaccacacccggcctatttttcatcataaaaataagacacaattctaatgcacaattaaaaggaaaatggaggtataaaagcaagtgctctatattacaggatgggatacagtacactattataattaaaaaggtttactgtgtggattatgctgatccatggaaatcagtaagtgaagttttgataaagtggagcaagtgacgaatacactgaactgtaaggtctttggagatgggccacgtctacttatattcaatccacagggctacacctagttcttggtacacagtacatgctcagcaagagtctgttgaatgaacacatacatggtttatctgtttgtctcttccgagttcttgacttctgtctgctctgacctctggcagctttccactagtttctagctttcattctgcttacctggatttcggaactctagcctgccccactcttagataaacgcatgccctctgtggccctggaaccttagtgacttctgctataccaaagtctccacgcccagggtgacacgcagctgcagctccgtaaacctctaacatgatgtcagcaaatattaaaaaaaaaaagtttataaaacaatgaataaactttgttaaaggtacaaatgaaaattagcaaacatgggaagataattgagtgaagagtttaaagttaaaaacgaattgcagtcattctaggggaaggaacagttgtatttgaaaacctgtatggttacatgaactgcctaaaaaacaagctaaggaaaattaaagctcagatttatatattttaagaaattaattgcaattaatttcctgggattaaatagcatttcctcaaccccagctgtcattaaaaagaggcaaatacagccaaggactggatctccggaaggctgacagcactgaccctcaagaaggcaccggctgacagacagaacattctgccctaatatgtgctgaaattccgctgagagcagagtggtacattgaaccctttaggggcttacaaaagaagtgtcctgtgttttagagtcacagagttttgcagaaacaagtatgaattcacctagtggccccctgcaccaggtctttcctgtgggcactgagtgccagacacatcaatatgtaatagcagaatgaatgactgaacgaacgattgaatgaaaagaaatgagaggcagcaggttgtcagattctatgaggcaatcacagcatcaggtgaccttagtatctatttgagaggactgccatttattctcgggagcgcacggctctaaagaggcccatatccaggcagtgagctctggtggggggcgcctttagatgcaagaaggaggaaacagctcgaaatccctgggcctgagcgcggcccgtgcaggccggagggtcaagaactctccaccggcggcagcggcccggtgtctgccccggcttcgccccggcctaaggctgcctgtgctataaatacgcggcccacatgccgcggtgacacggtgttccctgggctcggcgggacagataacatgaatgtgccctttaaacgtcccaagttgcagggacagcccccggcccagcctcgctcccggaagcgccttcgcccccgatgccctctgcagctgggaggagggggcgccccgcacctgcccagccaatgcgcggcgcgagcgccggccgcgacccgcctcctctcgcgagagcccggcggggatataagggggagctgcgggccaggcggcggccccctagcgtcgcgcagggtcggggactgcgcggcggtgccaggccgggcgtgggcgagagcacgaacgggctgcctgcgggctgagagcgtcgagctgtcaccatgggtgatcacgcttggagcttcctaaaggacttcctggccgggggcgtcgccgctgccgtctccaagaccgcggtcgcccccatcgagagggtcaaactgctgctgcaggtgaggaccgcgcggtgcaagaggcgggcgcgggcgcggcgggccgggcggggcgcgcgatgcggcgcgagctgcagggcgcggggcgccgcggaaaatctgcgccaggccacaggcccgggcgcccgcccgcccgcccgcccgcccgcgggggaagaaggtgccctctgcgtagagacaggtccagcgtcagtcgcagattcctggtgtcgggtggcgcccggcgttcgggtgtctatatatggaaacccacccggagccggtttacgtgtgccagatcctgcgcccgtgacagcacgggcgtgcactcaggcccggaggcacctagtgattgccagtatttttggcaccgtcttatgcgcacgcacctttacaataaaaacatcaaaataatcatcacccaagaattcccttatcgtatctcatgcacaatgctgtatgtaggctgacgccttcatctttatgtaacctctgtgagagagttattcttctccattttacagatgaagctgaggttttgaaatattaagaaacaattttcggaataaactcagatcatcctgtctccaaatcttttcctcccctacctggtcgctgaatggtttatcatcctctcgtgttttcctccacctgcccaaaaggtcagggcccctcaatgaggaagagcccaatttgggagtcagaattactaacaacaaaacccccacaaattgctcacaacggcagcaaacccttaataattgattacttggattatctgcttgaaaactttggaggcctaatgtttagtggatttattctccttcctctattagagcatctagtagagatcctc

SEQ ID NO: 10170 - DNA, 6000 bp, Homo sapiens
tttaaaaatttgccaaaaaggtaatttcatgttgtgatatatcacaaaaataataataaatgaatagaataaagggaaacttttggaagtgatggatatgtttatggtatggattgtggtgatggtttcacagaagtatacttgtcttcaagctcatcaagttatatatattaaatattcacagctttttgtatatcgatcatacctcgatagagtggcttaaaatgaaggaataaaacagtgcatatctcatgacattaaaaaaaaagtatcactttcaactaccttgtaaaattacaaaaaatacaataaataaataaaagtttaggttaggctgggcgcggtggctcacgcctgtaatcccagcactttgagaggccgaggtgagtggatcacaagatcaggagatcgagaccaccttggctaacatggtgaaaccccgtttctactaaaaatacaaaaattggccaggtgtggtggcagggacctgtagtgccagctactcaggaggctgaggcaggaattgtttgaaccgggaaggcagaggttgcagtgagctgagatcgtgccagtgcactccagcctgagagacagagtgagactccacctcaaaaaaaaaaaaaaaaaaaaaaaaaaagtttagattaaaccagaagctctctgtggcaaacattggtttctttttcagaggggaaattcaacttcaatactgctcagtggacatgagcgagagtagggagagggacatttgttattttctctcttaaagttgttgctggggtctttggttgagcctagttcaaactagcgaaagctcagtgagcagaaatagaagtgacactggtaagaggaactgtatcttcactttagagaaaggattcagaaagaaaagaaatgcttcctagaatttcagccaatacagatcagaaccatgtcctttctgaatgggggctgtgaagggaccagttgagtgcagttcacaatgactgtctatctggtgctctcagggaatttaaccatttgtttaggttcataatatattcatcgcattacatacccatgagaagtttgaatgatgaaaaggtctagccttactttggcttcctgccaacccagagaacattggttggtccaatctccttgttcctattcttaaaaagtaaactgatactaatggcacaatatatgttatttgggtgatgaataccctaaagaccctgactccatcactatgcaatctacgcatggaacaaaatggcactagtactcccataaatctatacaaataaaaaagtaaactgaggcacaatacagttttacagtgcttctgaaccagcaatgattcatgaaccagaagtggttggggagctccaccaagggaacacaagagaaggctttttcaggacagagacagaagtagagcaaagacagcgcttgactgtttacagttatacagctaccttatttggtctatctcattggaaagtccttagttatataagtttgttggctgcttctgattggttgtgtttacgttttctttaatataggcatttacaagatatagtgctcaagttattatgtttgcgtatgtcacttatgtttgcagatcaagcaaggtcgaggtcgcttatgagcccttgctggtttggtatgttcatggattcttctggcctggtctccattttaatgtactttaacaccatgaataaaggtttacttctgagactctaagagcccgtttaaattaaacctatgcatgatattgcctcaaatacccaacagctcactcataattggatattcattgctggcacaaatgttaagtattactgagcaattagttctctctatatttggccctcacagagtgtaattattgtattgttcagtactaatctgccttttcacatacatgcattgagaggagagtcttctgtttgccccacaatttcaattctctatatttgtggttagaaactgcggtgacacaatcctcatgtctaaattcattcattcgggagattgtaaagatggttccgtaaagcctcagtattgtaggtgctgataatgatgataatgaaaatgataaactttcccttataaatcttataatgaattgactagactgcctacagactatacactatctttgtctataggtaaaatggttgtaattggccgggcgcagtggctcacgcctgtaatcacagcactttgggaggccaaggtgggtggatcacgaggtaaggagatcgagaccatcctggctaacacggtgaaacctcgtctctaccaaaaatacaaaaaattagccgggcgtcgtggcacgtgcctgtagtcccagctagctactctggaggctgaggcaggagaattacttgaacccggtaggcggagcttgcagtgagctgagatcgcgccactgaattacagcctgggtgacagagcaagactctgtctcaggaaaaaaaagattaaaaaaaataaaaacggctgttttattaagaattgttattaggaacgggcagagaagaacagtgtctgtgtagttcagcatgtgagtggtaatttgctaattatatctggcttgtcactccggtctctgtaacttgctgtgttttgtcaagtgattcttccagaaattttgtgtatattatcttactaaactctcattaaagaggcccctcaaatggaagaagggaacttagagtttttagaatgtgaataaatttaagggactttggcttctagaattctgtagatctctgttttgctgggaatatacagcttcccattattctgagattggctgatctgtaatgctgtgaaatatcagtgtttactaaatttgttattttacatttatgggcatacatttttttttaattctctctctctctttttttgagacagggtctccctctgttacccaggctggagtgcagtggcgcactcatgactcaatgcaaacttgaatttgcctggactcaagtgatcctcccacctcagcctcccaagtagctgagactataggcatgcaccaacatgcccagctaatttttgtaatttttgtagagatggagttttaccacgttgcccaggttggtcttgaactcctaggctcaagcaatctcctaaagtgttgggattacaggcatgatccactgctcccagccttaattcttttaaaaaggggaaaaatgaggtttttcactattgctccaatcaccatcatagctaaataagttaatgcacatagttaagaaatgtacagtagagagaaaacaatctgtgttgtatttagaaactagcaagaattaaggactaataatatctgaatatgaactggtattaagcccaaactactgcatcaggagaccatcaataaaatttatttatcgagagccattcattagtcaaccaaagtcgtgggaaatttaatctgtataaggagtcataaggcataagggataggtatgaaggattgttgagatgatgtgttttatttcgctaataatgcatatgacaccattccaatttttttaaatttaaaacaacaatcatttatttgcttgcttctcaagcctgggtaatcgtgtttggcaatgagaccttgttgcatgcttgctaatatcccactggtcaaagctagtcaaatggccaagcctagagtcagcgtgggagaaggccacacaagggtttgaattctgaggacgagtctctttcattgaaggccaaagaaacagtctacctcagagggttgctggggagctataatgcaaagaataaacctcaccctgccttcaaggcgctcacagagaagaaatcttttgaatattagtgaagttttcctggacatcccaatggatagatgtgagggacagtcacgtactcaggacatctgtttgcttatggtgttatgttacagatgtcacaaatgaaaatcagagacatgtagccctgagcccagtaactataaagcggtctagctgaagctggagcccacaagagggcactttgcaccatgatgcacgcttgtttcttgccatcagctctgcaatgagttcaagctaatgccatgtcccagccgtccagttgttttatgacttgtgtgattgaagcatatggtggcttgtggcatgttcttaggcaaaccactcacctccctaggtttcgttttcctaatttctcaaacaagggagttagattaggtggtctatagttccttccaattgtgatatttcactatataacaatatagttataatagatcatagcacatctgtaatgaaaaaaagtgagttcatttcttaacaagtacatttacttaactagttggagtcattaaagcaaattaagaacgaaattcttagttaatctgaacttttctgggcatactgatctgttccctaacgcgtctgaccgtggaaaagtggatcagcaggagtgggactggctctcagctttgccatgtttggctctttctctgctgtgaaactcagtttcttcctggatcaagaggttaatttctgccggtgttattttacagtgttgcaaagagataaaagccagacgaaagaagggaaagtacttcagctttgattagggatttttttttctgtccctgtgaccatacactactcaattctgacagcttcgcatgagtctagcagaaaattgagggattcactgttattccttaacttgcagaggtccagacccgcccacatcaaatggtgaggtccccactttcaactttagctgttgctaaatctgtgaccctttcaatgaaatccaaggatctcagcttaaaaaaagttaaaataaaataaaaactaggtgtttttcagaggcggtttgaaacgcctctctgaggttgtcagagattgtttttgttttctccctttgcccttcttggaatgcaccaaacataaaagcattttttttcaagctttactttcactttcgagagtgccgtctatttgccacacacttccctgatgaaatgtctggatttggactaaagaaaaaaggaaaggctagcagtcatccaagtaagtgaaggtgttcatttcacgttcttactgggcagggtctctcttgctgagtagagtttgctagcagaatgcatgtggttttagccttctttggtctttctttgatctggtgcttgaaatctagtcagaattattcaggaaggaaagtggaagaaaagggatatgatatgggcatgggagaagggtataactcagaacacaagtaatagcaccaatatctagttaatgtgataatgtatttatgcagtatttaatttttttctctgtagcattctgtacctggaaaaaacacattagggaagctatggaaatcattttgcaacagtctttttagcaaatcacatctttgccttaaagaaacaaaactccaagaggttaaaagagcgtatccccttttgttagttttattggctggaggggagacaggagctggcattgtatgacaatgtcttagataggagagaacattcaggtatgcctaggagtaagtaaatggctttctttcacctaatgaaggataatggaagaagtggagaagtggaaagttgttaaggtgtatgggaagatcagaaactggtatcggcaattgtggggtactcgggtaaaaatggagttggcttcagcaagttgattcccaggtttacagatgattacgtgctggtatgtgtcttcatatgggcgtgcctgtgtatgaacctactacaaaggttgcaaagtttacaaatcaaactatggatagtggttaactccaggtagtctgcctccagaccccatgtcctaaccatcaggcaatattgtctctcacttggacaaagaatgtgaattccatgtgccctcacaaaatatttccaaaattctaaggctgagtgagtctctttttaattttttttcattttctttatttctgctagatctcattcaacagcaacgttttcttcac

SEQ ID NO: 10171 - DNA, 6000 bp, Homo sapiens
gtgtgtgtgtgttgatattattctaaaatttatagggaaatacaaagcacccaaaatagcaagatagtcttgatgaatttgaaaaacaagttaaataacttataccaagaaatatcaagacttataaaattattaattaaaattatctgttattggcacacaaatggacaaatagcagtagaacagaacagatcatatgcatgtgtgcaatcccctgatttatgacaaggtgacattccatgcattgattaaaagacggtcttttcattaaattgtattgaatccattgaatattcatatttttatttagaagggtgtcaaactccactaccacatacatacacaaatacattacagatgcaagttcttggatctaaattagaaagggaagattatgaagcttttagaaggttaatgtaagagagaatatctgttttagcttgtggtaggcaaagattttctaaacaagatgcataaaacattaactataatgaaaaagataaataactggacttcattaaactttaaaacattcttattcattcaaatacatcagcgatggtttgactgtgtgccccaaagttcatgtgttggaaactaatccccaatgcaacagtggtgagaggtgggaccattaagaggtgtttaggccatgagggctctgccctcacaaatggattaatgctactattgtgggagtgggttcctaattaaaggatgaattcagcccccttcttcttgctgtctctcgtttactcttgtgcctttcaccttctgccatgggatgatgcagcagaaggccctcatcaaatgtgactcctctttctcggacttcccagcctccagaaccgtaccagtctgtgatatttggttataggagcacaaagtgaactatgacaacatcattaagagggtgataaggcaaactacagagaggaagaaacttggcaatacatagctggcaaaggatttgtattcatatataatttattatgtaataattgctcattaattatttataattcctacaaatcactaaaaatccagacaactacaacgttcaacacggaaaatgatttaataggtgctctctgaaatagccaacaatcttctgaaatgatgctgactatcctaggtcactaggaaaattcatactaaactttcaacgctcagcctaggcaacatggcgaaaccctgtctctactaaaaatacaaaaattagcctggtgtggtggcatgcccccgtagtcccagctactcagacggctgaagcgggaggattgcttgagcctgggaagttgaggctgcagtgagctgagatcatgccactgcactacagtctgggtgagagagtgagatcctgtctcacataataaataaataaataaataaataaataaataaatactcaatgcagttttagtacaagacccaactgaatggctttgcaaaaaaaaaaaaaaaaaaaagacaataccaaacattggcaagtatatggagccactggaactatcagagattgctcatgagtgtgtaaattggtacaaatgtggaaaactggcaagaagtactaagtctaaatgtatgcatgccttatgacctagcaattccattcctgggcatatttacaggaaggagaaatatgtacatatgtgtatcaaaagacatctacaacaatgatcatacaaaattcttcacaacataggaaaactggaaacaactgaaacatccattggcagtaaaatgaataataaattataatatattccaacaatggaataataaacagctgtgaaaaataagggaaaatattacacatggcaatatagtcaatatagattgtcataaatcaggtgattgtacacatacatatgatctgttttattgctgttttccatttgtgtgccaattacatgattttaattaataatgttataagtcttgatatttcttggtataagttatctaacttgtttttcaaattcatctaaactcagggttgagtttaggaagccagatacgaaaaagtgcatgctgtatgatttcacgttgtatcgcatgatctgggttgtggttacatggaagtgatggtttgttcatgaaactggacgtttgagtgttgtatactttatttgatccttgtacttgtgattcaaaatttcataacaacttcctgctaccctttatgatttgatgtgtgtaagtagagtttgcagataatgtagttctatactgagctatgaatttatttttataatgtacattgttttgtattaagaatcattccaagtgacagaaaatttgcgaaatcaaagtattaacatttataaaacccttctgttgtttatactattctggccatgactttcaaaagcactgatttttagggggacagagtatcaaagaaagaccttggctaaagaaagctctttcaagtgggaagggcatcatagagaatggatcttgaggagtgaaagtcaggagatgccttcctactcagctgcatagctcatgaagctgacaacccgcagagttataaatgttgtgggtagattgccttcacactggccttgcaatcatctgctacactgagcaccattacatttcatggtggacattctaaggtgtgacactgtgtactctgctgtcaggaggctttccggggagaagggtcttgccaaggatttcttgcactcccagccacctgactggtttagtctgaaatttcagtattccagggtagtatgagaaaggccctatctggtaacaaagaaagcataagaaagatggctaagggaacaaagggacaaggcttttattttgttctttacccacagattgccttcaaaataaagataaagcgtctaagcctggcagtgcaggtctctttaagctggctccatacccacccacctcatcctgcacctgtcactgcgtgggaccctgtgctccaggcaggggcacctcactgccccctgagctcattttacccctcctggctctgcagcatttctgaccatttctgcccaggccgagactcactgctgcccagagcaatctcccttctctccttctggaggggaggggttgtatgttacccgcctggttttatccacagaggttagcagagactgatacagacaaaccctttttctttctaattttagattcaagagcacatgtgcaggtttgttaaatttgcctgacgctgaggtttgagtttctattgatcccctcacctgaatagggaacacagtacccaatacacagtttttcaaccattactccccttccttcctccccctattttagaatccccagtatgtagacaaattgtttacttttatagctgtaattaaccttattatagctcagcctcaaccctttagagaggaggaaactaaagcccatgagacttgcttaaagatactaagtgaacatatttattttttaaagtgttaaagtgattaaacaatgtagacgtgaatgaaataaaaagcgtaagttccccatcttcattcccactccatagagctgatcagtatttttacttgcagacattagtggagccgtagagaaagaaaccttttctccaaaagaaggcattactttacacactccgttctgcaacttgttttgttcacttgctatttcacgtcagcccatgcagatgacttaaaacaaattcaaatggagaaaagccttaggcatgtttttctctgcactaaagaggccctgcaggtggctgtggccaacttatgcagtggcttcgagtgaacgaacgtaattagtaattaagcaaagcgggcatccaggacattcagtttcatcttcctggcactttagtgtttaggaagggcctggcctctcggggagcgacactcctcgcccggccactttgtaagaagcatcgagcgtggaaaaggggctggggtcagcactggggccctctgccgggaagagagactggcggccagcacacgcgtctccccaggctgaaatggggcaccctctcgcggcccttccctcccttcccgggctgggtggcaggtcttggctcttctgcgagtaccccgcggctgcggtctcccggcacccgctgagcagcctcgcccgccttcctctcccacccgcccctgcgtgctctccggggctccggcttcctcggtctggtgcctggtgcgtattttggaaaatacctggctcataaccacctcattgagctcccagtgtcccagtgggccagcggacacacacgggtagctgacttccctaacgtgtccccaaagcctccctggattacagcgcccgctgctccatgtgaccccgcgggagccaggacgcgccccgcctcccggggctgcaagttgcgcagggagcgagcgatgcgcagcagagctgggctccgagccggatgcgccttcctttcctctccagagcaggctgcccgcccgcggaatcccgcacgtagagcaacctcgcagcaccctcagaacagccccgctggggcgcgccgggctgccgcggtgacctttccgacgcccctgaccccgcatccggaggcggccggaagtgtcgccggcctcctcccggcgcagcctccgggcctccagtgcaatcactacgccctggggcccggaaaccgttttccggtctttcgctttcggctggggcgtggaggccgcggtgctgcgtaggccgggccgggcgcaggaacagccccgtggcgccctctctggccgccgcccgggcgggaaacgtcgttccggggaccgggcgaccccgcagcggggagcgcgccaggtccgcgcggggaagtgggcggtgtgcggccggcaccgcctcgcaccacgcccccgcgggcccgcactttcccggagtgcaccccgcggccgccagccggggcgatggcggggctctggctggggctcgtgtggcagaagctgctgctgtggggcgcggcgagtgccctttccctggccggcgccagtctggtcctgagcctgctgcagagggtggcgagctacgcgcggaaatggcagcagatgcggcccatccccacggtggcccgcgcctacccactggtgggccacgcgctgctgatgaagccggacgggcgaggtaagggccggcgctcctcctggagcgcaacggggtccgcagccccgttcccaccctccgatcagccaggaacccgctgcttgtggcgctggccgcaggagagaggagcctgtcaccctgtggagaatgcactcccagttctagtcgttgccccttggcacccgccgacactgctagtgccccatcccaaagtgagcattttctttgtgtgtagcacaggatgcggtatttccaaacccctgccctcggtcttttcccacctcaccgctgctcagctctcaaagccctgccgtttcctcctgccttggcttgggaagccttaggaacagaagctccctgggagcacagagcggttttaaactggccaacaccttaacgcccagagccgccctcctctcgctgccactttggaaaataagagactagagattcactggacgcttcctcccggcatcacaagacttgactgctgcttcagttcccgcttgaccttcatactttagccctttaaaggatgttacataataacaattaagagacggcagggccttcaggcagacttctttggagggtgtcaaacgccttgtttattaaagagtgaattttttaattaaaatcatgttttaaaacagagatggacattttattgatggaaaaaaatcacgttaagttagaaagctctcaaaagtacctggtatttacaactccctgtcagggagggcgaactcgatctcagagttttattttcatcagggattacgttgaggtacccagaaatgagaagatttgcccaaaatggcatattttaaaattggcccagaccagaacccagtttcctctgggattatttgttagtaatcgttttacaggctgagcatt

SEQ ID NO: 10172 - DNA, 6000 bp, Homo sapiens
acctatacctctctggacacttgataatgacaaaaatgacgtaggtcaggagaagagcaatcagccgcctggtaaataatattaggaaaaatttatcaatgagtcaattgtcagtctattgtaaatctcacttctcaacctctcctgtcaatcacttttccagaatccacaattttgttggcctctcttctttgttgtctgtctctcctggtctttttcttattggtttaggttcttttccctttatttgttttgatgcagtttgtggagtgagcaaaagcaaaggcatgtatttgacttcacaatgtttaaatggaaataaattaatcaatgtctttttaaaaatgtcagtatctttttttaaagataacatatcttcacagcttctattttctttttctatttcttctattttctttttctatttcttctattttctttgaaattttgaagttatttcttgtattagtacaagtcaatctataacttcactaatctttgggcaaatgctaatgtttcagagggtgtgttgaacatctcataattcttttaatatttgttttcatgttaaagctgaaggcacagtattatttcattttggaaagtataaccagaaaatggatgtgagaaatacctctttgtgtatataggtagtgactagaacatgtaaattcagtattccctatttgagccatctgttctatttgagaattaatgggcctatttttattataatatctagtattgaaaatgtttcctgttcaaagtaatctttatcattttactggagagtttctcaagaaaaaaatatcttctccagcaccagcactccacttcctatgccttcactaatattcatttaatacagtggcttttcatttgcagttcagtgaaaacgtggtactgggggcagcaagatccgcagccttaaagggtgattgttgggaacctatccggggcccaggggcagggttgctatgacaactctgctgctctgccaaggctgttcctctctgtgggtggaaagaagctcccctgccagcaactacgtgggatcctggcagctggagagaatactgaaataatgcgctgcttccccagatgggagttctgagagtcttcttttaaaacgaataggcaactcgggctctgtggaagagtggggatagttaggatctagcccgttacaagtgcgaaatgtgtgtgatgaaatacttaaggtttcttcctttgaatagaagtttgacggatgatcaggtcttaagtcaaaagattttagcttaacttcacagtagtgcaagtttagaggaatttgtatttgccataaaggtaatatgattctgagagatttaaataatactgtttacatagagtaaaaagaccttacactcatttggaaatgcacgttatctcagagttgtcaatttgggttgacccaattttggaatttatctcgggcttttctttctaaatttgaaagccactactcagttgaatttatacttgatgctctgatgcagaactccagtatcccccttgcagctgtagagcatagtgtggaggctagaactggtccatttaaagtagagtggagaaaatgagaaataagtgaaaccgaccctgaattaatacttaaattaatcagaagtccccagaagtggttttggtgatcagtcatgagcttaccactttatctgctcctgagctatcctgattctgattttgtctttgctcagttattaactttaggctctaggatccagcaaaggcaattcccacctatgcattcagtgtttgaactcttcatatatgaacttattctaccttgaacagttttgtgaaacatgttcatctatctggttttcatacttctgattgtctgcagtagaaatctcccacaaccacatcaaatccttcgagaacagtgaaagacagaaatcacagatgaataggatttaaaatcatgaggctatgtggtatacttgccaaaaatagggatagctctacattgggctggcactaatttttttatgattattatttttaaataatcagtgaggtggaaattgtagaacatcaagagacagaatagttgaaagatttttctgctgccctgttaatctccacccaaaactgtgttcagtgacattcagacactacacacattgtttttagccatctgctggtgaaatctcttcctattacatgaaatttcaagctgttctaaccttttctacttccccacattgtgtgtgtgtggggtgggggggcgtgcacacgtgcacgtgtgtgtgtgtgtgtgagagaaagagagagatgtgtgttgggggaggaatgttcaagaaacaattttgcctgcacaaacaacagctactgaagtgggaaggtgttcagactcctttttttaacctcctctggggcagatgggatggactagaattgtcaagaaggccagttcagtgagcagcattaaaaatagcagactagctcaatctctcaatataaacttagttctcacaggaactttgcaattatcacatgcttcatatgttgctatatgcatctatgccttctagataaagtgcacacagatcttcctatgacttaagcacaataataatccattttaaaatcttgtttgtcatttgtttctgaagaaaaaggaaaagtcattatctgaggggcttcagcattacaaagacagatttgatcaaggattttcataaggaggaaatctttggaatgaggatatgtgtgtgtatctgaggggtggggtggctagaggtgggtacatatggaacctaggtcatccttgcaagtacccttagcctgtcagctctctcatctaaattctcctttatcagctgtggctggcacatagtgcctcaccagtatttgctcttgcaaaacatatatacttaagcatttctagttaatttcttagaagatatctagcaatagcctaggaaattgtgacctttattttgaatatttaccatcattttctgatgtctcagtttaaatgcttaaagctgtgttttaataagtaaaagtgatgagacttcaaaaaccaaaagtgaccatgatggccaaagaatttttgacaaccacatgacagcacagtaatagttcatatgaataatagttaaattaggctgggcgtggtggctcatgcttataatcccagcactttgggaggctagggtggatggatcacttgaggtcaaggtttgagatcagcctggccaacatggcaaaaccccgtctctactaaaaatacaaaaaatagccaggtgtggtgacgtgcgccagtagtcccagctactcgggaggctgaggcaggagaatcacttaaacccaggaggcagaggttgcagtgagccgagatcgcactactgtagtccagcctgggtgacagagtgagactccatcttccacccacccccaaaagtaataatagttaggttacatctaataatgacagataacatgtagtgagtagttactctatgtcaagcactatttttttatattaactcatttaatgctcatgagaaccatatgagagattatcttattgtcacatttttaaagacaataagctcaaaagaataaatttggcaaaaaccacacagggattggtgtgtccaatgtgctctcatttgctgtgccagtgtctttctcattttttcaaaccatgaatgatagcaagaagtagattttcattatgagtcaccactcaaatatcatataggagtactgaagtcaaaagagtcaaaaataatttcccttactacataacatgaattcagatattgtctcttccagtctctgtcacttttaatatttgctggtcaaagttcactgagttttgaggtcaagagttcgagaccagcctgaccaatatggtgaaaccctgtctctactaaaaatacaaaaaaattaatggggcacggaggtgtgtgcctgtagctctagctacttgggaggctaaggcaggagaatctcttgaactcgggaggcagagattgcagtgagccgagattgttccgctgcactccaacctgggcaacagagccagactctgtctcaataaaggaaagaaaacagttcactaggttaacttcacaacatactaacaggcttcaacttactgtctgaaaaattggttaatgggtacaaaaacacacttacgtaaaaagaataagttctagtattcgatagcatagtagggaaattatagttaaaaatagtctattgtatatttcaaaatagctagaagagaagaatcttaatgttccgacacaaagaaaacataaatattttaggcggtggatatcccaattaccccgattttatcctcatacattataaacatgtatccaaatatctcctggatccccaaaacttgtataactatgacacatcaataaaaatatctgttacaaaaaaagaaaaatgcagatacacagagtgcaaaagaataaataccattgaaataaaaccataagcatgtgacatttgggagcaataaattcaagatggaatgatatgcatgcatgtatggtgaagattaattattatagaaagtctgggttgggaaggaagggcttctctaggttttgcggtagatgaggaagacatcagtcatggcaaacattctcttatttgtggaggatgggtttataattaaggaatttgatcttagtatccttcaatgcactctaggacttcatttgtatggttgacctggtattgtcagtgcaaatatactttcccatagtgctgaagtttgaaaaaaaaaattaaattaggttaacaaaaatatgaatttctccctttgtgatcttctacagggtgttttgaatgctgtatcaaatgcctggggggcattccctatgcctctctgattgccaccatcctgctctatgcgggtgttgccctgttctgtggctgcggtcatgaagcgctttctggaactgtcaacattctgcaaacctactttgagatggcaagaactgctggagacacactggatgtttttaccatgtaagtcactctagtatttcttgttattttccatgtatatatttacacttctatgtgttaaatgattaggggcctacagttagatgaggtgataatatatatgaaacagcacttttagggtatacctgattcaaaagggtaatcatgattcatgattgccttcacagtcaatagaaggcacgtagcacaggatcagaggccgacttaatcaggacttaaccaatgctttaaatgtaaagttgtattcgaaatttggttaccattaagtggaattctgggacttcccttgctcttctcatttgaacagaggctgttctattagaatagtgccaggtacaaatctggcccttgctactaattttaggaaaatcagcaaagctccatgggtgctcccacctttaaaagaaataaactcagccctgggtatggtatcttactgttgctgttacatttacagaaatgatgtaaatattgtgcaaagttcttattgtcttctgtaaaagagtaaatcataagaaatcaagcaaccttttttttcaaacaccaattatacttttctctcataaaatgtaaaactcctaagatcactatgattatgttaaaataacttttttagaaaagtaacttaaacagtctgaaaattaaagtttgctgttgaaatttcagctccttattgcataatatagagaacaaaggtttgggattgaattctagaaacgtttattgctaaataagttactaattcagataatttattcagtgatttttatgcccatgaaaagaaaataatttattagtttgtttgtaatcccagctgataataaacttgtctcctgagcccttatagcttttgttatatttataacttcttgtgtttatttcatgctgtttgatacctgtgtttgtaatcttcttcatgttcctttattttgtcattctaaataaactcaa

SEQ ID NO: 10173 - DNA, 6000 bp, Homo sapiens
tcatgccattgcactccagccagggcaacaaaagcgagactccatctcaaaaaaaaaaaaaagaaaagaaaagaaaaatttatattcatctcagaattttacaagtttagctaaagccttaattttgagtcccatggttggtaagtatctccgtttttaaaaagaagtgttagttatatttccacaggacttgctaaaaggtggtctaggcaatgaaactgaagatgcgggatgaatgggaagaatattttggaaacagaaccttaggacttgatggacaattaggtgacaggaatgagaaagcagaaataccggataattagagtaaaaaaataatgtactaagtaagataatgaattaatttatatgtttattgaatcccatataaaattatgtaacttgttagatttcaggggagataatggcctctctatacctgagatctaggatactgacaccatttacatcatcactgtaagataaatgaattcaacatcaacattttgatctattcacttataataaggcaaaggaaagaaaacatcatgattttgattattaaaagccagtatatgatgatttgtatctttagtgtattctaaatttcatatattttactgggaatgttaaaaatatttatgaattaggccaggcatggtggctcacgcctgtaatcccagcactttgggaggccgaggtgggtgggtcatgaggtcaggagatcgagaccatcctggctaacacagtgaaaccccatctctactaaaaatacaaaaaaaaaaaaaattagccgggcgtggtggtgggcacctgtagtcccagctactcgggaggctgaggcaggagaatggcatgaacccgggaggtggagcttgcagtgagccgagatggcgccattgcactctagcctgggtgactgagccagactctgtctcaaaaaaaaaaaaaaaaaattatgaattatatttattgttggaagatatcaccatctttctcaagcatgtggcaaaccagttggatactgagaaacaatgtggttaactgactaagatcatgaactctggagtattttgtcctgggtatgaattttgcattcccatttattatgagaatttgggcaagtgtttaatctctttgtggattaattccctcatctgtaaagtggggataacagtattttccttttttagtgagaattatattagctaatatgaagcccttagtacaatgcctgacacttagcacactgtactcagtttatgttataattattattttgtatttcaggattatcatagaatccgatgggaaaaaaacaaaaaacagttctaatttttagaattcaaatattattttgaataagtcttcaggagatagattgtaagttgcttgtggtgatcctaaaactgagcttatgaatcaatctccaaaatctatcacttatctttttttttttttttgagacacggtctcactctgttgtccaggctgaagtgcagtggtgcagtcttggctcactgcagccttaacctcccaggataaagtgatccttccacctcagcctcccaagtagctgggactacaggcgtgcaccaccacaccaagctaattttttgtttatttttttggagagacgaggtctcactatgttgcccaggctgatctcaaactcctgagcttcagggatatacctgcctcaggctctgtaagtgccagaagtacaagtgtgagccagcaacttatatttattgaacaaatgtattagtgttatgctttgctacagtcacagttcatgttagtcaatttctagaagggtgatgcatttctgaatgatatgttgaacacttttaatttttgttgactacttcctttcccctcccataagaataactgtattcccatgtaactgaagtgcatttacacacccctgccaggagtatacctcttccattacgtgagaaagagctgtgcagatgtttatgtggcatttgaatgatatgctctgcatttatccatgcattctgctaaaaatattgttatttatttttcatatcaccttttccccattagatagcaatgttcctcaaggtaagtaatcatatccattttattttattcttccacttgctcacagcatagatatgtatacttttgggtgtgctttgcatgaaaaagctgtgtacaccttggggactgacttactgaaataacttctccagtatgactcttgaaagaactaggtcaataacccatagagttatataattttttttttttttttagcttgaggagaccttagagatcactttttccagatccttcattttacaaattaggaaatgagccaggattacaactcatcctctcaactgtcaagccctgtgctctttcagcctcatcaactgcctcttggattgaattgtttattttccaggtgatttctgcatattatgatgtgtgtgtgtgtgtatgtcagggtgtgtgcatgtgtgtttgagtgtatggtttttagaactttataaccttgtccaattacagaaacatattttatgtagaagaaagaggagatgacaaaggataaattaaagggagaattttctcttcctcttgtctttattaatgttattatcattaagaaacaaaatggtacacagaagacaagggaacataaaattatcatatgaaacctgtcttttggaataatctatttccagactccacttagagatcattatcttggctaccgagtcggttgtggggtgctgagacaacgtgtgtgtctgtaatgtgcattcaatgtatttaggagagagactttgcacgtgtctctaatgaaagtgaaagggggcagggtgggggcctctggggaggagacccacagtgaaggggaggaaaacgggcttctcgcagaggaggcaggtggaaagagggaggggtctgtgcgcccgcagagtcgccaggcgccctgcgagttgtctccgctgggaggggcgaggctgtcacttgccagggcgcgaggagcctcagcgcggcttggagaacttggccccgcgcagcgtctggtcactcgctctcctctggggactgcagagaagcaggacctcgggccatgggtgagtgcgcgggcgggcgcgtacacctcgcccaaaggctcggcctcgggaatgggcattatagaaagaaaatgaatgttcctcggcctcagactgcgtccttcccagctctgttccccccgcgcctggcgtcccccgccccccgccctcttgtctccggacttttttttctgggagagaggcgatggcgatggggtggcacctggaggcgagggagggtgcccgactgtttacagtgggtcgggagggtggggggctgcgcttgggcgctgatcctctgcgccggccccaggacccaagcctgggggtccggtctaccgtgctgggggcggtatttgggaaataaagaaagactaagagacccaggatccgaatagcgaggcgattacagggagatctctgtcctcccgagttcccacgttttcatgttctctttggggagcaagttgaaacggggcacgagaaatggaaacttcctaaaacttccactttgtacaggtttgagcagaggaaggtgctggtgcagggccagactggggacaatttctagtccctttccaaacgaagtgcccatttgcacaaaaggtttgaggttgaggctgaaggctgattcttcctaaattccacctgggtaaacagcgtgattaaaagggcgtccacactggctcgggtcactggacggtggagttcggcgcagttcagcttcgctcaagtttccaggcagggtccgcttattcggtgcttagcggaggcagcttggaatagctccaggaatgtgactgcgtgtggcggaggggaggaagaactgggtgtgaaatagccgattcacacccagcactaggacgcagggtcccacgagtcacctcgaagagcgagggagaagctggggaggagaaagcactcgccatccctggactggcgtatccacaggcgcaggggagatgctgctcttccgcggttgccgactgcgttcagcccgcagcccgagttactcttccaaccccagcccgctcacttcttccagccaagtccactgggcgcccctcccccttgcttctcccttgtcctttgttgtgagggatttctccaagagtaaaggaggccttggggactgacgtgctcgggttgaaattcctgtattcccacaggctcaagggttaggggatgctttgactactaatttctggagtttatagacagtagccaacttggaagaaaggaaaaaagagaaagctgaggacatttttgcctatgaatgttagctgtgatcaagactttcatagtctcttcttgcttgacccctggaagtgtcttagaaggacccatttttagggcctttgtataaacagtgttggaaatggtcttaagaaggactgtctttaaatgttttctgaaaaggaaggagtattttcaggttaaaaaagaaagataaaacattttcccaagtgtggcagagagtatttcaggctcttttttttatttggttgttaagtgttgtgttccattggaaagacaggtccggaatattttaaatttttctcctaaacccaacacttgctgttctacttgaccacttgagcctataaactcttgtttctatgctcacacaggagaaaagctgtcagaaatggaaagtcaaaataattgacttgatgtagtctattcattagctgtattaaaagcattaaaatgccatttggatccaacataataaaatgtctagaaagaattacataatttacccttgtaacctcaagctcgagaggactggctatcaaaggtaaggtattcataatttcaaacttaattatttttaatttccatttccttactatagtgaaaacaatttgtcctggattttgcttcaatgcccatggataattaacaatcatccctaattataggaagattttgttgtgggggatggtgtggagttaacagctgagttgtcaggatccaaagcttggtctgtaactcttagaagttctctttcctgtctgtaatctgacagatacctaaaatttgtttgttccttctactgccagaagtggataacatttttcctgttgtaattgaggtcaccaaaaacttacgtagtcaggggcctagtaggacagattaaaaatattcctgaactctctttagatggaagtagaggaagcaagtgaggaagccagaggtgagcgaaatagagaaaagagcaggcctgtagcaggggagagtgacagcatgaagccagaactcaggacagagattcaagtatgcagtccagagactaggaagagccaataagaggggcaaagtggggaaagcaggaaggaagtgcataggggaaatagaaaacatttggccacttaaggccatatctctcctctttcttttaatttacttatgaaaaataaaacttcactactcagaacctcttctatttagtggtagtagggatggtagggagtttagcattagagtccaaatggctaggataagagggaaaaacagcgtaggagaatgctggattgcgccaacaaatggaatccagtttttttgttttgttttgtttttgtttttttcctggtatcatgaaaaccaaaatttatcacttaaagaaaggaagatagtgttctggggatgaatgtagcaatcaattctcatttgtcttagaagaagaaatctgaactctagcactgtggaagaatgagagtaattggttaatcaaacattctgaataatttatagtccttcatatccataatgcacaaggctgattgtaaaaaaaaaaaaaagttatttgcaaagtaggcaaattgcaattttggcatctcttccttttattgtttgatttcctcattgatgtcctcggcttctctaggtatgcagcagggctatc

SEQ ID NO: 10174 - DNA, 6000 bp, Homo sapiens
tttttttgagacagagtctcgcgctgtcaccaagctggaatgcagtggcgtgatctctgcccactgcaatctccacctcccgggttcaagcagttatctgcctcagcctcccaagtagctgggattacaggcgcgcacaccacacccagctaattttttttttttttttttttttttgagaccgagttttgttcttgtcacctaggctagagtgcagtggtgcaatctcggctcactgcaacctctgcctcccgggttcaagcgattctcctgcctcagcctccctagtagctgggattagagacgccgccaccacacccagctaatttttgcatttttagtacaaaagtacaaaattttcaccacattagccaggctcatctcaaactcctgacctcagatgatccacctacctcggcctcccaaagtgctgggattacaggtgtgagccactgcgcctagctgctcccgttattttctttagtgagttctccagcagttgttcctccctggggaccagttcccccaaacctcgtcagtctggaccttccttctagatgagctgaaccattttacttctaaaacagtctttttgggattgtatctgaagtgtcattaaaccagttgggaaggaatattacttttttttttttttttgagacaggatctcattctgttcattgcccaggctagagtgcagtggtgcaatcatggctcactgcagctttgatctcccaggctcaagccattctcccaccttagcctcctgagtagctgggactacaggcattaccaacatgccttgctaaatttttttctttttggtattttttgtagagacaggttctcactatgttgtccaggctgctcttgaactcctggactcaagcagtcctcctgcctttggcctcccaaagtgctgggattacaggtgtgagccactgcacccggcctgttttctttgtataggccacatgcattgcattttagataattcccagatgtttattattttcattaattcttttcattatcttttctaagtgatcattgctgtcccgtaagttgctaagttgtacaattttcttgtatctggcccctttcctgttatttgttcagctcttgtagcagcccaggtttagtttatggctgtgatcttagtacatagtaatcatctgcctcttctttcccagggcttctgcttctgaggtggtttcatttcttagctcagtagccagatctgtgtcagaacagctgtagtcagtcatgcggtatcacaatagcagaaaatacaggatctagtgtttgtgacatatgatgttagcttttgggtttaagtaatctttgttctgtctgttactctttttattaggaatggatgttgaatttgtcaagcaactttttagcatttaaatttcatactaaaacataaatgctggccgggcacggtggctcacacctgtaatcccaacacttttggaggctgagtcgggaagatcacgaggtcaagagttcaagaccagcctagccaacatggtgaaaccccatctctaataaaaatacaaaaatcagctgggcatggtggtatgttcttgtaatcccagctactcaggaggctgaggcaggagaattgcttgaaccgggacccgggaggtggcagttgcagtgagccaagatggcgccactgtactccagcctgggctaacaacaaaacataaaagctgtactttattcacgtaactttttttaaagttcccaattttgaacatctacttaaaaatttaaacaatgaggactgtacagctgttttgatggacttgtctacttatcaagaattatggatgaggccgggcgcagtggctcacgtctctaatcccagcactttggaaagttgaggtgggcagatcacttgaggccagaagttcaagaccagcctggccaacatggtgaaaccccatctctactaaaaatacaaaaataactgggtgtgatggtgcgcgcctgtagtcccaggtacttgggaggctgaggcaggagaatcccttgaacccaggaggtggaggttgccgtgagccaggatcacaccgctgcactccagcctgggcaactgagggagagtctgtctcaaaaaaaataataatataataattatggatgaggcaaggtgcagcggctcatgcctgtaatctcatgcctgtaatccgaggcgggcagatcacttgaggttaggagttcaagaccagcctggccaacatggcgaaacttcatctctactaaaaatacaaaaattacctgggcgtggtggcacatgcctataatcccagctacttggtggctgaggcaggagaacttcgtgaacctggaaggtggaggttgcagtgagcccagattgtgccactgcactccagcctggatgacagagcaaaactgtgtctcgaaaaaaaaaaaaaagaaaaaaaaaagaaaaaagaattatggatggtggtaatgtttcagcagccaaaaaattttactttttatttggtcacacaatataaacacctttgcatttttagtacaaaaatacaaagttttcaccacattggccaggctcatctcgaactcctgacctcaggtgatccacctacctcggcctcccaaagtgctgggattacaggtgtgagccttgtagtcaccagataagtagctataaatggtaaccatttacattagtttttgtaaacagttattttacagatgcaggtaatcctcagatgaaatggcccagatctctgagggtgagtaggtggatcatttttttcggggggtgcgggggacagagtctcactctatcgcccaggctggggtgtagtggcacaatctcagctcactgcaacctccgcctcccaagttcaagcaattctcctgcctcagcctcccgagtagctgagatgataggcgtgtgccaccatgcccagctaatttttgtacttttagtaaagacggggtttcaccatattggccaggctggtctcaaactcctgacctcgtgatctgcccgcctcggcctctcaaagtgctaggattacaggcgtgagccactgtgcctggcctttttttttttttttttttttttctgtagagacagggtctcactatgttgcccaggctgggttcgaactcctggacttgagcagcgctcctgccttggcctcgtgcagtgctgggattacaggtgtgagccatggtgcccagctgatagagcatttttttttttaagacagtctcactctgtcacctaggctggagtgcagtggcacaatctcggctcactgtagcctctgcctccctgcagcctccacctcccggcttcaagcagttctcacgcctcagccctccaagtaactgagattacaggtgtgtgccaccacgcctgctaatttttgtagttttagtagagacagggtttcactatgttggccaagctggtcttgaactcccagcctcaagtgatccacccacgttggcctcccaaagctctgggattacagatgtgagccactgcgccctgctggagtattttcgatccaagagaacatcgtggacattatgtagcagcttccagccttctttctcatagaaacaaaggcagagaagcagcacccagactttgggtaagcaaactgtaagacagcagttgtgagacccagcaaacttgaatctcactcagtggggaaacctcagctgatgtgaggctatttttatttctaaatctgtacttagcgtgaatgctgatgggatttgccgggggatgttactgtggtgaggaccaggcccctgcaggtgtgcccaactctggatggctccctgccttcactgagtccatcgtgtgcttctctgcctggtctgtttttccgagtcttcgtctttgcctgtcgacaccccgtgactgctggcatcatgccttcttgtggaagccaccatcgtccttgctaactgagggttgtggagttgtgtaattcagcttgatgcagggaggaggtgtattcccatgtgtgggcactgtcatcacccacacagggaggtgagcccacctcacagaaggaacacagcctggccagggggcagtctgagcctgcgtgggctctgctgcattctgtgtggctcggctctcggcacgccttgactcaagactgcatggattcaggggccccttcctggctcagaggtgaccccagagctgaggagaacctagagacatggtggctggggctgggccagcgcctggagagagtctgaagctgccctcacagggattggggaggtgaccgaggtggggtgcctgtcccccttcccacccctcccaggcctcattggtgtccaccaggcaccttccacgtgtctatttcccgtattcttgagaacctctccgtgaggttagtgttgggtttgcatgtctgtaattgagggaagattttgagcctgggagagtttttgggggaggtccccagaccattactggtgcagagtggagcccctgctgctctggcttctgatcctggtgtgtgctcgctctaagctgccctgggctgacagtgccctgcaccagccgcactgccctctctgggctgcaagccgaggatccccatctgagaaacaagcagcgggtccagagagttccccgcctggcttccagccctgattggtggcttctccgaggctgcaaggcggtggtaatcacgagagccacgtcgttggtgggtgttcccatgttgcaggtaccgtcctggtacttagtatctgttaacacacaaattcacgaggaatgctcccaaagcacagagaggttaaattactcagtctaaggtcacgcagcagtaagtaatggagctggaatttgagctctaacagtctgctccggagctcgggccttgctgctggcgtcaggccatgcacagagagctgatggaagcaggaggagctgatgtgaagttatgcgacacacatggccttttaggtgagctcgggccacccggggggatttgtgtccaatcagcaggggagtttctagtgtgccaggcaagacacgcaggagatcgtgaggctgaatgggcctcgcgcaggtcagctgtttgaattttggactgtaaatggtggtgtggcaccacgctgcggtcagatgatggtctctgtgttgcacacaaaccataggttctgggccaggcatggtctatgctgcagaagcttaggctgcagtggcctcctcaaggcctttctgtgggtggatatggcacaggcggcaactggggccgatgcagcgtggaccgagatgggtctgggttagtgccagcctcccactgctgcctgtgaggcctcgagcctgctctctggccctcggtggcctacattccagttgggagaaagcaaatgtggtgcacacagtgtgcacctggtctctaagacggccagatgtcagcagggcacccgctaggaggcagcactgtggatgagaggcaagagcggtggagtggtcagggaggtctgagtgaagcaagggcatgagctagggatgtccaggcgggggggcaggtgtgaggctctgggcttggagcctgctggtgccggacagagtgggcaggtgggtagaggaggaggagatgggccttggcccttattctttggattttgttgttttgctctggtgcctgcgggcagctagtgtagaggtctgaggtcagcgagcacccttactgatttgcaggacttgttcaagagccacggatctttccagaaagtcacttgttggaggagaggacctccaaagtcaacaaagtctctgctctgcactccattcccccacgaagtgccaaagcaatgcaccctacctccccaagtctctgggagtgggcctgggagacccacccagggatccagcctttgctgattgtgtttgtgtctgacttgcctgcctttctgtggggatcgcccgcccatgctcctgtccgacgtggtgtggggctg

SEQ ID NO: 10175 - DNA, 6000 bp, Homo sapiens
ccagctaatttttgtatttttagtagaggcagggtttcaccatattggccaggctggtctcgaactcctgacctcagttgaacagctcgccttggcctcccaaagtgctggggtgacaggcatgagccacagtgcccagcctgggcattatcttttgcaggcagccaggagtcactggaggtgtttaatcaggagaatcatattgtctgacatacattttataaataaaaactagagggaggagacaggaggaaaagaatctcattagaaagaaggttgtcgcaaggatcacatcaaactgtaacaaaatcctattagtcctactttgagccacagacccctccatggctgccaccctggtctgagccaccatcaccctcaactgactagctgtgcaaacccagatggcttggttaatcccggtaagcctcagctgactcagctagcaaatgggatactaaccaccacctcaccaggtagcagatacttaaggctctagctttggggttcaaaccaactagggttgaaattcagtcccactgtttactcatcgtggcaccctggacaaacacccttgcagagcatcccctgcctcactgtaaagtggggataatggcagttcctccacctcatgggctggaggataaagaaccagatgtctataaacattgcacaggacacccagccaagtctctgtgtgttacttccctttctctctccatgcaacaagccagcatctcttagtgtctcttaatcaccagcaggatctgacaacccccaactcacctacgagcatcttgcattatctcagtttcagccctcatcagctctttgcggtgtaatgctccccatgagtcaccaaattcccctatattctgaaagagcctgtgcctacatggaaaccgcacaagatctgtctcatcttcccacgggccagaaatgggggtagcaagaccacgccatcttgtttctgatcgcgcagactttactctcctcccaccccaaagaggcagaagttgcaaggacctaaaatagtggccataccactattcatggaatgcctgctatatgccaggtgttgccatgcacagccaattccatgagggccacttgcataggaagcatccactggtctccttcaggcagccaccccgaccctcatccatgaagaacacagtggctttggggttagacacttctgtcactttagtaagttgcttaacctctctgtgcctcagtttcctcatctgcaaagcagagacaaactgttgtggagattcattgagatcatttagggagagggtctagttcagtgcctggtacacagcacttaataaacgctagcattgccagcgtcccatcgcagactccccatgcggtgtcataaccgatagtttacttgcaaacttgcaattcgtccttctccttgaggttcacagcctcaaggcagggtctctcccgctcatgaatgtcgtccctaggccagtgactggctgtagaaggtgcctgaaaacttttactgtggggtgaatgaaaaaatgaatgccaatgtggcagctgggactcaggccaggcgacgtaacccacaccgcaaggatggaagaggcagaagcaggaataggcattcaggcgtgggagccccagccgtccttctgtccaccatggcgagcagggccagcgtcctgtccaaacccttggtgctgcagatgaggagaccgaggcgtggcgcagttgggctgctgtcaaggatcacccaacggagtgggatgtaacaggcaccgcaggggaccccaggccaatgccctttagtcacgccgccacctccctcctggagcagaaggggaacccgacgcctaagcggttgcgtgcgaagttcccaaccaggctcaaggagtcgcagagccggggctccgggcccgcaggacccagaagccacgcgccccgcgctccccgccccgccgctgtctgctcggccgacccacctggtgtcgcgtgcgctggcggcccgcgcggcagccaagccaaaggccgaggccgaggccgagcgcggcgcccagcagcacggcgggggccagcagggcgggcgccggccgcagcgcgtcccgccccagcagcagccgcgcgtcgctcttgcaggccgccccgccgcgggccatccggggcgctcaggctgccgccccgccgcatcccgccgcctgctgcaccgtccccgccagggcggcgacgcgggacttggagcccgggcgggccaggggcgcggcccgctccgcagactttctggcctgtgcagtctcccgactcctgcttctctccccttccctgcttcgccgagccggagggaggagcctggatcaccgctcaaaactttcagccacccccgccccagccctgcccctgcactgagcatgcccagagacagacgcgcctcccagccccggacccttccggaggggggcccggtttccacccctttaactttactgaggcttagaaggctcctttaagttttttgaggcttagaatatgctacgcatttagcttaatgatctcattaactttctcaataaccctctgcggtgggtgctccgcccatcctcctgatgaagacgctgggatcaatgcaattccaaccccctgcccttgcccctaacctctacccatcaaccttcccgggaacacaccgccctccacgcctctgaacttgctcacgcgaagactcctgttttaatcttattttgtcccagggaaggtcgagacaatgggtggagacaccgttacactcagtctccactaggaggatgggtaaagggatccttacacccagaccccactgagacgatgggtagagagacccttacacctagtccccactaggaccaagggtagagagacccttacacccactccccactgagacaatggataaagagacccttacacccgctccccactaggaccaggacactgcaccatccttcatttactcagcacttggagagaatctgttgtgtgtgtgttgcaggctgggggataggccagccacaaaccaggcagtgtccaggctagtgagtatctcacagttgtttagagtgataaaaaattaaaggagttcatcactgtgtttgctttaaacaaacatttatggggtagctactagatgtttgcttttgtcctgggtgcctgggtaaagcacacatgcacatgcacgactgcacacttgcactcaggggcacacacacacacacacctaccctgtggagcttaattccctgtgtgggccgggctaggggacaccatggggatctgcttcagcagaggagggctttgtcctttcagcctagatgtccagcttgtttctagtttgtttcatcatttcctcatggcaagatgggaactgttatccaaattcttcatctttttttaataaatgaagaaactgacagctggagaggagaggtgactcatttgcaattaaggagtggggcagaattcttgtctcatttacacctgtgtctggcttcagggcaaactctctgctatgtggagcttcttatatattaccttagaagcatctccaaggttcctggggacatgtatgggggcaataacttgacgctcttgttttacatttccatgaatgcttaggctttagtttttaaaatgtggtgtttgggccaggtgtggttgctcacgcctgtaatcccagcactttgggaggctcaagtggaggattgtctgagcccaggagtttaagaccagtcttggcaacatagtgagaccctgactccataaaaaatactaaggagattttttaaatgtagggttatttgctttttactttatcataaagttgttgactattaaattaacctttaaatgactgactgtcaaacaactccaacggtccagcaacatgcttggcatttagcctgtggtcttgtcacatgcctgacagctgccacgtaccccctggtgtggggaacttggcttataaattctcagcttctcgaaccccatggccttgtccatgttaggtcaggaaaggcctgtccttggatggtctgggttatggggagagaggctgccaggggccaggctcgctggcctgagactttatagacagcctaacagcctgccccgcaggaaggctggcgggagtggagccctcccccgtcaacaggtgtcagctgtcacccaggacctaggcagggatgaggaagcacacaaaaggctccaccagtccccctttttgtgtctttctcctcctcctcctcctgcgtcccttggcaaagcaaatccctgtcccctcggagagttcagggagagcttgcttagggctgcgacttcagacaccagctcccctctttctaggtccccagagaggtggcccagcggctggcctgtttcccactgggaatgcgaggggcacccgggccggcccagggctgacccacagcaggctcgggcagtgggtgctcagctggtctgcactgaacgcaaccggaagtgagggtccttttccttctctgcggccaccccctcctccccgagctttcctgaaccttctgggtgctccaggactcccggccccgcgctccaaatgcttctccgttttctaagcggggatggggaaactctggattcacatccgtgtgtcaggaaaccgttcccaggggaagtgcgtctgagctgaggcttacagacccaggtaggcggtagcggaggggcccttggggtcctggtaacctcggggagcaggggagtgacccgctctgattcggtttgggcgcaagcaaacccaggcctggccgccgggcgcctgggccgcgccaactcgctctccccctcccacgcccgtccggcacctcctggcccgccaagccccagatgcgggtgtttgttccagaaaactttcggcggcggctcgcactgagcatgctcggcggcggggcgggcctggggtccggaagctccagcgactcggcggcacccgccgctttgaggtagcgggtcccgacaggcgatggacccctcgggctcccgggggcgccccacgtgggtgctggccgggggtctcctggcagtggccctggcgctggggggccgaggctgtctcggcgccagctcacgtccccgctggcgccccctcggcgcgcagccaccccgggatccccaggtggctcctaggtctgggcccggcctgaggatccctccggggcggagcggggcggggcccgagagcagcacgcaggtaaggagggcccgaccccaggctccggtctgactgtagtggtttgactttgtctacaccggcggtggcagggaggacccttagtatttcgcaaagaatgaggaagggagggcaggatctgaatagggtgcttcgcggcccttaggtgtatcccgctcacggccagaaagcttcgagggaaactggagaccttcctcggggtgtggcagctgccggcttggacttcaccagcgaccctggttcgaatcctgctctccattttacgagcttcgacctagggcagttcactcctgtgccccagtttcctgatcgttgaaacggggccgtcgcggcgtccaccccagagggtggaagtgggttagatgagctcacatatgcagagccccttgcagaggccagcactgggaaattgcagcggtttttaaaagtgggggctcttggctggactcttaggtgactgaactctcctggctgatggatttagccacttcctacttcaccctggccctccctctgtggtcctaaactcgaaaggcatggatccctggctgtagccctagacttgacctcccccgacaaagctggtcaccagtcctagtgccttttcctccaaatcagctcggatgtctgcccctcctcactccccactgccactccctggcttcaggtcccaccacttcacttccagcccttggtgatggttttcccacgtctcccatccattttcccccagacctctggggtggtct

SEQ ID NO: 10176 - DNA, 6000 bp, Homo sapiens
gattgactctcgtggtgccagacaccttgccgggcgccctgcgtcggggccagcggcctcgctggcctgcgtcagtgcgctgcggcctcgcctcccagcccctcggtccttcgctccatcccccctgctgtgggctcctgagcatccggcctgggcagcccagatagaggccgcttacgaggctggcgcttcttttcgccttagaagcatcccgctcccacacaccccagctcgccggtctcctgaaggctgggccagcctcggctctccgccagcctctgcccggctctctgagctccagcgatactgtatctaaccgccagccctcctccgccgcccgccccatctgcgcacactcgcaggcacactgtccttggcctttgccagtgctgtgctctctccgcgaacgccctaacttcagctggccagctccttgtagtcagggagatccccttgcccctcctgagctttcctggaacgtggcgctgtcccaggatgctgttaccatctgatggcctctgccttccagagcagaggaggaggtggggaggagggcaggggcagcctcagcccctctcccagggctccacccacagtgaatgttgggcatagcagggccatcccccctaagtcagagtaacccgctggtgtggagggcgaggccatgggaggagctggcccttcctgtagcaccctgggctggtgggtggtggctccactagctgggatgggcaaggaggagggacacattcggggatagagtgggggaattagaatcctttcctagcagggcatttccaccctcctggagacctgcagctctgcagagactgatgttgtagcgcacagtggaggcttgtggcttgttgcaagatttttgttgctgttgaggtgtgtaccggtctgtaatgctgaacatctctgctctggagtctggggtaattcttatctgtagtctttttgcagtaagcagctcccaaaggctcacagtgtggacccaatgcatgagatgactggcattttcctccttcacaaaccacccatgactcccaccgcccccacgacctcaccagttcctcacatcctggcttccccagcccatctctcccctctccctgccacaatgtctcagccacgcctgctgcctctgtgttgcgtagacatgtcttcacacttgggtttttcccccacatgcttctttttccccccgtctaaaacaatgctcccctcccttgagtatgtggagaacgattcatgattaagcccagctctcaggttccatcagtgtgattttcccagactctgccggaaagattgtgtgcttctctcatttgtgttctcagaactttttatacacatacagtgtgatatttgtttgtgtagtttttccttaagcagatcttgcccactagagactggggacacgggacacagtgaggtggcctgagagatggtcccactttggtgggggctctgttttcctggggaggtgaccacacagacactgcccgtgctgtcagagagtcatgtgcagggagagatggggacaggcggcccggccaggaaggctgcacgaggaagtggcaggaccgtggccccactctcttggtgtgtaagggtggattgggctgtgggacaagtggcagagggaacaatttctaatgcttaagccagcagcaattgccactgcaggctatggctatctgtttaactcctcgagggtgggaccttgtgtctcttcaggctctgagccagactgccagggttcccattcaggccctgcctcacttagctgtgactgggcaagtgcctccctgctgggctttctaactaaatgggggcttcccttggggagtctgaggatgactgcagtgtgtcccagttctgctgggtcactcctctccccatagtggcgacgggatcaacctgcagggcttctgaagttggacttgcctgtagtttatcccttgtcattgtgtgatcttgggtaagaagattaacctctctgagcctccatttcctgtataaaagggggcagtggcatctctttggctaggttggtgtggggatcagaggtgtggtctctgagcaaaggtagccgatttatgaggggtgatgatggtgaagaagctatgagaatatttattcatttagccttgtcacagagcaaactcccacgcccacatttggggtccttctttagctaacgatgaaactaatgatcagagcagtggccaccattgtggtgggctgagaggtatgagggaccaggctaggtcagtggaactgtgttgaggaccagctcccaccctactgacagtgtgacgttgggcaagtcgcttagcccctgtactcacttcttttgtctggataaggggaatgagggccacgtaaggaaatatcagcacttaacctcccgcttctgcctcgggttatctcatctttgctgcacgggcaccacacagggtgaggtctacgtgaacaccgcagagggagccaagtctcaggacactgggggactcagaagtggggctccctgactccgggcctcagatgttgccccacggagcacactgacccttgtaacggaaaatgaccttccaacagggatggcatgagaataaatcagaaagccttcttggtgcttttgttttttttttttttttgacagagtttctttcttgttgcccaggctggagtgcaatggcacaattttggctcactgcaacatccgcctcctgggttcaagtgattctcctgcctcagcctcccaagtagctgggattacaggcacctgccaccatgcctggctaatttttttgtatttttagtagagacagggtttcaccatgttaaccaggctggtctcaaactcctgacctcacctcaggtgatttgcccgcctcggcctcccaacgtgctgggagtacaggcgtgagccaccgcacctggccccttcttggtgcttttaatggaagcacgtcaccgtcatgtccgtagtggccattggtgttgctgtaagtggaggctcagacagtgaccccagggctggccactggtgggaccacagcatcctgactctagccctggatgccttcagaaagtattttctttgctcattcttttctgaggccaggtggactgtgcagggggctgtggatcagcagggaggggcagggacagggaaggagctgtgggggcctcatgctgtgaagggctgggttaggaagccctgtaggaggtgggacgcaggagcgcttgcagggagtggccacagtcactattagatgcaaaaataatcacggtttttgccattacttttgcaccaacctcatactggaaagtagaggagaaagggcccgtggtgaaagcacctagaggcagttcagagtgtgggaggggcagctccccagtggggccgggggcatccctcctgcctttgatgttagtattggttttcagaactgcaacccgaagtgttatgcctttcataagtctgtagaggtgaatggacagaaaggctgtttttcttcattataacagttaacatgtgtgaatggcacttagcaagtgccaggatctatgccaggggcttttgtaaataaagttttattagaacacagccacgcccatttgtgtatgtatggtctgtggctgcatttgtgccagactggcagaactgagcagctgggggagacatctgggaagccaaagacatttactccctggccttttccaggaggagtttgcctcccgctggtctgtgctgtccctggtctgactgaacccattcagtcccagagggaggcgcacacctgcatttctattttatagatgcgcatagaggggctctgaagctcgccagggattataaagcgagtatgttccagagcagggatttgaagccaagaagcccatgttcttttgtgggggaggggacaggagcagggagatttatatttttattagcttctaatttaattttaccatgttaagagaatgtgtgtgatatctattttcaaaaatttgttgacaattccttgatggcctagcacctgatcattttttaaaatattttttcatcatggttaatgtactaaatatattaaaatatttaatcatggttaatatattaaccatttctaagtgtgcaattcagtggcatgaagtacatccacactgttgagcaacgagcgctaccatccacctctagaactctctatcatcctcacctgcagcccacattcttcactgatgccatgtgctgtcttgtgggagttttgtggaataaaacaaatgttagtggcatcacaatttagcagagaaggctttgacatcagacttatgtttgagcaccggctctgccatttaccggctattcttgtcccattgtctgcagccccctgaaccctctgcaactcaggttcctcatttgggaaatggggatcaccccagtctggtccctgcacatccctcggttgtgaggatgagactaaagaacggaggtgaaaggcctagtctaggatcacgccgtggacagcagctgcagtggcgggtccctttgttgggcaccaccgcccacttgtgttaggtcagcctgttcccctctgtgtggtctgaggtggcccctttatcctttccagggcttgcaagcatcctcaggacccactgcacatcctaaaactcccaactggcctgggaggacctgggtacaggctgcctgctctcctgtctcccaccgtggcttagactggctgaagggccactttaaggaatgaaaggggttctgtgtgcaccagccagggactgccagtgggtgctcattgtggcagaaatacccttatgcctgccaggtcagagggaggcgctggctcggtgtgctggcctctgagcttctcccttggctgcattttgagtcaggagcctggactgacccgggtccctccacagcactggagggggtgggacacatcactacagggtttccttccatgaggactctgaggagttgacagtggaggcaaggagtgagctggtaagtagctttccactatcttttacccttggagcttctgtctcctgtcttctctcaccctatcctgttgcatctggtggctggtcacccctctctgcttgttctgacatgggactgtattgaatgagatcacaacctgtgtcttccattgaagcaattctttttccccttctttttcttaaaaaaattgaggtgaaattcatttactgtaaaccgttttcaatggtacaattcggtggcatttactgcattcacgatgttgtgcaactgtcacctcaatctagctgcaaaacattttcctccctccggaacaaaccctgtgcccatgggcagtcattcctcacttcccctctcccagccccggcatccatccatctgccctctgtctccttggatttgcctgttctggatatttcacagatgtagaaccagatcgtatgtggctggcttcttccacttagcctgatattttcagggttcacccatgttatagcaagtgtcatcaagtgtcattgcttccttcttcttcatggcggagtagtattccatggtgcgtatacaacacaatggtctattcatctgtggatggacattggggtcgttctcacctttgcggctggtgttggaagcagtgctcagggtgttaacattttcttcccagggctttggctgctcaggtcctattctgcaggctcttccaccctctcctcccctgctcactaatgcatcagttcagcctcccatgatcagcatcgtgctgggggctcccagccttgacttgtccttgaaacctgcagaatggttgtcggctcctcattttccaagcaagagcatgggagcaccccgaggcaggagggacgatgcgggagccagccgagtgccccagagaggcagctggcacagcgcagggagccctggctgcctttctttcggttgcagaaacatgctggattcttgctgctcag

SEQ ID NO: 10177 - DNA, 6000 bp, Homo sapiens
tagaacccaggaggcggagcctgcagtgagccgtgatcacgccactgaactccagcctgggcaacagagcgagactccgtctcaaaaaaaaataaataaataaaataaataaataaataaataaatacaaaataaataaaataaaaaataaaataaactttcttaaccacttttatgtgtacagttcagtagtgttgagtatattcacattattgtgcaacagatctttataatgttttcatcttgcaaccatgaaactatatccactagacgctacttccccttctctcttccctctggctgttgttaaccacccttctgctttctgtttccataattttgactatgttagatactatagagttaaaatagatccctacagtatctgttcttctgcagatggctttttgtgtttagcataatgtctttgaaattgttgcatgttgtagcatgtgacaggattttcttctttttaaggctgcatagtagtctatgttatgtatatactatattttctttatccattcatctgttgatgggaatctaggttgcttccacctgttggctattgtgaataatgctgtactgaaaacatgtatgtacaaatatctttctgatactctgctttgaattcatctagatataaacccagaagtgggattgctggatcatatggtaactcaattttcaattttatgaggaacttctgtattttgttttctgtcttgtatttccactaacagtgcacaagggctccaacttcttcacatccttgctgacacttattattttccattcttttgatagtggccatcctgatggatgaggtgacaatacattatggtcttgatttgcatttccctaatgattagtgatattgagcatctttttatgtgcttattggccactcatatcttctttggagaaatgtctatttaagtcctttccccatttaaaaattgtcttatttgtttgttgttgttgttgttgagtagtagaaatttcttatatattctgcatagcaatcccttatcagatacataatttgcaattatttcctcccataggttgcctttccactatgttgattgtttcttttgatgcacaaacgtttttgagtttggtgtagtcttatttgccaatttttgtttctgtttcctgtgctttgggtgtcatatataaatcattgccaaatccaatgtcctgaagcttttctcctatgttttcttctaggggtgtaatagttttaggccttacatttgggtctttgattcattttcagttgattttcatatctgctgcaagggaaaagtccaacttcattcttttgcaggtggatatccaggttttctgacaccattttttaaacagactatccttttttcactctgtggtcttggaactcttgtagattatttggccataaatgcaggggttcgtctcttggctgtctgctcctgccattgatctatatattcatctttatgccagtaccactactgttgctttgtattatgtcttgaaatcagggagtgtgagtcctccagctttgttctttttaaagatcattttggctatttggggtccttgtaattccatatgtattttagtatttttttccaatttctgcaacaaatgcagttgggattttgacagggattgcattgaatgtgtagactgctttgggtaatatggacgttttaacaatattaatccttccaattaaagcacattggatgtttttccatttatttgtatcctctttgatttctttcaccaatgtttggtagttttccatgtacaagtcttttaccttggtggttaagtttattcccaagtattttatactttttgatactatagtaaatgaacttgttttcttaaaaatttcctttttcaattgatcatggatagtgtataggaacacaattgatttttgagtgttgattttgtatcctgaaattttgctaaatttgtttattcattctagcagttttttggtaggatctttagggttttccacatataagactgtgtcatttccaaatagaaataattttaagtcttcttttctggtttgtatgtctttaataatttctttttcttttctgattgttctggctagaacttccagtattatgtcaaataataatggtgagagtgggcatccttgcttggttcctgatcttagaggaaaagctttcagtgtttctccattgggtatgatgtctgttgtgggttttccatgtatgacttttactatgttgtggtagtttctttctattcttagtttgttcagtgttttttttatcatgaaagggggctgaatgttgtcaaatatttttttctgcatccattgagatgatcaggcagttttagtcctccattttgttacattgattgattttcatatgttgaaccatccttgcattctaggcataaatcccacctggtcatgatatatgatccctttaacatgctgttgaatttggtttggtagtattttgtttaggatttttgcatcaatattaatcaggggtttatctatagtgtttttttcttgctgtgtctttgtctggttttggtatcaaggtaattctgtcctcatagaataagtttgagagtgttctctcctcttcagttctttggaagagtttcagaagaactgatgttagttctttaaatgtttggtagaattctgtagtgaatccttctagtcctgggcttttctttgttgagagctgtttgattacagcttcaatctcctcactagttatagatctgctcagatttcctgtttgattatgacttaatcttagttggctatatgtttctatgaatttattaatttcttctaggttatccaattttttggttttttgctttgttttctttttgtttttgatggagtctcgctctgtcacccaggctggagttcagtggcacgatctcagctcactgcaagctctgcctcccaggttcacgccattctcctgcctcagcctcctgagtagctgggactacaggcacccaccaccacccagctaatttttttgtattttttagtagagacggggtttcaccatattagccaggatggtctcgatctcctgaccttgtgacccacccacctcggcctcccaaagtgctgggattacaggtgtgaggcaccacgcccggccattttttggtatttttaagtctttaaagtcatgtattatcaaggcatatatgaacattttatgccaaatataattatcataatggtttcaaaaggattgttgaaggaaatagagtgtaacctgctttgaatagaattaaaggcaatttgaatgctgcaaatcattgtaagcaccttattttaaaatagtttaattttcacttcaaaataatgtttccatgattagaaaaacaattagaaaaaaaccatgaaaatttatatggaatcaaaaccaaacacattcctagaaaatactgtgaacatttttcttattttctttctaacttcttaagtgtgtggcttataatcactcatttatttatcaagcactttggctgcaccagagagtaaaagggatacaattattacaaaccacctgtttacttcagtcatgaccctgcagatatttatgaagggaagactgttcttggcaagaagaaaatggcatgtcactaatagcttttactcaaattgttcagttgtctgcaaattctatggccttctggcctgccttgccccattcccccttctgcctgaaaaaccaggtctcattgcattttcctttttcaattttggccttcttgggaaccaagtgaaggaaaggtcaattcctgtgtttggaacgatcggtctggtatttggttgtaatgagaagacccagcaggtgtttcaccaaaaaccggggtcagaaacgtggggtttgttgatttttgccttggcataggaaagccaaccaccaatagctatggtaaggagcagcggctccaggggctgacacccccaaagggagaagtgattggcagtacttcattcttcagcacacagagaaaagagcctggcttgaaacctgggtcccagatgccatgaagttaaggtgacactccctgagtgttgtttgcagtaggaacttccgccacctcccactcaaggcacaaaggggtaatgactgaaatctacttcactgtgggatggaagatttttgagctgagatttgtctgtggctaggccagcagtcatcagatactgtatgtcaggcaagatgcctatagcttaaaaaagactctagaaggctgctcaccaacacagtggaactaatctccaggcttctgatactagagattatgttctttttctctggattctttggacattcgaatctttaaatgatcaggaagctgaccctccaatgttccccagagctacttcccagctctcacagataaaatcccctaagcttcagaaaaggagtgtggctctgcggttgctactgggttgatgcagagagcacagagcaactgcacagcagtttctcttgtgtctggtggatagctaagcatggggaaagatcaagggtatgggggctgccgaacttcagttccaggtcctggctgtgtgacctcaggcgagttatttgacctctctgaatgtataaaatgggaatggtagagcttctgtatcacaggagtacacaagacaacacgtagaaagcacttacactaacaggtaatcaaaagtcagttttctccctggggatgtgagcagccacctggaaagagggttacttaatggcatagcgcagtgtgaatctccctttctgtttctttgcttggcattacccgatgattaattttgaaaagttactcaaacaattacaattcaacttggtcaacatcagttctcacaaatagaagctgactgtcatttattcactcagttcctgttggctgagtgttggctctagggctggcaccaggcactggaattaaacattctggactccagaggggcatgaaaactcttcctgaaggagatgcagaggaagattcgaactggaggaaaaccctaaaatgtgagtaggaattggtcaggccaagaaaacaggcaagggtgctcctggttgggggaatgttgaatgccaaggcaacgacgggagcagggcaaggtgtgtgggcaaagtggagctctctatgctgggagccggtggtgtctctgcaggtcatgtgccaggggcaggtgggtgcagaggagatgtcactggcacagtgctgccctggaactggcgctcattgcagatgcttgcaattccctcctcccttcctttcttctttctttctttaagtgaaggcttaatctagaactgagcaactaaaagccatctaagggtttggagcagagaagcaatgacactgcctgcttttgagaaagatgactccagggatgctgtagagaattggactggagagtggagatgggccatggtgagaccagtcagcaggctgatgtccagcctgctggagaagacaagggcttggaccaggaggatgacagtggggatggaggggaccaagttagaaccatcttcagagatagaaccccctgaatgtggggatccaggagaaggaaggcagcgaggaggatgaggcaagttatttaggcgtcacctagcataagcaggagggaggtgtttgatgttattgttcatgaagatagagaatagcggaggacgaggaggtgggggaaaagaagtgttcacttcatgggaaactacaggttttgttggaaatggcttttgcataccttccagtttcctctggcccttcacgtcccatcttgcactatctgctgttgagcacagatggacattcattcattccctcctccatgcactggccctccaccagcttccaaaaggctcacactgcatgtgcatgagggtgctccactgggcactgttaagtgtgtgcggcacttacactgtcagagaaaagttctgagtaagg

SEQ ID NO: 10178 - DNA, 6000 bp, Homo sapiens
tggttggagctggaagccaatatcctccacagactaacacaggaacagaaagccaaacgtcacatgttctcacttataagtgggagctgaacaatgagaactcatggacacagggaggggaacaacacacactgtggcctgtcaagggggtggagggagggagaacatcaggaaaaatagctaatgcatgtggggcttaatacctaggtgatgggtcgacaggtgcagcaaaccaccatggcacatgtttacctacatgacaaacctgcatgtcatgtcctgcacaggtatcctggaacttaaaagaaaattaaattaatttttgttaaaaagaactaattgcctaagcttcaaagcattctacaaaatatttatttccaccacaaagcagattaatatatatatagccagttcttataagtgtcattgtaaacatttccaaaagaacagtgttccaaagtctatggaaagagaactctaccattgtgtaagagacttcttgtggcattagtgctattttaaatctagaattaaaacaaggctttgaaaggaaaagccagcaccatcagttttcagggacaatagggacatactctagaggacttcagtgaggactccaagacagaagagagctgctagaaacagcatgtgctgattgaagttgagagttcagagtaagaggtaagggtctgagagtcacagttcaaatgctccttggaccttctattacaaatggaactagggactcatgagaatgattagattgaattgtaatttttctgttaatgcacatctgtgagctcctaagtaagggattgaatttcattcttcttaataaatctctacccatgtacctagcacacaggctgctatatgggaggtacctaatacatattgattcaactgaactgataggcctgccaggaggaaaacttttttttttctgaagagtgtgaggttcccagtatccttgaataaggcctaaaagagcaaatcattaagaccgactcatcaaaagatcagccagctttggtcccaaaatctaaaatcaaagagagtgccacaattttccatcgccctgaaggtattccagcactcagcaggggccagtaatttgaacaaggggaccacttcaagcctgcaatactgcaatttttctaacactgatgtgtgtaattttggccacagtttaacacaggataacaaataaaagcaatattctatttgtctatagttgtttacataacaccatagactataagcttttttatgaaattgtatttactgtgcatactttacctaaattaactaagcattcctcctctgcaatatcatctgcacagggctaaattctccattagaagtcttaggcacactgcccagagcttatggtaccttgagggcttcccaaaaatgatttaatttcttctaaaaatcagaaaaagataaacttttagattaaagaagatatttaaataaagaagaaaatatactcacctttatactaatgtaatcataagatataattttaacttggcaaggcagggagcaggattcataaaggaaaacatcataaaagtcataactggacctcataaccacatatgccaagatgtgtcaaatttggtgtcataaagtagataatcttaaaaatcctgttttcagaaaagaatcactcaatttgtcatagatggatggattgttgttacatacacagagacaaaattgggcgttgggacgggatggttggggaggcatgagatgggtgagctgagttggaaggaacaacaatcctccatgttttatggctgtgaccctcatttcccctctcactagcggactgctctagctaattagcaaatcaaaagaaatagaaacaattctagacctcagcacaatcaaattagtggagttattcgaggatatcattttcacacagtgcaatcatgctctctttgttttggtcaaacgagtgaaaattatctttcaaacccaacgcccttccctctacccaactggctctgtggatagtggcatttcctatctgctctcataagttttacagatgatctttttctattaagacaggaatgtgcaatgcacaattaaacaatacccaacaagcttcccttttaaaaatacatttgacttttaaggtgattcagcagtaagagccattagtacctcatctaaatcaggacttggaaagtttattaaaattggatttttaacctgatcccaatttcctttgtggataaagagtcccactggagtctttaatattcatgctattaacctgaaagattcaaacagccatgatgggaagaaaggctatacagggctgcccactagactgggggttacaaataaaaccccattgagtctgagcaggtagactactgtggattctggacatcttcaaaagaagcaacttctctctttttctctctctccccttttcctgacctcccgtctcctattacatattttgtgggaaagagaaaaaccagaaaaatagcaaacataagcatattacttaattacatagagcactagactaggagtctagtttttactggaagggtagcttcctcctctagtgctctaatgaaatccctcaattataaaatagggaagtctgggctaataatctctaatattggttgagaagatgcactttggagtcaggtgagaactctttgaatatcagccctaccacttattagtatgtcaccttgaacgagtcactaaactctcctaaacctccgtttccccatttgtaaaatgaacaaaaggtgcagctcctatgattcattttgcatagtacctggcactataagccttagatacactttagctggtattattactgattattgcccaaactcataggtcagttgcttttgtttctatttcatgccttttcactccttgagcctttatcttctttagaacagtttacaactgtgttaactcatgtctgtgcgtgtctgtaaaggtaggctaggagtgtttgccttgtttttccttgagataagattttatgctctcttagggcaatggagatatcttattttttcatctctctcttagtaactggcatagtgttgtacacatactaggtgctcaataaagacttcgagatcttaaaatattagcagtacagagatcttccactaaaaccctctcatttttcagttgttggaactgataaaaagagtcttgggccacacaactgactgacagacacttttgcagtcaactactactgtgtctcctaacagcctctattctcatgcccacggctttgaaagggaaacatgtttgacttaaaccctgactccttgagggaagttccatttacaaagttttttttttttttttttaagagcatagtatgtttcagataccatgcaggattgtaggattctgggattcagataccatggaggattcatcattaaatcacgatacccaagctcaaggcgtttataatctattagagaagacagatccctaaatagatgtttcaataatgtgattgtgttgtcataggagagctaagctctggcactacatgagcttctggataagaaacctaactcatgaccagaagacttcagggagagctatttaggagcagtggcaaatgcctggacatacacataaaactaagtaagaacaaaatagccagttggtgtttttatttatctgaatgtaagaacatagattatcgatcaatgaacaattgctcagatttaaaaagaaatgaggaaaactaaaatgttagtcctcaaattcctgtcacttcccacatgtgccctgcagtcatttcctgcaaatggaaacttccaacaaaatctctgggctggagacctggggttccagtttctttcaaggtcttgtggtagggaactaagtgggtgagtaacctgcctttggcttccagggtgcaaacagaatcattgctaaccccctttgtgtctcacaatgggtaatgaaattcatactatggcaccaaagcactttgagctctttagaaaaagtaatcataccaacttagagcattaaaaccaccccgtattttgaaggactcatgatctgcactgtgcttggctgctggtggaagcttaaagacaccagtaattggcagaactttatcttagacttccatttgaccctcacaacctcacacatgattttacacagcttcctataatgggggagaaaagcccttcttttaaatctaatgttagtttaaatgctaaggctttcaaagtgggcctttaaagtcactttttagaatttgtatttttttttaacctaaaatagacatgccaacattattctgactaaaagaagtagacaaggtcattcaactcctaaaagcttattttccaaaagcacagttaggtctcagctttcagggtgcttctggctgtatcaaaaagacagaatatactggtcactgtgttgttttctgaaagtgccgagggtaatctgtgtatgagttaaagggccaatttcctataggaaccttctcttagatgggatttttttttaattaaacaatgttggtgaaatatatttaaacgtaaatcacaaattcgaagtcttccaaatatttatttactaatgtggaagacatggaaactacagtaatctcatttaaaggaagttactttgatgtgcatttgcttttggcggggtatgattgctgacctgcctttgagggcaacttcctttggctcaggtaagcaggcaaacccgtttctccaaggcgattccaaccccacgcccctcaaaaccttaaatcttaaattgagttattgggtgcaggtcctttctcccacagaacctcccagcttccggaatagaggagcggggcagaaatatcctgctttttatttcagagctgacgtttgcaatcctagtgcactagcggaaaaaaaaaaaaaaaaaaaaaaaaaaaaaagctgaattttccgcgctctcctggcaaattggcgtccgctctccgacgctaaaccaaaggaaaaggagtgttcaatggcgacagggcgctctttgaagccggctcctcacgcggattctggcccaggccgccgctccggtcccagtccggctgcagagcgaattggagaggatggcacctcctgcttcccggggggcggaaggagcgccagcgcctaaggtgggtcacctgccaggaagggaatacgcatggtgcagactcacgtgggaggagcacaggtcccgggtacaagtgccgagctggcgacttagagaagaggtagactcgggctcagaccaagcaggcgtaagggagtagacgggacgtcccgtgtttgcagtgacggcggagtcacccatcccagcagcctcaccttcttggagcgctggtccctccccttggactgaaaccccaggggccaccgcaccgggtgggcgggaccgactactacccgaccagccgctggagctgcgtgccaggcggggctgtgcggagcagctgagcgcagagcggagcaccaggcacctagcgggccggactctgggcggcacccgagcgggccgggcagcagtgggcgctcgcgatcctcctctgcccaacgcgctctccctccgggcccggcctcctccgtcccctccttttgctcccgctcctcctcccgctcctccccctcctcgggattgagcaccaaaacgcccgcctgcaaggtcctctgcgccctggcagccaggagtcgccgccacgacagccgggtctcagtgggtgcctgcgccttctccccgcccgcctgccccgggccatccagaaacttgctctacccgccgcgggtgctcggcagtgctgcccatggcccagcctaggagcctatttagggcgccggacgggctggacagaggcgcggctcaggtgagtgcggcgcgcgcggggtgggagagtggcaggacgcaggtgtagagggctccgaggtgcctttgtctggcgttctg

SEQ ID NO: 10179 - DNA, 6000 bp, Homo sapiens
taattttctctggtggtatgatttaatagcttgctttttatttttgtgtattcattgtgtttctttgacttgaagttctcgtgagccttgcaaatactatcttcttataacccactattttatgttagtaattacttaacactgattacataaacaaagaaaactaataagagctctacaccttaacttcctccccttgcttctaaactctttgttgtttctccttatattttattgtgctgtctatgtcttgacaagttgtcgtagttattatttttgattggttcatcatttagtctttctacttaagataagagtagtttacacaccacagttacagtgttataacattcggtgtttttctgtgtacttacgattaccagggagttttatatcttcagatgatttcttattgcttgttaacatccttttctttcagattgaataactccttgtagcatttcttgtaggacaggtctggtgttgatgaaatccctctgcttttgtttgtctgagaaagtctttatttctccttcatgtttgaagaatatttttgctgtatatattattctagggtaaaagttttttccctccagcagcttaagtatgtcacgccactctctcctgggctgtcaggtttccactgaatagtctgctgccagatgtattgcagctccattgtttgttaattctttcttttcttttgctgcttttaggatcctttatcctagacctctgggaatttgattattgcatgccttggagtagtcatctttgggtttatctgctaggtgttctatacaattcttgtatttggatattgatacttttctataggtttgagtggttctctgatattatccctttgaataatctttctaccccatctctttctcgaccttgtctttaaggccagtaactcttagatttgcttttttaggtaattttctagatcttgtaggcatgcttcattattttttattcttttttctttgtcttctctgactgtattttctaatagcctgtctttaaaagtgcactatttcttctccttaatcaattctgctattgaaagactctgatgcattcttcagtatgtcagttgcatttttaaacttgagaatttctgcttgattctttaaaattatttcaatatctctattaaatttatctgatagaattctgaattctttttctgtgttatcttaattttctctgagtttcttcaagatattgattttgaattctctgtctgaaacatcacatatctctatttctccagggttgttccctggggacttatttagtttgtttggtgaggtcatgttttcctgggtggtctggaagcttttggatattcattggtgtctgggcattgaagaccaccccaagagcctgcttagtactctacctccctgtggctgagctggtacctaaggggaaggaaaacatcctctttacttttccttctgcttttgtcaagcagaaggagtctctcacattagccaccacagttgggaatatactgggtctcacctgaaaccagcagatctcagagtcacacccaagaaccacagtgtactacctgagtattgcttctggctattgagaacccaagggctctttagccaacaggtgatgggtcctgcccagactgtttctttcccttcaaggcagcagtttcccttctggcccaggatgtgtctagaaatgttatccacaagttaggacctgggatgggggtctgatgactcagactgatgccctgtcctactgtggctaaactgatattcaagataacaaagtcctctttactcttccccctcttctcttcaagcagaaggaatgggtctcttcgtgctgtttttaatcactccagccactagcattgggactgatgcagacactaaggatccaaatgattatttttgttttgtttttttaactgcattgggattaggcaacagaagggtctaatgtggctgagagtttttgagagaggagcatttttaggagggtagctgcattccaagtagagagctctgctggggtaaaagaggcatgagtgctagaaaagggcatgcagtgatgaagagccactaacagcactacctggggttggggtaggggtgtcacaagcactcccttagctcccctgtctggtgtctcagtaagtcgcatgccctccaagtctactggctctgagctcagcatttgggcttgcttaggagttgctgtccttgtggcctaggctgcctttaaggttatttggggccccagagcactttactgaaactcaagttttcaccactggtatgggctatttcctctgagggaaattggctgagttcagcctagttttgctttctgctatgacagagcagtactgagttcaattcaaagtctcccaatcactgcactctccctttcccaagccacaaggctgctgctgctgggggatggaggactggcggcattggcaaatcaaaactgtctttcctggcttcttcagtgcctctttcagtaatatgaaattaaaaccaggtattgtggttactcacctgatttttggttcttataaaggtgctttttgtgtgtgtagatagcagttaaattgtgttcctagccggggtggggggtgggtggtcaaaccttctatttgaccatcttgcttcacccctttctactgatactattgttgttgatattattaggaatgaaaatgagccctgtgagttataattgtcttcattttgcagaccaggaaactgaggctcagagaaatattaagcagccaaagtcacagcgattaaaagaggcgggaccaaactttgacggagatcaggacccactcctttgagaaatcacctcttttgctagctccagcctaaaagtgctatctaggagaaggtttatgggaccccagcagatgttcaaccagaaacttctgacctgcaggggctgcagaggggaaatctgccctgattagaagagatttgttttccacccatattagtttgatctcacattgctataaagaactacctgagactgggtttcagaggctgtaccgtaggcatggccagagaggcttcaggaaacttacaattatggtggaagaagggaaagcaagcacatcttcacatggcagaaggagagacagagcgagcaaaggggaagtgccacacacttttaaatcatcagatatcctgagaactcactcactatcatgagaacagcaagggagaaatccgccctcataatccaatcacctcccactaggtccctctcccagtgaattataattcaatatgagatttggatggggacacagagccaaaccatctaaccttgccatgtcctactgtactttttggaagttttctgaactaacatttcttgtctagaaatatacacactcaagatcaatctaactattaaaaacaaaaaatgcttattttccagtacctgttttatgttagattctggggtaaaaagaaaaaggtactgacttaatgttcctgtctatcattcatttgtagcttgtgcatccatcctttcatctgtctatccatatcacaaacatgtattaaacacctgctgtatgctagacaccatcctgaaggtgcatttcttccctaagtcttttttttgcctgccggagagtacagtattctcaattcaagataagaagtggtgaataagagtgaagtgcaaattggtgaggacacttagacaccgagtgattacttctgacaggtttccaccactcagctaagtagcaaggtgaagactccgaggttgagttgtaactcacagagcgggaagaccaataggcagtgagaaaagaagttgcagtggcttcacgttatagcagatgcctgtgtgtacacatgggagcgaatatggctttatgctgtttttcaaccgcttcagccactagcattggtactgctgcacactaaggatccaaatgattgtttttttgttttttgttttgttttgttttgttttgttttgttttaaattgcattgggattaggcaacagaagggtctaatgcggccgggatgagacaggagagtttttaggagggtagctgcattctaagtaagggactctgcggggggaaaagaggcgcaagcgttgcaagaagggagtgcagggggttgagcaggcacctctacaggaaatggatgctgtccaggtgctggtgggcgccccagggctacgtggcgaagcagctcagccggtccaatcagagtgcgtccagggctcgggtttcgcgatctttaagtgactgaggcagatccccacgcggcacctggccatgctctcagctctcccgccgcggtgagtatgtttaaggaatcctttccattacggcggccccatacctaggtccccgtccgggacagaggaagccgcaacgggtccccccgggcacccgggcctttctcctgcctcccgccacgtccgagggtccggccgcagcgccgcctgagcccctccgcggccggcagtgggaggcgggctctccgaaagccgtcgcggtggtcccagaagccgggtcataaataattcacgagccagggtctggcgagctaagggaagggcggcggcagcggtgactagggcgggagcaggagcgggagccgggtgcacggtgagtagctgggtcctcatcccggagcgagagaggcatctgctgaccaggcgcggggctgagcgcactccttccactgtactgggggtgtacagtgaggagtggacgggttcgctctgcgccccccttaccctagccatctgcgccgcctccctggcccctcagcaggtggtgcgggcccggacagcggctgggggccagaggaactgcggggagagcgtggtggtgccggtgcccgtccaacccaaactttttagtctgagtggtggcccgcgacgccccgcttgggtcttctttccatccactggggatgggggcgggggtgggggtagccggcggccgtggttccggagcgggagtcggaggtgagtgtgcgaactggaccggggccccagagacttcggactcgctctcggggagaacggtgaccgaggtgagactcgccagggtcttgggaacgagtctgcggtaaaggaaactctagggatggccccggggacgtgaggcgctgagcttccctggctgagtgcggaaatgggccaacactgtgcagccgaccacagcgggagtagggatatgggggtacaaagcgaggccatctccccgcgtccgtgggagaaagcatgcacccctggcttgaagcaccttcccagcctctcgctccacggcccttctgcttgcatgcgcggggacccgcggctatcgctagatggagaactggggtgctcaaggcgcaccctgccagaacacgccgaccggacaacaaagaggagcgtggacagaccaggagcttcacggctgtagaaagtcagaggctcgggatcagtttccccgaaagcccgtgtctggaggggcagggagtcggatcggagggaggaactagctccagaaccccttctctctggcaagatcgcccccgatcggtgcccaacaggggccgcggcggggaactggcgccgacgcgctcagagcagccaagttactccggcaaccccctcccctgcgcggctgcgaattcctggagtctcttggcttcccgcgcccgccccgccgctcattcttttgtgtcccgcagctcgcgagaggcttccgcccagaagggagctaggcctggagggggcttggcctggaggtggtttggaggtaaagggcggggaagccggcgccccaggcttcattctgcaacaggttgctcctggagcccgctaaggcgactgacctttctggagaaaggtttgctggagttcctgagggcggcagctgttctttgttaagaaagcaagtgcacgatcgtagttcttgagtgccccccgagactcatgcgacacgaacaac

SEQ ID NO: 10180 - DNA, 6000 bp, Homo sapiens
ctgtctctatgtaaaagttgtttttataaaatgtcataatgcataagtattgcctgagagataggacctttactattgttatattaagagaagttcaaaaagagttcctctcccattgtagtcccagataagactgtggtattgggcagggggaagaagtgggtaagagatagaaactctgacttctcagcgcagagttccagctaaagcaactgggttagattctgctgcattcttaaggggccatggctctaagacctagaagcttaaagtcaattgctacaaattaagcactctatgagaggataacattaaaagcacctttgtcaacctaatgattataactgccagggtcctatcaagccataatagagcctgaggcaaaagaaacaatcagcaatactgatcctgtctttatgaaaaatttcgatattttgttcaacatagatttttgcattaattttcatttttaaaaatatttcatgtaaacattatcttgattactgagttccttgggacccccttaacatttatgccttccttgcttcacccgagtcttgacctgataactgccaccatttattaagtgtgatatgctaggcatggtactaagtgacttacatacattgtcttatgcctcttcacaagctccattttacagatgacaaaaccagatctttcagagattaaataaatggtccgagtacatagctaatgagtggatgaatggttaacattggatttgaacacagatccatcaatcactaaaaccaaacttattctttttttttttgaaactgagtcttgctctgttgcccaggctggagtgcagtggtggcatctcagctcactgcaacctccaccttttgggttcaagtgattatcctgcctcagcctcccgagtagctgggactacaggcacatgccaccacgctcagctaattttttgtatttttttagtagagacagggtttcaccatgttagccaggatggtcttgatctccttactttgtgatccacctgcctcagcctcccaaagtgctgggattacaggcctgagccaccgcgccaggcctaccaaactcattcttcaaccatcatgccctgcactgtatcaggaattcacaacataaattcattcattcaacacatatttatgagagcatattatgcatcacgttgtactaaggattaaaacgttgaaattcatacatacaaggattcattcattcatatgtgcattcaacaagcagtaatgagcaggcaccatgtgtcaagcactatgctacatgctgaggatacagaagtgaacaagacagacagctaccacgggaatgaacagagaagggacaggtgacaagcaaatgaatgaaagtttatttactaagaggtcattcagaagagatcatgaattcatggaaaattattttctgcatctagtggcatggaaattaagatattctgaattttaatgtatagttttaagaaaactgaaagaaaatataaagtttatcattatacattggatactatgaacacaataatttgagtagtaattacacttccaggccacagttgtaaactgattttctattagaaatatttaaaagtagatgtagaaaacttactcttaaatatataacagttcaaaaatccagcaggaactaagttaattaaatagaatattcacctgttttttctgataattatcctgtgttatatttacatattaatgcagtataatattttagtatacattacactctagggagtcactgaaatgtcagcaaagaaaaatacggccggaggcatcttaagtcatttgaccacgtttttaaaagttggtgttttgagaaatcatctaaatgtggtgaccttaccaaaatgattgctttttctccaagatatttgagaacacttaccagaaacaatagtttatgaaatataaaaattatatgatcaatgtggataattaatatttttacaaaggaattctccaagtttacattgtaagggagttcacacaaagaaactatgatcatatgtgttcccaagataagagataagatgctctctctcctttactagtatcagcagctaatggaaaacttgggagtggccctctcactccctactctccataggttttctggaatttcttcacttcaagaaaaaaaccagacttgggaaggttctagagaaagagaaatacagatgagagagaggtaacattctaagtggccttatgttttgattctgccccacctttgttaccctgccatgtttgtgtgcattcctgtggatgggcgtgcccactgcctccctcacctcccatccaggctttcagaatgatgggaacatgacacgcacagagaattctctctaacccatcctctttctgttgagcatatcttttgctccctctgcttgtctatgggagtgacctgtctgagggaggttgagggtcaatgtgtaacagatacatacaaatggaagcagaaaaactcccccactaacttatcacctgctcttggtgccttcagagagcctggtgtggggacacgtagagttaaattgtttactaatttgaaattagaatctaaccacttctctccacttccattgatacattctctctggcacaagttacgctatagtgtcccaaggagtcttccctgccagccttgtggctcccagtcatttccacccaacaaacagaggaatctttttatttgtttgtttgtttatttatttatttatttattttatactgtaagttctggggtacatgtgcggaacgtgcatgtttgttacataggtatacacatgccatggtggtttgctgcacccatcagcccatcatctacattaggtatttctcctaatgctattcctcccctagccccccaccccctgacaggccccggtgtgtgtcaatgtgttctcattgttcaactcccagttatgagtgagaacatgtggtgtttggttttctgttcttgtattagtttgctgagaatgatggtttccagattcatccatgtccctgcaaaggacatgaacacattcttttttatggctgcatagtattccatggtgtatatgtgccatattttctttatccagtctatcattgatgggcatttgggttggttccaagtctttgctgttgtgaatagtgctgcaataaacacgtgtgtgcatgtatctttatagtagaatgatttataatcctttggatagatacccagtaatggcattgcaggatcaaatagtatttctagttctagatccttgaggaatcgccacattgtcttccacaattgttgagctaatttacacccccaccaacagtgtaaaagcgttcctatttctctacaccctctccagcacctgttgtctcctgactttttaatgatcaccattctaacaggcatgagatggtatctcattgtggttttgatttgcatttctctaatgaccagtgatcatgagctttttttcatatgtttgttggctgcataaatgtcttcttttgagaagtgcctgttcatatccttcacccactttttgatggggttgtttttttcttgtaaattttttaatgttctttatagattctgggtattagccctttgtcagatggacagattgcaaaaattttctcccattctataggttgcctcaaacagaggaatctttaaaatgtatgtcagaacctgtcattcctggactctaaatcttctgctggtttcttatttcagtcagaggaaaattgccaagttcttataagatccgacctcttctctgattccgtcccctaactccactccaggtcttcctcacattttccaagcacatcaggatctttaaatttgtacttgctgttctctctctctccaaaatactctttccccagacaacaagtgtcttgcttctttggcccctttagatttctgcatgaagatcactatcagggaggccatttttgatcattctataaaaaagaaaatcactccccagtctctctctgtttcccttatcttagttatttttccttcaagacaatatcactgcctgatattggtccccacccaaatctcatcttgaactgtagctcccataattcccacatgttgtgggagggacctggtgggaagtaattgaatcatgggggcgggtctttcccatgctgttctcatgatagtgaataagtctcatgagatctggtggttttataaagaggaggttccctgcacatgctctcttgcctgctgccacataagacatgactttgctcctcattcgccttccaccatgattgtgaggcctccccaggcatgtggaattgtgagtcataacatataaacgtattgttttgtttgcagtctctcttttcttaacttctttctagaatataagctatgtagaaacagaaatctcttctgttcactgctacttccccagtgcctagaaaagtttctggcagaataggtacttaataaatatcttgaataatgaatatcgtaaaatcttagtactccaactacctctgttctacgtctaatccaaccacgtgaagcctggcacatctcccaaagtcctcagaattctatatccttcaatttcctcatctatcaaatgggagtagtagtacttccctcacagagtatggtgataaataaatgagataatatacatgaagcaattagtatgtatcttggcacattgaaatctaacctgaaagctttgattctatgccataacagaattcagcagctgaatatcaagacctttgaattcaacaagaagttaagacatttatagttgtctaacaacagactgaagattgtggcttggtattcactggcaggtttcagacatttagatctttcttttaatgactaacaccatgcctatctgtggagaagctggcaacatgtcacacctggaaattgtttttcaacattaatactattatttggcagtaatccagattgcttttgccaccaacctgaagacatatagaggcagaaggacaggaataattctatttgtttcctgttttgaaacttccatctgtaaggtaagtgttgaaagtcagatattggctccagggactttctatatccacaaatacaaaaattgaggggtaactccttgatatcaagtcaaaggctcacaatgtctggtaataaaacaaattactttcaattttcttgaaatcttcaggctatcaaaaggagatgtgagagagggtattgagtctggcctgacaatgcagttcttaaaccaaaggtccattatgcttctcctctctgagaatcctgacttacctcaacaacggagacatggcacagtagccagcttggagacttctcagccaatgctctgagatcaagtcgaagacccaatatacaggttggaaccttactccaacctcttgatgaatgtagtcagatgttggcattttttttgcaaataaaaatcctacaggatttaacaaaccaaataaaaatctaatattatatacttttttttagggttttgagctcatcttcatcattcatatgaggaaataagtggtaaaatccttggaaatacaatgagactcatcagaaacatttacatattttgtagtattgttatgacagcagagggtgatgctccagagctgccagaagaaagggaactgatgaccaactgctccaacatgtctctaagaaaggttcccgcagacttgaccccagccacaacgacactggatttatcctataacctcctttttcaactccagagttcagattttcattctgtctccaaactgagagttttgattctatgccataacagaattcaacagctggatctcaaaacctttgaattcaacaaggagttaagatatttagatttgtctaataacagactgaagagtgtaacttggtatttactggcaggtctcaggtatttagatctttcttttaatgactttgacacca

SEQ ID NO: 10181 - DNA, 6000 bp, Homo sapiens; identical to SEQ ID NO: 2302

SEQ ID NO: 10182 - DNA, 6000 bp, Homo sapiens
agccagccatagtctacaaaacaagccttcaattgtcattttaatgggtatactatttcaccttaatttaatttccctacctccaagaatatatcttgttttgtaagttcaaaagctgacacatcttccagagagactatttattttccctatcttcttcacacaaaggctgagattattcttgcaacagtaatcaagatcttctgtctttgggttgcaaagaaaatgcattcaactgtacttgaaagagaaaattgaaattcagctacagatgataaagcacattctccttctctttcagttttgtctgtcatatcagctgaactgcattaacaaaagcagagggtgcctgttgcttgctattggcaaaaaatacaatattcattgtccaaaactgtgtatgaggtgtgttgtggtttacttctattaaggattcttgttcttctagtccttttttttttcttttttgttaattctagcatggtataaaatgaaccaggaaaatagtccccagaggaaggtttttccactagctttaatggctgagcaactgtgagtcttttaaaaaatgatcaaatcttgagtgtgattggcttgcctatattcctattttaacagttttacaatgctggtgtaattgttttaggaaacatgtagacttattagcatatttaatgctggctttaattatttattgcatttattgggtatgtaagtcctaaaattgtcactgggtacatctaccaatagcataactgctacagtgataaaaagcatctagaaataaaagtaggttggtactactgagatagagatttccataaacaaaaggtgcattgcagaattttctttttccccattagacagtctcatgggcatgccagttgtgaaaccatagtcaaatttatagatatgcaaaggtaagaataaaatatgagtttatactcaggtatacgcagtaagtaattatttttagtcagctatataacaagaggccagtgacacaagtctaggcaaaattgtaaagtaggaatagcttatgttcggatacttgtagcctgtgttttgtgtgtttaataataacttctccagaagcttccttggttttcctctcccctccaaatttacttattctcaagaagagatgaaatgtattcacactgaggtttaactgataataaaggtggtgaaagtgcaatagaaagaactctttgagaccaaccagtcctggcttcaagtctaattgtaattattttctagcgaagttattttgctgaatttctcccttagggagatcaggatttggtgcaaatggaagattatacaatttggggggggccttaaaaatacaaaacaatgtgtataaattaagaaagtgattatgtgtaattacacatgaaaataacaaactccagaaaaacaaataatttctaattaacttcctaatacttaaaaaaacttttattttaggtttaggggtatatgtgcaggtttattatataggtaaactagcgtcatgcggatttgttgtacagattattttgtcactcgggtactaagcctagtacccaatagttattttttttctgttcttcttcttcctcttactctccaccctcaagtaggtcccagtgtctgttgttctcctctttgtgcccatgagttctcatcatttagctcccacttatgagtgagaacatgtggtatttggttttctgttcctgctttagcttgctaaggataatagcctccagccccaaacatgttcccacaaaagacagggtctcattctttttttatggctccgtagtattctgtggtgtatatgtaccacattttctttattcaatctgttattgatgggcgttcaggttagttctatgtttttgctattgcaaatagtgttgcagtgaacattggtgtacatgtgtctttataatagaatgatttataaacctttgggtatatacccaataacgggagtgctgggtcaaatgttagttctgtttttagctctttgaggaatcgcaacgctgctttccacaatggttgaactaatttacaccaccaccaacggttgcttggcacagctccaacaattgctcaataacctcaccagcatctgttatttttcaactttaaaaaaatagccattccgactggtgtgagatgctatcttattgtagttttgatttgcatttctctaatgatcactgatatgcacctttctttcacatacttcttggatgcatgtatgtcttcttttgaaaagtgattatgtcttttacccactttttaatggggttgttttttgcttgtacatttgtttaagttccttatagatgctgggtattagacctttgtcagatgcgtagtttgcaaatattttctcccattctgtaggttgtctgtgtactttgttgatggtttcttttgctgggcagaagctcttaagtttagttagatcccacttgtcaatttttgctttggttgcaatagtttttggtatctttttcatgaaatctttgcccattcctaagtccaggatggtattgcctaggttgtcttccagagcttttagagttttgggtttacatttaatctttaattcatcttgagttgatttttgtatatgatacaaggaaggggtccagcttcaatcttctgcatataggtaacctgttattccagcaccgtttattgaatagggggtcttttcctcattgtttgcttttgtcaggtttgttaaagatcaaatgattgtaggtgggcagccttatttctgggctgtctattctgttctggtaccatgctgttttgattactgtagccctgtaatatgggtattgaagtcgggtaacatgaatattttcagctttgttcctttcacgtaggattactttggctattcaggccgtcttttggttccatataaatttttaaatggttttttctagttctgtgaagaacattgttggtagtttgatgggaatagcattgactctgtacatttctttgggccgtatggtcattgtaatgatatgggttcttcatattcatgagtatgagatgcttttccatttgtttgtcttcactgatttctttgagcagtgtttttagaattctcattgtagagatcattcaccttcctggttagttgtattcctaggtattttattctttttgtgtcagttctgaatgggattgacttcctgatttggctcttggcttggctgttgttggtatataagataattctttttctcacattttttaaaactatatactctttgattattttatgtgacaacattttatatcattgtctgtagagagaagagaaagatattttgacttttttaaagaagaaagattggtgctttttgttagactggagaagtttcttctactttgctgcatgtttttggaaatgccacattttttgactttatccatggattctcacttagattgcttcttgtccatgaataagcctctagcattttgaaatttccttgtattccctcattgatgcaatagctgccacagctattgccacagaactcattcaggcctgaatgtatttcttaaacatttattcagtgttttctttctgccattgtgccgagtctagagaataaacaaatgaaggaggcatttctgcccttagagaactcacaggctagtgcaaatggatattttataatgcaatgtgaacagttcaacagcgaagtatgtacaaagggtataacttatccgtggagggaatttcaactggctggtataaagcagaccacttgtgtaaaatgctataaaggaacaaatttttatagccaagtaagttggaaagacatataatattacatattcctctcagacattcacaatgccctcaccatcattaaggctctaagaagtcctacacctaagaaacctgtttaatggtttaactaggcattccttaactctacttatccatgtgttagtctgttctcatgctactacaaagaaatacctgagactgggtaatttataaaggaaagaggtttaattgactcacagttccttatggctggggaggtctcaggaaacttacaatcatggcagaaggcacctcttcacagggcagcaggagagggaagaatgaaagccatgcaaagggggaagccccttttaaaaccatcagatatcctgagaacttactatcatgagaatagcatgggggaaatccccccattattcagttatgtcccactgggtccctcttgcgacacttatgggaactacaactcaagatgagatttgggtggggacacagcgaaaccgtatcggtccatgaaaataattacttccacaacaacgaaagtcaaaacagctagtggtctggacataaaatgacctatttcactccttattttctgaagatgttgaggctactttgattttctctgttgataaggagtcatttttttctgattatggaagtttatgtggggatgaagctcaaggttttgggtgaaagagtcaagtgttattgcataaatcaccttgtcaagtaccccaaggtgcaaggctctatcttccatataagctgatggggaagtcattaaagtaactcatatgcaaagaatacatgtcactacatgtttcagtttctgtatcatggccaagccagtacacacctcatgtaaaatgtgtcatgaatttcctcatggataatagaagtaaagatacatgacagtgattcaaaacatgtctgtctatactgtctacatataataactcatgtgacatgtctgatgtacttactccactaaccttttaaaaatcaataaagttgaataaacaattagtgtaatattgcttttcttttctttttagtctataccataatctataacagtggtaccagtggccccggtagttaatatcacagtcatgaagactcacagcctattgtagctagcaagagggaatccatgactcctctgggaagaaaggtgatcatcttttctttgacattggtatgttgatcaattcattctgtggaacctgtgggttgtactccagtagagtccttaggatggtctctcctgaaggatgcccaacagtagctaaaagtaaatttaccagaatagagtgaaaaggtaaggaaataaatgaatacataagatatgtgtttcgcagagctggaccaaaagaaacctacttagatctgaggctcattttctcttcattgtgtcagaatagtgtgcctgcaatttaattttgttttacaatgctcacaaccaagcttggcttgcaggatgtattgccctgaaacatctgtggtctcttcagcttttcctgaatcttccgttattgcctagtgacacaggtttgaagagaagggcaagaagctagagtggatgaagggctaaacaaacttaccaataatgggatgacactgaattcactggtctactacatgtatttcaaagggatgtggaaacttcatttttatctaaggtagtgtgtttccaccagggctctgagatcagaaacaagacatggaaactttaagaagtattattcaaagttcattctcttagatagttttttcagttgacttttgggacatcgttctcttactactttccctccttgcctcattgctgctccctgtcaatattttctgctagatcatcttcttcattatgacctctaaatgttgaagtcccgaggctctgtccctggaccctttctcttgtttaaatgtgttcacttcctacattatgttttaattaccatctgtatatggaagattccccaggttctatttattccttgaatctttcccttggacatcagactcatattcaaatgtctacttaaatatgatatatccaaacttgatttcttgatctgccaaatctgtttctaccatgatgttctctttcaagtaaacagtaacgtctagttacttaggtgagaaattttgggataatctctgttgtcact

SEQ ID NO: 10183 - DNA, 6000 bp, Homo sapiens
ctcattaatttattaaaatggtattaatgcattttttaattgaacacgcatctgataacttgttaaatttaaaaataatttaacttcacattaataggtagaaatgtgagtcattagcaaaaagaagagattctaggacttcaggaaaaaaatgcttaagaaataacactaaacaaaaaatatttgatgttttatgttcattaacttaagacataatacacacaattatggatacattacaatattatctatgttgtgaacttcaagagttattgattgcttaaatatattttagtcaatatttacctttgagatcaaaataattaatatcactgtacatctatcctctttataaaattatgaatctgaaaacttaacttctttagggtatcttatcgtttcattagggtatcatataatttctcatctaaaatctaccatgggttaaaattttgctttgcttgtatttttcaccaaattcccccaaagaaagaatctagctaagtgacaaaaatatttaaaactgatttgtaaaaaattgctacaattatatgaggaaaaatgttcttgagtttatggagttttatttaaattgttttagtaaagactgttgcttatattttttaccatggtttaaaggggctgtgtgccatgtgttgagctactattatctgaccacagacgtcaatcttgttatttccttgatttggtccattgtcttcattgtacacaaacaaatcgtgtgcatgtttttatgtacacgaaacagtatttttctttaagtaatgcttgcttatgatccttcatttcttgttttctcctattcatttatctgacctatactacctatttggaaaatcgcttttagacttaaacctgaaaattaaaatattttcatgtattcattgctcccattcatgcagaattttggggtagttctctttttctgatcaacctggctatcaaatttattctttacttctgttatgtaggacttttctccaatagactcaatcccatgggtgaaagtttccgtgtcttaccagctgtgagactacttggatcacctaatctcatttcctcagttttctcatcattaacatggggataataattacaccaacatcagggttgaagtgtcagcattaagtaaaatagttaaggtaaaaacgtcacataatgctttacacatagcaaatcttcaggaaaaactagcaaggctttctgtcaaaattgcttttcttgaatctttgaatgcagggaagatacatttgggcttattgatacactgaacctaactataatattaaaactttttatgaggttagtaaactttcaaggcaccttatcaaggttactttgaatatccttccttcaggaatacttagtactgaagtcacacaaaagcacagatcttgggagacactaaccacttgcatcttttaaggtcatagtagctattccaagaaatgagaaatgcaaacaatagggcaccaaaaccaatattgatggcatggccttttgttgtgcaaaacaataagtataaaagaaaaatataaaccaaatctagttttcatgcaatgccatggttcaatgtaattgtgttaaaataaaaagtattaatatgccaagacatcaacacgtggccaaatgtgaatctcctttgagcttgaagtccaagtcaaaccaccatcattaccttttctgattaaccctccttagatcaaaaaatgattttcattgttgtcatcagaacttcatgaactttacagcttcaatgaactttacagctgttcattctttcagagatgtgtaatcaatattattaaagaactatgagaaagatggctgcaatttaaggtggagaatacaaagaattttgctttctgtattctcaatcatgtaacttagctatgttgggagaagataacacaattatgcccatgctgaccagcgtcccaggttttctttgacaaaccagatttaaattctgtctttcttctctttagatatagttagacaattttattccacctttgattcagaaaatattggcattgtgttgatttatgtaaagctatgagtactttgaggaggagaacgaagtaacttttttgttgagaaaagaagaatttaatcttgagtgcctggctctcctaggacactgggtatgatttagatgacagtagtgtgtgtgtgtgtgtgtgtgtgtgtgtgtgtgtgtgttgtggtggggtgaggtggggggcggataaatatttccagaggtgggatttctttagaatggaatgacaggtagaaaaatcagagaggcatgaggtaatttaggggaaaaatgagtttaacattgtagtatagaataaaaaatatatttaaaccatttgtagtagaaggctttaaattctaggctgaaaaatttggttattttgtggccaatagtaaataattggagatagatgaacagggtagtcacatagacatgcaaccaacggaagggaagaaggcttgaagattgtcttctccaaattcctcattttactgatgaggatactgaagcctgtagaagtaaaggaacgagctcaaagccccattaaactcatattagttttactacatatttctgggctttagatatcgtagttggtattctgcttaaatatttttaagtaactcaattataattgtaggggagaggggagcttacattttgaatggtcctcaaatagaaacataaattttaactttccatctcacccgtgaggctttttgccaaactgagaaactgattcactgctcttcctctaaatttgcttcatccattcggagcacattataataaaaagaacctgctttcagacttctggtgccaaaacatttcaggaaaaaaagaaatcaaagatgagctttcacctctttacaaaattgcatcactgctgctttattctttcatctttattgcaaatatttaaacaaaaaacaaatgtcaccagctaaagatagtgaggaatttattgtggagacaaacaaggctctagatatgtcaaaactggtgagctgactcacctttattaggtgtgaacggaagcccaagctttacagtggttactatacatgaaattaaatgagatatctttcttctataatcagacctttctgtaagtgctttctctgcagccttttgtttttaaatgcctgtgtactaaaattgtccttcaaatgtatctctttgaaagaatgaataaatcgagggaatatactaaagcaagaaaagacataatagaggtgaagcatagaaagttgattgttttaactgttttttttttcactgtttgtaaatctcccaatgctatagggcacaatcaattaaaataattaatttttcaaaaccctgaatttatttgaccgaggctaatttcactggaatgtatgtcgtgtatctgcatatcgtccaatttctaaaatactaaaacattttatcaatgaaataaatgaattaaatcgccacctatgaaagtacctggcacactacaaatctcaatagtcaaattctttgactccttgaaatctcaaacagagctaccgcctctttatttactctacaatttacttctgaagaaaacattgagtaattatcctattccagccatcaaagtatgggaagaacagaaagagtcagcagcggtaagcggtatgggtgtttaagaaactagccacggaccagcagagcctgcgaatgcgcggcgatgtgacgacaaggttgttgatgccacagcctgtgagggacagcaggcaagatgccaaacggagggacccgcgtctctaagggccgccggctgagctggggctgatctcccttccgcctcccgggaaccccagtcctcgccagcgtcgtcaggattccttgccctaattatcccgggaggaagacgcgcctttcccggagaccgctaggcaacactcaccaaggcagcctccagattacttccctccgtgggtgtgtgacttcgtcgaagcaactcacacttacagtagattctcactggcgaggctgcgagcagcagagggcgggggagctgggaagaggaggagggaaggagggtgggaggcgctgagctgggaggcagaggagacgccggagctccagacacagcaggagcgcgccttggcggtgcagtttcaacctcgacttcgcagccgcgcacacaccgcctgctccccgagcagcgggaaccgcagcagctcctgggccgccgcagcgcagctccgcgctcctaccggccggcagccgtcagtccctcccctcttcagcactcagcccgcagctatttccttctgccagtctctttgaactctggatctttgcttttgctcgctgctctcctgtttttcattctccacattttctcaagtcctctttctttatccttagccaccctgcttttttcctccttttttaaaaaatcggagatttcgtcttaaaatgatttgccttccttaccttcgtccatttcaacactgaaggctgcaaagaaccttcacctttcccctagtggtatttaaaaattctcaatccgtaaaaagtctttttgaaaggcaaaggaacaggacccaggaccctctcgacacccttgatccgagtccagatctgcactagcaaccagaactaatatttcatttaaccccaccaaagggggaggcgagaggagccagaagcaaacttcagctgtctcagccggatccgtggttcctacatttggaggagccgcgtgccagaaggcgtaggaccccaaggggggacaaggaggactcccgagtctcccttcgccgctctgcgaggccgaagcggtggactgagccgctcgggacagcggcaccggaggaggctcggagaagatgcggggctcggggccccggggtgcgggacgccggcggcccccaagcggcggcggcgacacccccatcaccccagcgtccctggccggctgctactctgcacctcgacgggctcccctctggacgtgccttctcctgtgcgccgcactccggaccctcctggccagccccagcaacgaaggtagggagatgggggtggggaccgtggcgacctggggcggaggggctaggcggggcctgggagttcaggtctcagcgcgctggacgctgctgctgcagactaaatcgcagtctcatctcaaattggtatttgtcgtccccttccactggccttttcgctcccctctgcggtttttggttgcattgtttgacgttagctgcggagtgctgggcaaggaacatgcgtgtggacagaggctggttggggggctgggaaggtggaaaaccttgggggaaaggaggtcgaggcctcctttggggaatggaggcccgttccagggggatgggtgcggctgggcctcacttaaggcgcgtggggaagtgacatttcgggcttgaaggagtgggaactgttggaagctcagtgacaaggatctctggagcagtggggcttttagaaaccgttatttgaggccagtgatgggaaacgttgtgggggtggctggatgcttttatttttggggaaagtgcctgctgggagctgttatttagggcatcaccagctgctattctggggtgggtggcaggagcttttatttctcgtgggaggggtatagcgaaggacagaaggcgccccacacagttgggtgcccttcttcttgggggagttcattgtcacactcaagccaaggtggaagaaggcgagaaggtgggatgccgcggcaggaggggtgagggggagtgtcgctgctaggaagttgccgctaaaacccacctgggcatgtcttaaagacggaaaagacctgctctggccagcacctgatccaggagtacccagtccccctccctacccccaatcctgtgctccagacccagaatactgtccctgcctttttctgggagagtagagctggcgcgggagcaacacctgtgtcgctcttcgtgctc

SEQ ID NO: 10184 - DNA, 6000 bp, Homo sapiens
gatctctttgcaattgctcctgatcatccatgttcctgtttgtgggcaggggcatgaaagatctttttgaaaatgcagaagggcccttttctgccaacttctgttcagtagtggcatatttgaagtccctccacccccaacttctaatttgcttttttgtgaaagactagattaagtccaggtgtgtggagtggaaccttgtatttttgctgcctcctaggaagagcgtgattattctcttctctagaaaaataaaatattagacctggaagtctggaagtgacattggagactgttgccacaccacctttttaccgaggaggaaactctatccagttattggaaaaaatgtcttagaacccaatccactgactcggtccaatgaaaaaaaatgctttcttttcttttttttttttttttgagacaaggtctcactctcaccctctacagtggtgcgattttggctcactgcagcctcgacttcccgggctcaagtgatcctcccacctctgccttccaagtagctggaactacaggtgtgtgccaccatgcccggctaattttttttttttttcctgagatggagtcttgctctgttgcccaggctggagtgcagtggcccaatctcagctcacggcaacctctgcctcctgggttcaagcaattctcgtgcctcggcctcccaagtagctgggactacaggcgcccgccaccacccctggctaatttttgtatttttagcagagatgaggtttcaccatgttgaaactcatgacctcaagtgatctgcccatctcggcctcccaaagtgctgggattacagtcatgagccaccatgcccagccccagctaatttttgtattttttgtagagaggtggtttcaccacattgctcaggctggtctcaaacttttgagctcaagcaatccgcctgccttggcctcccaaagtgctgggattataggcgtgtgcaactatgccaggcctccagtgcaaattaagcctaaactaggccagaattgttgctcattatttctatggaattaagctcttcagatacctcactcattacactaggtggtaattcctctgctctgcatacactaagtgttattctagtacatttccttctatcagcagtctctggaattctagttagcccacaactttgctgagcactttctgtagagggctgtggtcctgattactatagatgtaaccaagaaagaaattatactttccacataccatttttgcagtgtttcatttatttattcatttaatcagccagcattaatcaagcacctactgtgtgctgggtgctatacccagtgtggaggtgactgaggttaagtcttgccttcagggacttcacagccattgcaagacaaacagttacaatgcagagtgcaaggacaatgatggaagtagagagtgagatggaaacttagggaggaggcctttgactaggcctgaggtagccagagaaaacttttggaaggaagtgatgctgagctggatttttaaggatgaattggaattatctgacataaaacaaaaggtgatactgtctcaatatttctgaatacattttacctcctttttccaatctattttaagagtaaaaaaaatgtcttcaggagaagacaagatattaatgaataaatgtcccttctgattactctgacttataaatggattttcagtatgtttggtttgctaacaggaggacattcccaaattgtattaaacaaaggaaagatatagcaaaaaacagttacacactggatgtttagtcatcaagaatactattttcttgcctctccagagtgttcacattgataaagagacggcgagtcgactgaagtctatgattaacactactttgatcatcaccaacataccctacatcatcatggcgctgggtgtgttctttggtttggtttttacctggcttgcatgcaaaggacagggatccatggatgaggtgagaactggctgaaggaacttcttccttactggataactttacctgaggaattcaactgtacttcactgaagggctgtcagctggcttattaggataaattctgggattttatgctgggcatagtgatttcgtgcttattttactgctggaccaaatgggaagcaaaggaagtgtgtcaaagaaggtggagggttagaaggtaccatctaatatttggggaatagaatctctttggatgtatcccctgggagttaactttatgtctttgaaaacaataacctgaaagaaaaggaagaatatataacagttacacatctgatctttggtgtcagactgcctgagttcaaatcccagttctgccacttaacagctatacgaccctagaaactgtgcttcagtttcttcatctgtaaaatgggataataaaagcctcccttatgagtttttcatgaggattagatgatatagtagacttaaaggacttggcccagtgttagcatatagtaagagctcaataaaggtttaagtattattaaatatgataaaacagctccaagattatagagcaagacagccagggtcctgcttggaaagaatccctgatgtatccgaagatacctatgatttaggtatcactgcataataaatgattggaacatgggtgtagttactttcctggaaggctaggataaagagttgggttcgcctttccaagtgaccagcagcccagccaggaacctgaatacctgcaatgagccttttctgtagaagcccttcttaaattttctgcagcttccttttttttacaacagtggccttttttcctccagtttcctcaactaagtgtccaaggcaaatgtgaagtagaaaataaatacgtgaaaccatctgagtaaaattagctgaatttccctgacttccatattcttccattatttctcttatcccctgccagtcactttagcctgaattagctgtgaggcaaactattttgccatttctatgtgtggatcttccagtgtgactttatgcagtcattgaaattgtcttaagcacaaatgaaacctcatggaaatgttaattactgctcctacaattaaccttcctcatatattcaacaagcaaggaattattgagaactaatacctctgagacactactccttagtaggtttcaaaccaggaaggaggcaagttgaatagagtctaagttttataatccagatcaacacagagaagggtactgctctggtattgagggtgggagtggtcagagaaggcctcctggaaaggttaggcctgctgaatcttcaagaacaagcagcagcccaagaggggaggtgagtgagatgagccaccttcctataggtctctcctccttccatgcccccactccccacccaaacttttcacactggggagaagtttctgacatgaacatctaacttgttttctctcttctgtgtttcagggaacagcggatgaaagagcacccctcattcgaacctaaacattgcctttgcttggtgaagaaactgtgtgagctgtcctgacctggacgatgacgtggggaaaccctccacctccttgcaggcttgttgcctgttgaaagaaggaaaaagacacggcgctggcaagtgataggaacattctggccagaggttaaagagcaggctgacatggctggccattaagctttataaaatcatgtgggctctgaaattgttcttttatgtgtctagcaagtatttaataaacccttgtatagtaattttgttgttgttgggtgctggtagctccagaattttgtgaccactattgtgggtaaaatgtctctgcatcacttgttaatgctactggtctaacttcattcagtatgcttcattcaccgaactttgtgctcaaaatgcgtatataccattttatgttgtattcctccatttcacttgcaaaacagaagtaaataagagttcgggacccagggtaaaatggtagcttcatccaatatatcattcaaatgcatctgatttctaaaacatattacattttatgctgatcttcagttcataattcttccaggaaaactcagtcttccaactgcaataaaatactgggtagaatcaaatgggaaaggggttgggtggggcaatacccatgagttgatagtgataagctcctaaggatttttaacttgtacttttgtgaacgaagagaatgcataaataatgttggtgaggataaagtacagatatttcatgtagaattaattgctagttatgatgcttgtggatagttaactgttttttttttagtcaaaatgatcatgctacgaaaagatgcttctgagagaatgtaatgagtaactgatttttcttcctgagtcgcccttgccaaatatgttactgtattaattaatctaatattgagtgattatttgtaaaattatgaatatgggaaatccatctatctacagcctaagttacacataagtttcagaaagtctgattagactaaagagatatttcttctgggacagccgccttcttggtaattttgaagttctttttacaagttccttcctcagtttcagttctttccagtgttttgtagctcactgtcactcactgaatagagaaacgtgtgccctatacttcctgtgacaatcattttgctgacagaatgatggatgtttaaaatattgcacaaagtactttaaagaaaggtctgttaggaccagaagcagagacaccacttttcaaaggacttcttggtttcagcataacctaagacagggaattgggagccatcatatgtcacagtgttcagaattcaagcatatttaagggcattttctttgattctcaaagttcagcattcattttgaattgagaagcctatacatttagctgacaaagtgcttatagaatttcttaacaactgaaccattcaaaaggattttttttgtttaaaactggatttcaatgtaagcaaatgaagaaaaaaatatagatttcatttccatagcttcttatccctgtattgaggtaataaattgttttactgacaatttttcctttttctacactaaaacaatatgtgatatatttcccctcttgaagaggcaattcattaaactctcaaattttctatagaatcaagatagaacctttagatactccaactcaccaaaatgtaaaaaaactaacaaaaatatttggtcttcaataatgctaaatatctacatttttagaatttatcaacatttaactagataattgggcatgtcttaattatgcatgtacttatccatactaataaaattgacaatgctagtgcatacttattggtttagtcctattatcaggatataatcatctgtgaggaggatattttaaatactgtaaatgataacagttaatgatatacacatttagactgagttgcacactggcagggagaccaaaaacattacttccatacttgtgtcatgattcttttttttttgagagagtctcactctgtcgccaggctggagtacagtggcatgatctcggctcactgcaacctctgcctcccgggttcaagcaattctcctgcctcagccacccaagtagctgggactacaggtgcgtgccaccacgcccagctaaattttgtatttttagtggagacggggtttcaccatgttggccaggatggtctcaatctcctgaccctgcgatctgcccacctcagcctcccaaagtgctgggattacaggcgtaagccaccgggcctggcctgttttatgattcttaatagttacttggtttaaatcacatttgatactatccttctgaaaagtctgagacagatctacaaactacagtcaaaattatagattaagaggaatgaatgcacctatttggctttaagttgaagatgaattatttctcatgctcattttcttgcggcagttatcttagaaagacccccaaaggctttgtgattgtaagcactgtcatgatcaca

SEQ ID NO: 10185 - DNA, 6000 bp, Homo sapiens
aataaattctacttctaaatttttatgtcatgcaaaattaataaatttaacaatgattttattgaatccaaagagtattatattcccaaaccaaaataaggtaatatatttatagttcattttgaactaatgcagacactaatttaattcaattttatattaactaaatgttgttattgttaaagtttatgattcaatgatttataaggcatgatatcaaattcaagttggttgtattgattgcctaattgagtaagtagtgtgggtgctacctaaagcattacaacaacagtatatttagattttactcatgatttacatgcatgattagggcatgattttaaatcaaaaaagttatttagaaagaatatttaattaaattttcagaaaataaagaaaatattttcttcataataataacatatattacatgttatattattctctaaacacttatgccacctgagttccagtttatcgaattactttgtgaaatacaggcataatattatacattcattcattttaactcttgctcatggaaatcttatgttcctctattttggcatattaaaatgttagaatggtttattttagaagctatgtaatcctgtcacctgatactagtattagcctctatatagagaataaaatattaaaattataataaatataggtctatatgtattcttctatatatttaggttacatttaatagtttcttattaaaccatttagttaacttttgttatttttagcactcgtattatttgttataaaagtgaaatagtctcagaaaaagaaacattattaactaataatactttccattctgtacagttctttgatgagttgtatgttcaagctattttatattgctttgcttgctaccttgataacatacctttattgtgtaggcactataagcatgaggatatgacagacttgtaagccttgtcatattccatttcctgcaaataaaaattgctctgcagtgttctggcattgacttcttgctgtaatataaatggcagcccaaacatccatgaccttaaacataattagcgttatcactaatgtgtgttttgtaagctagtattaggtatagttgaaggacgatgctatctgatcatggtcacttacaaccgggatgcattgccttgtttttagaattttctggtaagcggatggcagcagccaatgtgaagtagttgcctggaagtaagactcctaatggaatactgaataaaatatttccctttagccaaaagtttccatttttcttgattcttctttcttaccttttcctcttctgtgctactctcatctattttctccgtattttcttctctcctttccactgtttttctccttggtaatcctctttctctccctcagattcatacttattctgtcttctcatttttgacatctggctccaccaccagtggaggtctgtgtgattgtgtactcattcattcttcatccatccattcacttgttcctaagtaagaaattattgagtctgctctatgttagacttatgcaatgacattatagagggaatatggataacaacaatatctgttttttttgtttttgttttctttttttttttcttttttttctttttttttttttttgagacggagtctcgctctgtcactaggctggagtgcagtggtgcgatcttggttcactgcaacctccgcctcccgggttcaagcgattctcctgcctcagcctctggagtagctgggactacaggcatgcgctaccacgcccagctaatttttatattttcagtagagatggagtttcaccatgttggccaggatggtcttgatctcttgacctcatgatctgcctgcctcagcctcccaaagtgctgggattacaggcgtgagccaccacacccggccaacaatatgtgtttttattgagagtttgctatatgtcaggcactattttcagtgctttatatatcttaacaaatttagtctttacaacagccttaagaataggcccattttttagtcttcattttactgataaaagaactgaggtacacagtagttaagtaagtcgcccatggtcacacagttaagaagtggcagaggctagaagacatactccatctttagagtgctcagatttaaccactgttatctttccttttagatatttgagcatgctattatggcacgatgtagtgtggctatagtggagatgcagtgggatctttgggagaaggagccccacaactgggaaaactgggaaatgcttaacagtgactcttgaacagatttcccgaagtcacctccttttaaatttttgaaaaataaaattacacccagacattatcagctgttgataaaagtaaaaagcactgagtccatgattagaaggggagaagagcatttgcttgtttttgttaacgggtgtgtgttaaaacatataggtgtatattgcatttaataggtttttctttatttttttttttttggtgcttatatctagagacatttggcagctgataattgatacttaataccaagctttggaagagttgtaataaggacctcagagtcaaaatcagcagagttttcttccttcaagtttccatatctttaattaaaccacatcaaatgaaataaataatttaggtctggaataatttaggtattgaagtgaatttgagaatttgagtagattgtgaatctcacttgttaaactatccagttgcttaaagttaacactctactaaccattactagtcatcacacactaaagttaatatggtatatagaacggaagtggtcacagaagaatcattatatctatatccatttaataagtgataaaacacaagtgaaaatagaggttcataattattttcaaacttgtacagaaaagagaaaactattactttttggtctacaaatacacaagaaaaagatgtcattaatttatatctttgctgtcataatatcattcctcatatatttgttcaattctggaaaattgccagaagataatattttaaatgttgatcactgttgaatttgcatagttcaaatctatttctcattgaatatatatactactgtgttttagaagcactactttttttgcctcaattatttatgtatgatgtcattttcctacctgtccctcttgaaaaagtatttctaaccatggaacataacgtgttgtgaaaaataacacttttattgttttattgtgttttggcaacacacatagctcccttagctaatctagagaagagcacctcttcacttaatatgcactctgaaaatcttgtttgaaagttctaggtaacacaaaaatacagtctggagtacatgacctatgacctgtatcagtaaggaattttgacctcattttaatctgatcttctatctgcttttttcctacttccttttgcactgatatgatttgtagacattaacacaaagtaagtaataaaaattggcaattgtagtaataatgttgcttccaaaagtatttaaaagacagataatttgatgaatgtttgccttttagcaaaaactaatggaaactcctagctctgttttgtttttatgcttttctgtttcttcactaatttctgaaattttcaaatttattgagcagtcatttttggaaaaaatggaaaaaaattctgcttttatattccaaccattcttcttcaacaatgttttgttgcttttgaattttatcatgctttggatattaaaaacaaacttacatttagagggaaataaagagacactctaaaatctaaaacactttgagagcagctattgtaagaaatacagaaatgtcaatagggtgataatcctgaccctaacttagaaagcactatgctagcttttggctggttgaggaatctgggaatgatttaggtggtacagtggatcagtagtatcataccaaagagagaaaaggaaagtatcttttatcactaattggaaactttgttttcaaatatttcttggattatttacaatacacatggaacagtgtgtccacacaaccttcacagaagtgttaagaaattagaatggcaaatcctctttagaaatgtgtaagtgcagatagtcaccatttgaaatgaacacatcatggtggtgtgcagtggtgagaaatggtcagtaacaatggacatgattttgcaaaaatccttcataaaagggaattacaaagagatgacaataccttttttgggattcctcatcctcagtctcttactgcttactaaatgtgatcctcatgtatgcattttaggagcatcagcttgcataagaaaatattttcattttaattcattacataaagaagtatattgggttgtggctttgatatttttatggccgtgatagtaatgctgtattttagataatagtaacattctatttccataattgtttttccatattaattataccataccatctcataggtgaacttactgtggaaaagatctgaatgaaccatcatgctttaacccaagaaaaaaaaattatgacttcatgtctcaagttaacatggtactttccttgggtaatcatttattatcatggtaggaaaactagatgttctcatgcttttttaaataatggcttcaatatttcaatatggatttatttctttcttcagggccggtgcataaacttctcccgagttccatctcagtaaaagggaagcaggaagaccaagaaggtacgaagatggcacattttcacatagctgattttcaaccaaatgaaaaaaatcaagtgcatttcagaagcttttggaagagcagcttaattcctctcagtcgggaaatgttttctctgccttctgctttgcttgcaccaaacatttctaaacacttgttctgccatctacatgggaggtgatgaaactcagtggtaactcatgatttatgacattgaaaataaagaggaacattgacctgcagactatggtttgtacaagaaagtttgtttgaatgtgtagaagaggaaaaagcaacaacagcaacaacacgaagatgataccaaaacaaggaccacaaaacaactagccatgatgggagacaggagttttttacatggaaacatggcacttgtgtttttatgtggcaagatctttatccataggcagagtatgaaatttcccaccaggctaagcaaataaagaagtccattgccttatagctatgtcagatcacagaatccttccaagtgctctatcacagtgtgccttatgggaagtttctgactggaaaatcttgtcattctaacactgaaaagtgcacacgcatgacaaaatgtagacaagatgcctcaaggtattggtagcaagcaagattttgccctttagttttcgaagacacctttctttcattatgcactcgggacaagaaaattaatagagcgttattccacagaaggcctctagccagagatcttgagtgtagtgcaagggactcattttttgcgaacttgtccctgtgactagtagattcccccttttcctgtgtttaggatttagtagtgcataaagcattaatatccataaacatacctagaagtttgttttgcttttaatttaaaggaagcagtaaccacaaagcttccgctcagggttttttctttcttcaagtctccaagggctcttcagcgtcacaagccagcaactctctttgcattaaaatttcaaagtttaattaatataattaaaagcaacagcaagcagcagcctgtgaagattttgctcatcttttttatgccttttgacattgaatgacctattactgtatgcgcattacttggattttgaggggcactctaccttggttatgattcagtagaggaaaaagaccacctttcttcaatttacaaattaaatcttctggagggtcgctatcacaaaacattgacgatgtatgtattataattttttagaaaaaccaccatcgtgtcacgt

SEQ ID NO: 10186 - DNA, 6000 bp, Homo sapiens
cttgaagccctttcaatggcttctcattgctctaaaaatattgcaaggctcagcaatgtttgttcctacatcctcagctgtccccttgctctctctaatccagacaccccagccttctctcagtcccctcactatccatgctctcacacaccacaggacctttccacaggccattcccctagccttgaatgatttccctctacctagttgtctactcatctttcagatcttaagtgtcacatcctcaatggcccctccccccaaatcgaaattctacctcatacacacgtaaagcaccatgatcacctttggagcacctaccacacttgcaatttcacttttgcgtgatatttttaaattcattattattattattattattattattattattattattattattttgaaacagagtctgtctctgttgcctaggctggagtgcaatggcgcaatcttgggtcactgcaaactctgcctctcgggctcaagcaatactcctgacttagcctcctgagtagctgggaccacaggcacatgccaccatgccagctaattttttgtattttgggaagatacggggtttcactatgttgctaacgctggtcttgaactcttggagtcaagtgatccacttgcctcagcagtgagattacaggcgtgagccaccaccatcctgtgatttttaaaataccttctacttccccagtaagacttcagagcacaggaacaatccctgcttgctgcttacagttgcctagctcagtgcttggtacatagtaggtgcccaataactacttgaatgaatagatgaataaacgaatatgtgaaagcacattgtagaacaccatgcatgcaatagatgttaacttccttcctttcaccattcagcaaaaattttctcttaatttctccttgctttgaaatacagtttgattggcaaataattaaaagcaaaacttaactttagaaagtcataacccaataactcaaaacaacacatttgtaactatttatttgcccggagataactacaaatgcctaaaagtttgcccacattcagagatttctacattagaaaagtcttaattttctaaacagacaagtgataagattatcattttctgaaaatatcctgaaatcagtctgttgttttacaagtgtttgtaattgttgaccaggtaaaccttgtgtgaatccctaaaaacccaatgccagtactgaaaatcaatccacagaccacatggaaatgagatcacatgataattattttttgtatttttatgcatttattttttatttattaatattttttgagacagagtctcacattgttgtccaggctggagtgcagtggcatgatcatggctcactgcagtctctatctcctgggctcaagcaagcttcccaccttagcctgtgaagtagctggtactacaagtgcatgccaccacatccagctaattaaaaaacattttttttttttttagagatgggatcttgctatgttgccctggctggtttcaaactcctgggcccaagcgattctccctcctcagcctcccaaagcactgggattacaggtgtgagccactgcacccagccccataattaataaagcgttcacataaactttctagttcatttaaagttttttatttctaaatcattttcatcacataatttgtgagtccctaaatctgcgtgaggtagtggaaaaactctgggcttggaatcagaaagctgtaaatctactttacaaggttattgcaaagattaagtgggggtaataattttttaaaaaataatctctcatctgttaaacacatacctcacattgtagatggagctagctgtgttacattattgtcaattaattctttaaaaaaagactatgggccaggcatggtggctcatgcctataatcccagcactttgggaagcataagtgggtggatctctgagctcagcaatttgagaccagcctgggcaacatggaggaaccccatctctaccaaaaatgcaaaaaattaacagggcatggtggggcacacctgtggtcccagctacttgggaggctgaggtgggaggattgcttgagtgtggaggtggaggtttcagtgagccaagatcacatcactgtattccaacctgggtgacagagtgagaccctgtttcaaaaaaaaaaaatcttatgaaatatgtattattacccctactatatagatgaagaaattgaggctcttggaaattgacgatctggcccaagattgtacatcccatcaagctgcagggctaagatgtatgaaaaagggctctagctaggatgtatgtagctgtaacttgctataaaaattaaggtgtcttattataaaatatctctgaaatgatagttcctattaatattcctatatgttcctccttcctatgtatccatatcatacatccttatcagacattgtaaatcaaaccaaattagaagcaggagcaagatctcagccaacagatcatcatgtgtgcaaattgcttctctgccccctcgtttttgttttcccagtttcttttctttttcttttttttcttttttttttgacagggtcttgctctgtctcccattgtgcagcggcatgatcttggctcactgcaatctctgcctcccatgcaattcttatgcatcagcctcctgagtagcttggattataggtctgcgccaccactcctggctacaccatgttgcccaggctggtcttgaactcttgggctctagtgatccacccgccttggcctcccaaagtgctgggattacaggtgtgagccatcacacccggccccccgtttccatattagtaactcacatgtagaccacaaggatgcactatttagaaaacttgcaatggtccacttttcaaatcacccaaacatgttaaagaaattggtatgactgggcatggcacagtggctcatgcctgcaatcctagcattttgtgaggctgagacgggcagatcacgaggtcaggagattgagaccatcctgacagacatggtgaaatcccatctctactaaaaatacaaaacaattagccgggggtgatggcaggcccctgtagtcccagctactcgggaggctgaggcaggagaatggcgtgaatccaggaggcagagcttgcagtgagccgagatggtgccactgcactccagcctgggcgacagagcgagactccgtctcaaaaaaaaaaaaaaagaaagaaattggtatgactgttgactcacaacaggagtcaggggcatggggtggggtgtaagattaatgtcatgacaaatgtggaaaagaaacttctgtttttccaactccacgtctgctaccatattattacactcttctggtagtgtggtgtttatgtgtgaattttttttcatatgtatacagtaattgtaggatatgaacctgattctagttgcaaaactcactatgagcttagcttttaagttgcttaagaataggtagatctatgcaaataatgataattattattattattttaagagagggtctcactttgtcacccaggctggagtgcagtggtgtgattaagggtcactgcaacctccacctcccaggctcaaataaacctcccacctcagcctccccagtagctggaaccacaggcacgggccaccacgcctggctaattttttgtattttttgtagagatggggtttcatcatgttgcccaggctgttcttgaattcctcggctcaagcaatcctcccaccttggcctcccaaaatgctggcatcacaggcatgatggcatcactggcatcacataccatgcctggcctgatttatgcaaattagatatgcatttcaaaataatctatttttatttgttgccttattggtggtacaatctcaagtggaaaaatctaagggttttggtgttatttgcttactcaaccaatatttattagactcttactaagcaccaacatgatcacatgcctgagctatggctagcatagcgtgtgagacaaacttaatctctgttttggtggagcatataatctagtagatgaagccaatgttgagcaacatcacaatactaacaaattgaggatgctacgagagtgtctaacaaattgaggatgctacgagagtgtctaacaaattgaggatgctatgagagtgtgtcatggagagctgcctggagattgagagaaagcttccttgagggaagttacatttcagctgaaacacactgccatctgctcgaggttttgtaactgcattcacatcccgattctgacacttcacatcccgattctgacacttcacccagttactgtctcagagcttgggtccgcatgtgtaaaacaaggacagtatgcacttggcagggttgtgagaagggaagagaacacaagtaaagcacctgtatcaggcatacagtaggcactaagcgtgcgatgcttgctatgattatacatcagtgtaagcatcaaggaaaagctgaagaaaagtctgaccaacagcgaaagataaatgcgcagaggagaaatttggcaaaggctccaaattcaggggcagtccgtactctacactttgtatgggggcttcaggtcctgagttccagacattggagcaactaaccctttaagattgctaaatattgtcttaatgagaagttgataaagaattttgggtggttgatctctttccagctgcagtttagcgtatgctgaggccagattttttcaagcaaaagtaaaatacctgagaaactgcctggccagaggacaatcagattttggctggctcaagtgacaagcaagtgtttataagctagatgggagaggaagggatgaatactccattggaggttttactcgagggtcagagggatacccggcgccatcagaatgggatctgggagtcggaaacgctgggttcccacgagagcgcgcagaacacgtgcgtcaggaagcctggtccgggatgcccagcgctgctccccgggcgctcctccccgggcgctcctccccaggcctcccgggcgcttggatcccggccatctccgcacccttcaagtgggtgtgggtgatttcgtaagtgaacgtgaccgccaccgaggggaaagcgagcaaggaagtaggagagagccgggcaggcggggcggggttggattgggagcagtgggagggatgcagaagaggagtgggagggatggagggcgcagtgggaggggtgaggaggcgtaacggggcggaggaaaggagaaaagggcgctggggctcggcgggaggaagtgctagagctctcgactctccgctgcgcggcagctggcggggggagcagccaggtgagcccaagatgctgctgcgctcgaagcctgcgctgccgccgccgctgatgctgctgctcctggggccgctgggtcccctctcccctggcgccctgccccgacctgcgcaagcacaggacgtcgtggacctggacttcttcacccaggagccgctgcacctggtgagcccctcgttcctgtccgtcaccattgacgccaacctggccacggacccgcggttcctcatcctcctggggtaagcgccagcctcctggtcctgtcccctttcctgtcctcctgacacctatgtctgccccgccagccgctctccttcttttgcgcggaaacaacttcacaccggaacctccccgcctgtctctccccaccccacttcccgcctctcattctccctctccctcccttactctcagaccccaaactgctttttggggggtatcatttaaaaaatagatttaggggttacaagtgcagttctgttccatgggtatattgcattgtggtggcatctgggctcttagtgtaactgtcacccgaatgttgtacattgtatctaataggtaatttctcatccctcatccctctcccaccctcccaccttttggagtctccagtgtctactattccactaagtccatgtg

SEQ ID NO: 10187 - DNA, 6000 bp, Homo sapiens
aaaaaattcctagacacatataacctaccaagaatgaaccatgaagaaatctaaaacctgaacagaccaatagcaagtaatgagattaaagctgtaatgaaaaatctcccagcaagaaaaaccctgggattcaatggctatattgctaaattctaccaaatacttgctagaaaaacaaatactatcctattcaaactattccaaaaaggaaaggaaaagggaacatttccaaactcattctacaaggccagcattaccttgataccaaaacatgtcaaaacatatcaaaaacacaatgataccagcctgggaaacatggtgaaaccccaactttacaaaaaatacaaaaataagccaagcatgatggttcatgcctatagtcccagctactcaggaggctgaggtgggagtatcacttgagcctgggaagtcaaggctgcaaggagctgtgatcatgcaaccacactccagcctgggcatcagagtcagaccccgtttcaaaacaaaacaaaacaacaccaaaaaccaaaaaaccccacaaagacaaggacatattttttaaaaaagggacaggctattatcagtgatgaatattgatgcaaaaatcctcatcaaaatactaacaaattgaatacaaaaacaaattaaaatatcattcatcatgaccaattgagatttatcccaaggatgcaagaatggttcaacatatgcaaatcaattaatgtgataagtcatatcaacagaatgaagggcaaaaaacataagatcatttcaattgatgctgaaagagcatttgataaaatttaacattccttcatgataaactcccccaaaaaaatgggtatagaagaaacatatctcaacataatataagccatatatgacagacccagagctagcatcgcactgaatgggaaaaatactgaaagcttttcctctaagatctgaaacatgacaagaatgtccaatttcaccactgttattcaatgaagtactggaagtcctagctggaacaatcagatgagagaaagaaagaaagggcatccatattggaaaggaaggagttaaattatccttgtttgcagatgatatgatcttacatttggaaaaactaaaaactccagcaaaaacctgttagaactgataaacaaattcagtaatgttgcaggatacaaaatcaacatacaaaaatcattagcatgtctatatgccaacagcaaacaacctaaaaatgaaatttaaaaagtattaccattcacaatagctacagatacaataaaatacctaggaattaaccaaagaaatcaaagatctctacagcgaaaaccataaaatattgatgcaagaaattgaaaaggatacaaaaaagggaaagatattccatgttcatggattcaaagaatcattatggttaaaatgtccatactacccaaagcaatctacagattcaatgcaatccctatcaaaataccaagacattcttcatagaaatagaaaaaaaaagaatcctaaaatttatatagacccacaaaagacccagaatatccaaagctatcctaagcaaaaagaacaaaactggaggaatcacactgacttcaaattatactacagagctatagtaaccaaaacatcatgatactggcataaaaacagaaaaacagacacatagaccagtggaacagaatagagaacccagaaacaaatccatacacctatggtgcactcatttttgataaaggtgccaagaagatacagagggtaatggacagtctcttcaataaatggtgtggggaaaactggatatctgtatgcagaagaatgaaactagacccctatctcttaccatatacaaaaatcaaatcaaaatggattaaagacctcaaactatgaatctatctaaagaaaactttgaggaaactctccaggacattggactgggcaaagatttcttgaataataccccagaagcacaggcaaccaaagcaaaaatggacagatgggaccatatcaaatttaaaagcttctgtacagcaaaggaaacaatccacaaagtgaagagacgacccacagaatgggagaaaatatctgtaaactctccatttgacatggaataaataaccagaatatacaaggagctcaaacaactctataggaaaaatatctaatagcctaagtataaaatgggtgaaagatttgaatagacatttctcaaaagaagatgtacaaatggcaaacaggtatatgaaaaggctctcaatatcactgatcatcagagaaatgcaaatcaaaactacaatgagatatcatctcaccccagttaaactggcttttatctaaaagacagtcaataataaatgctggtgaggatagagaaaagaaagccctcatacactgttggtgggaacataaattagtacatccactatggagaacagtttggaggtttttcaaaaaactaaaagtagagataccatatgatccagcaatcccactcctaggtataaatctaaaagaaaagaaatccgtatattgaagagatatctgcattgctatgtttgttgcagctgtattcacaatagccaatatttggaagcaacccaagtatccatcaacagacaaatggataaagaaaatgtggtacatatacacagtggagtgctatttagccatgaaaaagaatgggatctggccaggtgcagtggctcatgcctgtaatcccagcactttgggggccgatgtgggcagatcacgaattcaggagattgagaccatcctggctaacgcagtgaaaccccgtctctactaaaaatacccacatggtggcgggtgcctgtagtcccagctacttgggaggctgaggcaggagaatggcatgaactcggaaggtggagcttgcagtgagctgagcttgcaccactgcactccagcctgggtgacagagcgagactgtctcaaaaaaaagaagaatgagatcctatcatttgcaacaatacagatggaactgaaggtaattatgttaagtgaaacaagccaagcacagagacacaaacgtaacatgttcttacttatttgtgggagctaaaaattaaaacaattgaactcatagagatagagagtggaagaatggttaccagaggctgggaaaagtattggggaggtggggggaagtgggatggttcatgggtacaaaaaataattagaaaaaataattaagacctagtatttgctagcacgacaatgtgactgtagtcaaaaataatttaattgtccacttaaaaataacaaaaacacattagtcacatgtggtggcacacacctgtaatcccagctacttgggaggctgaggcaggaggattgcttgaaccctggaggtggaggttgcagtgagctgagatcatactgctgcactccagcctgggcattagagtgagaccccatctcaaaaaaaataaataaataaataaataaaatgaaaaaagtataattggattgcttataatacaaaggataaatgtttgaggtggtggataccccatttaccctgatgagattaccacacattgtgtgcctgtatgaaaatatctcatgtaccccataaatatatacacctactatgtacctacaagaaataaaaatttaaaattaaacagaaaaaaaaaatccctgacggagttattgcttaatgattacagagtatctgtttggggtgacaaaaaagtcttagaaacagtgacggtgacacaacattgtgaatgtaattaatgctactgacttgaactcttaaaatgtttcaaatggctaattttatgttatacatattttaccatattaaaataaatttataaaaatagataaatggaatttcttaacaacttcaagattttttaaacgttcatttcatttcaataaatatttacaaaatgcctaatttgtcctaggtactgcacaacacagtgaataatcaggatagtgacttaaatataaacagaacttaacagcaagacaaattcagtaatcggtattttgtgaatctcatgaaatttatcatgacaactctgtaaggaaggtattattgttatcactattttattgttggggaaggcttggcttaagaagcttttcaaggccagtaaacagtggaattagaagcacttagtaaatgtcatattttttcttttgacatctatcatgttttcagaatatgaaatgcctatttaactccagcctgggtgacaaagtgagatcttgcctaagaaaaaaaaaaaaaaaagccaggtttggtggttcatgcctgtgatcccaacactttgggaggctgaggtgggaggattgctggaggccaggagttcgagaccaccctggccaatataacaagaccccgtctctatttaaaatacacacacacacacacacacacacacacacacagagagagagagagagagagagaaatgcctatttagcacagtcttgacttcctattttacttttggtttaggaaagaataacatgaaaagtatagcatgctccaagtatacagcttctcggtcctctttagatttctggtgggcctttgcattgaaacctaactctttgttttggtttaattcgcttccttttcaaattatgtcatagtcctgcttggttgtttttttgtgtgtgctagaaggcagggcctgtgagaggagaccctcagttacatcagggttaaaaaagcacaggaagtttacgcacagagcaaagccatttgctagaattggtttttatccttccatttcgaaaataaagttgctgtttgtgttggagatgctgtcatcagaattccgcggcacaaagagaaagatacaaaaatatctctctgacatgtaactttcccccttcttctagccccttgctaggaatgccagaagaggatcccacgctgactggaaccattaggtcttttgtttgaatcccagtgatcgagaaagaaatgtggttcataatcagctagtagtggagaaaaaaggaacccaaggagataggagagctgttaatttcactcgggacatttcctcgaggctagtttactcggaaagcctcaatgttccctggtagctgcaggatctactttgggggctgccaagtttcctctctcattctttctcctgccccaagagcaggcaggaaggaaagttcctggactgatactcgtctgtttagtaggcgtgggtcctggttgaagtctgtctaggaaaactcctaagtgtagaaatcttcttcgtattaccactgtctctgcactgagatttgggctgctttgcttccagcgtcacacatcataactgaggtgagttgtttgtttttgttttttccaatcttcatacttcgtagaaaatcttgattcttttttgatatgtgctttaacaaatgtgtcacttaaattggtacttctcatacactaacttgcatatgtatcacctggagatcttgctgaaacgcaggctctgcagaactcagggggcctggggtgggcctctgattctgcacatctcagctgacctctatggaccacactttgagtaaaaagggctcaaactctgtcagttttttgcatttttggaaggggttgggcattgtaggcaggataagggtatttggctgaacacatgatttatgttgagcacctgagaagacaatcagacaacatccttttcctggctgtacctactttgatggctatctctgtgctttggggtttctgttaagcagatcctaggtgtggtaagccagattacccctaagtgagagaggatgttgggcttctccttagattatataggccacttggagcagagccagaaatccttttgtaatttttgtattaactgcctatatcatgcctcatctggtgtggctggtggtcactttgaacatttcagcttaaattgaaaatatggccgggtgcggcgacagtgcgagactccgtctcaaaaaatatatatatatatatatatatgt

SEQ ID NO: 10188 - DNA, 6000 bp, Homo sapiens
atttaggattaaataagtagaatctgcagtccagctcagccccccaatgattgttgtttccgtggaaacagttgaaggctctcaattaaaactgcctctgaaggctggagagagtaagtattaaaatgagtttgtctgagaagccaatttttatcctccaaattaaacccagagagtgcagatgatctaggaatctcctgacagttgggatcatacttctttgtctttgggggagggattattttgctatttcgggcataggtatgtttgctagcttgttgcttgctttgctgagttgctcagatcatcgtctttgttacccactgagctctttatgtacaaccatggatcatgggcaagggtttgggagcaatctgatctttgttcagacttgtgagccgcaactaaaaagcccattaaaaatggatgaaatcatagaacggtctcaaagttgaaaggaatcctaaaggtcattaaggcctaatttcccatccactttgggaatctttcctagaatgctgttgacaaaggttcacagcatcagcaaccctgttggggaatcccgtatttctcagggcagccttctttggttcattgaacagacttggtggtattgttaccgggggtccttgttcttagagctcccaagatggtggcgggccgcttccaaggtggcggcaagcctcttgttctctgacctggggttcttggcctcacggattccaaggaatggaatcttgggccatgcatgcggtgagtgttatagctctatccagctcgattaggatgaaccctgggcacttagaccgtgcaggaacaatggcgagcctctagcccgattaggagtggcagtgggcacctcgctggatcaggagcacagcggataccctgccggatccggaggggtggaagtcagtggtggcttctacaacgacggcaatcagcagtggtggacggcgagtgaaagctcagttcgaaccagaacaaacacagaccagagagtgtgcagtttgcaagatttaatagagtgaaaacagagctcccatacaacgggaggggacccaaaggggttgcccactccctgcttgaatgcctgagtttatatctcgatcattgtccctccccctgtgctctcaggcgatatatgatttgacaatttctttacctcctgctttagcctaatttgtattttagtgagcctatttactacctgattggttgggtgtgagctgagtagttacaagccccatgtttaaaagtgggtgcggtcacctttcccagctaggcttaggaattcttattcggcctgggaaatccagctagtcctgtctctcagtattagaaatgcctctttatgatggaactgacatttctctctgtcaattctgctactgctacctcttctttctggtgccaagttagctgtgtcttcttctcccataattaagcttaaagtcttttaagaatgtcttcatgtatccccaaagtcttctctctcttccggtggctgagaaggtccataacctgaaagcttcaggtactaacatctgtggttaaaggcattgtcagaggagaggctggtttcctaacaaccctgggcctttagcactgttgcttggattttttattttaagtttatttttgtagagaaagggtctcgctatactgcccaggctggtctcaaactcctggcctcaagcgatcctcccacttcagcctcccaaagtgttgggattacaggtgtgagccactccacccagcctgttgcttggattttgtccgacttctctggcaagttttttctcagcatcatttgtataggtggagaatttggtttgagtatttctgttttccttcaaccttttcccccggagtaaatattcatagttcactgcttggaaacccaagaaacaaaattggatcaaacctttggtctatgcagacttgtgaagggtgtggttgccttctttgatgtcacctcagaagttaatgaatacaacctcaatcctaactgctttaatagcctttcaaccatttgtctgtgacattaaaccttagactttttaaaattaggtttaagttttacattataagagttctttatttccccatatacattctgttcttaatatcctattattgttcgtaagttgacacccccctaaaggaagaaacagacagaaaaatagaacaaacgaaatacgcttctccaaatgttcctacctacaacctttaaatggattaaaacttaaaactcctaagttcagatgttggttagtgctgactgggaagtactgggaagcaagtgtgtggcccctgcttggtactgaaatagacattgtgtactggtttcaaagaagcgatggcgtctgtcaccttcagcccatcaccaaactgctctgagttccattttcctcaagtataaaatcagatgattgcttcctgttcttacaggttattgggagtgctttgaaaacaatttttttttattattaaggctttacagcaaactatactgtgattctctggaggtattttgatttgagagtaccaaacaacttcaataaaattaaaatattggtgatattggctgtttaaggcccatgcacatccacagtttcaaaataatcttgtaacataggttctgggtggtatttaatatggtatcacacataagggaagaggggatttcagtaaagaaatgtcattttttgtggaaaagtgaaattactcgaggtccgtttggtgttcttgtggaagaagaataagagttgaaagtgaggaagtaacctttgatttgtaaatcatttaaatttcaactcgaagggggtaagaaataccccaacagcaagccacagaacagccaccagagcaaaccacacaaggcttttgggatctcagcctaataaaggtctcccatggagctcaagagtagatcctgaggtacgatattttcttggaaaaaaaaaacttgtaggtgtttgtagccggaccgggtgctgtgttagttttcagcttctagctcgatcctatttcctgagaaatgccaagggctttgcaataggcatttgtctaacttctgcgtgaattgggtcttacagaagatgacctcccccctctctgggggtcagggggtgtgtgtgttttttatacatctgtctttttttgtttgtttgtttttactgaagacctcttatatttgcagacactgaaaccaaaggtaacaccacgtcttctccttacagggtctaatgacagtttcttgggctcttcttttcttttttttttttttttctctacatatagttttcccaaaaatatgaacacgtttagatgttggaaagaaagcagtttccctccctccttccctccatccccccctccctcccttcctcgcttcctcccttcctcccttttgtttctctcttttctctttctctctctttctctttctttctcactctttctttctctttctctttctctctctctttctttcctctcttaagtattaatcacatacctgataatcagatgccctctgaaggttttctttgggaggggaaaggacaaatgcaataatctttacatgttggaaaactgaccccacatccccgtgccttgttgtgtgttcttttctgctcccagggagttctgtccaacatctcttccatcaccgatctcggcggctttgacccagtttggctcttccttgtggtgggaggagtgatgttcattttgggatttgcagggtgcattggagcgctacgggaaaacactttccttctcaagtttgtaagtattccactctctactctcagattgagagccaaaactttaccttccatcaggaggtcaccctatctacaggcaagacagtgagctgtaccaaaggcactggccaaagtagggcccaggtcattattttcttttgagagagctctctagccctgattcccagttgtgcctccttaataagtacaacaccacccccaccaccccaccatgccatccatggaggttttgtgcatatatatcacagacttggattccattccctaagatatctttaggactaaggtaggtatatatatatattttcttctaagtgattccttcccaccgttttaatgcacatagtaagtggggagctgtgcaggctgttggtttggagaaaccaggcaaaagcacagtgactgtggcctgtccagattaaatctgttaagcagtaggttttgctaaatatggagaaacagtaaaaggtaaagcttctttgtccttagctggtacaaagttctcctttgtaatttttagatgtggtgcggttggcgtgatcactgtctgagtgaatgtttgtagaggagaggtttcaccagggggttcactggtatttaaagttaaaatagagaatgaaaagtgaaagcctttgcgttggagactcgtttcaaaggagaagaaaatggcatgtgccgtttatgtatcttatatagggttgttgaatgtagccaaatgtgcctgtcagcatggagcttggcactctgatgggcgtctgaatcatagctctctatacgaagcatccattcccctttctaagaacagagaaaggatccaaagcacccaccttcatttgctgaggaaggatggggatggtggagatttctagagaacagttgtagtgtaatatttcctgttaccacagttattcccaacttttgttgacacatcatcatccagggacattctcattaaaaaaaaaaaaaaaaaaaaaaagcatatccaagaagtagcccaatagtcatgtaatgtgtgattctcttccccagcatttctgccacatcatcctccagcgtcttttcttaaacatccctgagaagagggtacacggtgtgccccacccagggcagcccatttctgagcagctctgtctcggagaagtttttggaggctatttaacctgaaaattagcatgacttattctaacaaggagaaccgaggggtacctggtcttacagataagttcacaagcagctggttctctcttgtggatacatgggaccacagtggctgtagctagtttcctaagactccatctgccttatctgccagatccttcctttgccacacacacacacacagtgtctctctctctctccctccctctctcatacacacacaaccaaatgcttcattcttcacctagtcagaaacctggggagcccccaggagagctctgtccctgattgccacctgccaacctgccagtcttcttggcttgaggcatctcagtgctccagtgctcagctcaccttgccagctttcctgtagcctgattgggtcctggtcatactcatctgttgccactatttcatcagtttcggcctccatgccccaaaatgtgggatccttttttttttttttttagatggagtttcactcttgttgcccaggctggagtgcaatggtgtgatctcggctcactgcaacctctgcctcctggattcaagcgattctcctgcctcagcctcccgggtagctgggattacaggagcctaccaccgtgcctggctaattttttcatttttagtagagatggggtttcaccatgttggccaggctggtctcaaactcccgacctcaggtgatccacccgcctcagcctcccaaagtgctgggattacaggcgtgagccaccatacctggctgggatcctctgaattgtattttttttttttaagtaaagatggggtttcaccatgttggccaggctggtcttgaactccggacctcaagtgatccaccttgctcagcctcccagaatgctgggattacaggcatgagccactgcacctgctcagtccccttaattgtgatttactttaatatagtttcatttatagtggtggcccctttaatatagtttatcatttcttacagttgaagagtccagtgttaactgaacaggcagaaaactacacatttctctaaatcagcaccttaatt

SEQ ID NO: 10189 - DNA, 6000 bp, Homo sapiens
gcatgtaccaccacttctgactaatttttgtatttttagtagagacagtgttttaccatgttggccaggctggtctggaactcctggcctcaggtgatccacacaccttggcctcccaaagtgctgggattacaggcgtgagtcaccatgcccagcctaatttattttttgtagagatgagggtcttgctatgttgaccaggctagtctcgaactcctgagctcaagcaatcctcccatctcagcctctcaaagtcctgagattacaggcatgagcaactgcacccagataggacttcactgccttttgcaatatattataggtcacttattttctttctttttttttttttttttttttgagacagagtttcactcttgttgcccaggctggattgcaatggtgcgatctcggctcaccacaacctccgtctcccgggttcaagcaattctgcctcagcctcccgagtagctgggattacaggcatgcaccaccacgcctggctaattttgtatttttagtagagacggggtttctccatgttggtcaggctggtctcaaactcctgacctcaggtgatctgcccatcttggcctcccaaagtgctgggattacaggcgtgagccaccacactgggcccacttattttcttaacatcagcatgaaatgaaccaggggcatcatctttctttgtaacacccatggcatcaataacaataagtagaatccacaatagtaaaataacatttaattaaaaatcctggctaggctgggtgtggtggctcacatctgcaatcccagcactttgggacgctgaggagggaggattgcttgagctcaggaatctgaaaccagcctggtcaacatagtgagacctcgtctcttaaaaaaaaaaaatcctggccaggcgcagtggctcatgattgtaatcctagcactttgggaggccaagacgggaggactgctcgggcccaggagcgcaagacaagccctggcaacacaatgagaccctgtctctacaaaaaaattttgaaatctagccaggtgtggtggtgcacacctgtagtcccagctactcagtaggctgtggagggaagattgtgtaagcctgggaagttgaggcaacagtgcacatcgttgcaccactgcactccagcctcggcaacagagcaaaatcctgtctccaaaaaaaaaaaaaaattccaacacctatattttacagtaagaagaaaagtaatatactgctcatgagatgctccattttcctaaactttgatattcttctagattggtagataaaaccaagataaagcaaaaatatagaattagaaagttgcaaaggaagcaagaaaggacctaagaacaatgaacttttcaaatattttgtaaagtactatatttattgtttgcctaaattatttacttatttctagttttcaacccaaactagaaaaccttcccagtagctcatgcctgtaatcgcagccctttgggaggctgaggcaggcggatcacctgagtttgggagttggagaccagcctgacccatggagaaaccccgtctctattaaaaatacaaaattagccaggtgtgatggtgggcacctgtaatcccagctacttgggaggttgaggcaggtgaatcccttgatcctaggaggtggaggttgcagtgagctgatattgcaccattgcactccagcctgggcaacgagagcaaaagtccgtctcaaaaaaaaaaaaaagaaaaaagaaaaaaagaaaaccttcccaaatcactttaattccctgcataacaggccacaaaagtcagcactccaaacttagacacagcatattccttactatatttacctactaataaacaactaataaatgaggaaaagaaagtaaatcaaacgcacatataggttagtataaatttggttctggggtttggggtcatacaaatcttcttaaatcccatttcagctccaagaacaacataaaagacagtttttgtggaactctctaaacacgtaagtctttctagacagggttggctgggtccagggtatctagtgccaccatgaacagataaaaatccaagcccagggtgaacgtaactccaaatcaccaaaataaggcaccatctggagtcatgccagatacttaaaagtccccacttcaggctggacagacaacaatgagcttctgcagaaatagaacctatttttgaagtatatatcaagctaaaatgacacagttatcaatgtgaaagggaaaagcaaagggaaacaaaaatagaagttctagtacagtgccaagaactaaaaagtctttcctagaaatgagttctattgctaaagtgacactcatcatttattatgctatctagtgcttttatttcctgtcatttgggtacctaagcatttaacaatgcaatactaattttttctggacttttatccttacattggtgatacatatctcaaaggcataaatgaaaatttaaaaaatatcaccatgtacaagaacttattcccttacctaaaaaagaagactttaaattttatcttgtaatttcacttctaaataatgtctatacaagtttaagtagctaagaaagggtttagatacctcagatatccactgttaaaatctacttccctagcttcacaaatataattcaacaaatataattccttactcttacactgaacaagagtaagaaaataggatgtttgtttgtttattttttgagacggagtctcgctctgtcgcccaggctgtagtgcagtggcgcaatctcggctcactacaagctccgcctcccgggttcaccccattctcctgcctcagcctctccgagtagctgggactacaggcgcccgtcaccacgcccggctacttttttgtatttttagtagagacggggtttcaccgtggtctcgacctcctgacctcgtgatccgcccgcctcggcctcccaaagtgctgggattacaagcgtgagccaccgcgcccggctgtttgtttgaaaggggtgtgggtaaatatcctgggcagtcacctaaggaaatgcaccaaatggagtctcatattcttgtgtgaaacattcgggaaataatctaatctcttcaaatttagctcctcttttccatgggctttataaaaaaaaattacatatatatatatgtttaaatgtttactttggatgctatgtgtgtgttcctaagagacattttctttttttttttttcctactggtacaatacactaagcttacttagatttcaccagctgtatatgtactcattccatatgcttttgtggtctgaagtcatcacttggaggcaccaatggaaaagagcagtgtcagagggctgggattcctctaccagctgtgtgaccttgagtaagccaccttaacctataaacagaaagtaatatctgccctgatacatgatagccaattatttcacttagataaaaactgaatatctactatatatttttatgagatataaggaaagattcttcttgccgctttgccattttttcccataagaagcctggtggtaaagagcacaggcttaggatcaggagtcctgcatttcttgaattctagctctgttgcttgttagtagtatgatcctaggcaagttacttaatctccctgccttccatttccttgtacacatgagacaattcccccctcagaggattgttgtaaggatgagatgaagtaattcaatgagcattcatccaacatatatttatctaggagccattctgcttactgctatactggttaaaaatccccttgtccactatatatgtgccatacattgctagcccccaggaattaaaaaagacaatataataaagcgacattatggcaagaaaatactaacttttctacctatgtgtctttttggaaccaataatacaaatctgacttgtttttgtgagctgttacaaatgaatctgcaagactgaatccaagtacaaaatatcaggtcttgatttagaagatatttctgaatagcacgtttcaaggtttttggttttttttttttttttgagacagaatctcactctgttgcccaggctggagtgcagtggcgtgatctcggctcactgcagcctccgcctcccgggttcaagggattctcctgcctcagcctcccgagtagctgggactataggcgcccgccaccacgcccggcttttttttttttttttttttttttttttttttttttgtatttttagtagagacggggtttcaccgtgttagccaggatggtctcgatctcctgacctcgtgatccgcccgccttggcctcccaaggtgctgggattacaggcatgaaccatcgcacccagaccgcacgtttcaagtttaggtgttcaccagtgaactgcgcctggctgatacacacaaggtcacaaatgacacaaagatcagaagtgatggcatataccatacatgactgtgtaactagtataggacctagcatagggtaaatgctcataaatattaatttaaaaaaattaagtttggtttccaactttgccacttccacacagagtgactctgggttaacttgtctggatcttaattttcagtaaactagcaatgtgtctgcttcgcctatctcataggatacttgtgatcaaatgaaattacatgacaatgtatctggcgctaataaaacggtaatttatgagacacagaatgactactgacgccagctagcctacaagcctaatagtagagataagatgttaatacataaccaccaagaaataaacatggagatctagtgaaaacccatgacatgttttctaaaaatgtcatcttccttgtgacgaaaggagctggtcattgctaggcaggtgctgtacctttttcaactcccacgtttcagcagcaggctctgctgagtgacattttgcaaggctgaggcccccgtaggcgcaggcgccgttggggtgcgcatccggggacctgcaggttacaagcagcagatcccaccttcagtcctggctctgacaagccctccaggtaaggcgcctttgcatttagccgagctagagaagagagctggaagccacctctacctttcacggggggaagggactgcccgcgcgctcgcccccattatctcagccctccgaagcgcgccacggactccagccttgtctctcacccccagcctcaccccgcgtccctgacccgcgagtctcccgcccagctccgcgtccccggtccctgcctccaggcgcgtacacggcgcgctaagaggcgcggggagctcttagcgcacctactacttaaccggaccggctacttactggccgccaggtggaagcctgcgatcgagctggccgggcctcccagcaccgccgctctccaggctccctttccaggactcaactttggtcccagccccaatcgcagctccggtaacctttccaggaaccgaaatgctagatacagcggaaggagaaacggagggaggaagacaaacccggagcagggcggcgcggcagtttggacacgccccgagctctcctgggctctcagtccccgtcaggatgggaggcgcgtgccgagggaggaggctgaggacacagcctcctttcgccctgcgctgcccggccttccgcgtgaccccgcctatgacctcggggcgttccgcctacgtctgaccgtcaggtgcgcacgcgcacttacaggcttgttttgccagcttcacgccacccgggatgggagaaagcaggtgtcgcgagagttgggcgcaagacgccttgtagggagtgtaactatggccggcctgcggaacgaaagtgaacaggagccgctcttaggcgacacacctggaagcaggtgagcggatcctggtggagggacccctcagtctcctgcgctgttgggactggttcctttccgggcgtcacccgcactgggacaaaccctcgctgccagaggggttccagcgcggtgggagc

SEQ ID NO: 10190 - DNA, 6000 bp, Homo sapiens
ctccattcaaaagaaatttctgacatttagaaccttatagtcataggaatttttttaaattacaaactattttttttgagataagagtctcactcttgtcatccacgctggagtgcaatgacatgatctcagctcactgcaacctccacctcccaggttcaagtgattctcctgcctcagcctcccaagtagctgggattacaggtgtccaccaccacacccagctaattttagtagagacaggggtttcaccatgttggccaggctgatctggaactcctgagctcagatgatccacccacctcagcctcccaaagtgctgggattacaggcatgagccaccatgcccagcctataaacaacttattattgtggaaaagaataatagagtaagcaataaaatatatttgggcacaaaatacattaaaataaaattatgttagggaagtagaatgaaaatacaaattcaaataggaaaaggcataatgtaaaatttctgtgaaaataaatgatggtgagtattccttttctatggatttagatttcatttagattgcattttaggtaacataaccctttttattttaaaatattcacatttatattacgcaaaaaattacatgttttgccactaaggtcaaaatattttacatgtcaacttaaaaactattttaggggtgtgtcagcaaaagtatgaagaccattaccttaaccctgtgggcttatccactgagattaggctgggatacagttacttccttgggtgagaagtcagcagtcaattgtagtagtcgtgctcccatcttcatgagaccacttctccaatactgatttcacctcttttgcaggatgtcctggggccactagtaaactgtagagtctgtccccaaaatgccctgaatgggtcagaacaatttatcgattaaatcagttccaatgctattctgtatccaaggctgtaattcacaatatgttctatcgccatctcaaactatgtcctgtcagcttgcccaaagttatcagaatttctaaaatgtgatcaaatactttaataactaagaaccaacaagatgttctcaatttgattttaaccctctcccagtattaattttccagagagaaattaaaagttcagagattaaatcactctgtccttctaaattatggcccaaagtaatcagtaccaacttcatgttaaagtccaaatcattaatggccaacattgaactcttttactctgtgaattaaagttcaaacaggctttgtcactccctggaagtgaacttagctccaaacctgaaatttcccttcccccggggagctgatgctgtttggcttaccccaagcctcccctggcaggagcaagctcctttgaaacttgtgtgaggtagcagaggagaaagcacactttccatgagcaggatggctcccaagagaaagtggagaggaagaaggtgggctgcccacgagccaaacttaaacatcgggaaactcactggtggcactcaaacagagcatcaaatgatatgttcgtggcactccaatgtttcaagaaaaatgtgatatggaaaaaaaaaaaaagtttttccctaaaatagggaaaaattacaagaaacaatctctcttatttaagaattatttattgaatatcatggtgcaaacttctgagctaggttcactgggaaatgcataagtgagtcaaagctggatgctgcctaacaaccaaccactagtatttctaactcaattattatatatgtcagtgactcatattttagatttttgttatagcaccaccctatttccagtaccaatttttatattagtatgcaaaagttgataccaaacaactccaaatagctaagtgactcaggacagcagagatgtatttcttattcatatacctaggtatgttatttgggagctgttttccactttgtcctgtctccgagaccctggctgatggaagcccactcaatttgaaacatcgttggagtagtgattaaagatggccacattttcctgtaactctgtggttgacaaaaatttttgtaataaagatggccacaaattctttgtcactctccctccacccctatcaagtgtttatttcctctccccttaaaattgagctggccctgtaactgcttttaccaatacaacatgtcatttccagacctaagacttacaaaacctcgaagtttttgcttttattgcatttgagaatcctaagccaccatgcaagaaagaagtcaggctactctgctgaagaagccatgtgaatcagagagtctttggaacggcatgggtaaatagaaaagctcagctactctagcaacctagttgagcctccaaaaactccagccccaaacaataccaggctggaaccacatgagagaccctgagcaagattagacaactgcccatgagcctagtcaacccacaaaactgttacacataataaaatggtgactgttttaaaccattaagatttaaggtgctttgtcatgggacaatagataattaaaatatttcatcactgttggcaggaagaaacagcgcaggataaatgtccacaggctcttaaagcttttatttggaaatgacacaagtcacttccaatcacatttcattggccattcttgaggtaaaaggagtagggaaatccaaatctacgtgtgtggaaaaagaaatagaaatatttggtggctagtactaatatcttccagagatttacaagtaaatcagtaaatagatgaagtgtcaggggaaaaaagctaacaacaggagaaaagaatgtacatgacgattcttgtagatgtcctctaggcaaagcagggatgtaagaggaaaaggagggtagaaagaagtcaaaaataaaaaaaataaaaaagcatccgcagggaaaaagtagaaatcttgggatctaaaggacagtttcaataacagaatagtcaagaagagcataaaataaaaggccaaaatgggtggtacaggtaaggaacacacagaaattcaaagaaggtaggttaatgtgggctgatagaggcctcaggtggaagtagaattgaaagaatggataggtcatggaatttgtatggttagaaataagaagggcatgctccgtgaggaaacagcatgagtcaagtcctagactgtgcaatacacatagcatatatggggcaagggactaggtattgtaaggggaaacgtatcatttaatagagggtatccaagggattgtttgctggggaacgggaaggcagggaagccactcagggacttatggaggcccttgagtgctttctgagttgtcctcttcaaattacagagcacccctggagattggtgtctgagcaaaggaaatcagaacacagttctagtctcttcgtgtaggaatgaaataggaaaagactgacggcaagtcaccaattggaaagttattgcagtactcaaagcaagagtatcctattgggacaagagcttgttacttagggtggaaaataagaacttccaactagtccagttcaaggggcttacaatgagaatcaaaaaagctggggttttgggaaggcttcaagtgtgaagaagtcgagacactattttatcaaggatataaaggaaaacttttttacttcacgtggcagccaatgttggttagctacccaacattccccagcccacttccttgacagcagaactttaatactgtccaattcctctcttccctccaaaccaactggaaaagaaacctacacacactaattcagccccaaggtaaatcctgagggtctaagctactggttctcaaccagtaccacacctctggggggtgggagggaaaaacggttgatttacggtgtcacaatgcctgaggtgtggtactgacatttagctggaaggaaccagagatggtaaatgtccagcaatgctcaacacagtcctgaataagaattaaaaaagccagataaacactaggcaatcatggatgtcccatgctccttgtctgttactgctttagggacagctaatagcccagttctggtcaataagatataaggagtggcctgcttctggggtgctttcttccttcctatcaatgttgtctcaactgtatacagctcttgggactgctacagctatcttctcctcaaaaccagtttcttctttatcttcctatttccatcactggcacctcccattttctgttaccaagtcctaaagcaattttgacttctcctaacccttaaccttaaggtgactattcctttaggtttgcctgggataaaactgatataactcctggtctctggctataattattaatgccctactttacttccaaaagtgttccatattgaaggatagagtatatggtcatttactaccaattgtgtcgctctccctcaggtacctctaatgcagggctcagcaatatggcttataagttgtttttgcacctctccagaactaaaaaaaaaaaaatttacatatttcaatgattttcttaaaaatcaaaagaatatttcatacctgaaattatattaaaaattcaatgtccatagttttactgaagacagctacactcattcaagtattgtctatggctgctttctcgttacaaggtagagctgagtagttaaggcagagacttaaaatatgatcgggccctttacaaaaaatgtttgccaacccctgctctaatgtctcccctagctctgagtctcctcacctcacgcacaaataccctagcctactaactgctttcccactctttccccagcctctaatccttcagacacctggttgctatacagcctctctacaagagtgtcgaccctgtcacttgcctcgtcaatatcctcagtgactcctacaaaaccgacagtgaaaggttcaaacctattctatgagactcaagacaacagacaacaaagggcaagagagaacacgtcaaacgagttcgtcaaacgagttgagtgcgtgagacttcagaggtcactttttcacactagaatttcaaggtgtgagaggctaaaagacgtccaagtacatgaaacagaacctgcaaataagagtgaatgacgaatagaaagaccacctcaacctgtccacttccctacggccgcagaagttatgattcaaggaataatgagactctaaatcctttaaaattctacaagagcagcctttgccaaacccagcggggagtggctgctcggtgccagcgcgaggagcacgtagactgccgatgccagagaagcccggtgcgggttccgtgctttctctccgttccaggaagaccccagctcgtggccaaatcttcttgccgcttcccggtctgcgcgcctacgctgccggtttcccgacaaaagcgacggcgccctggtgaaaagcagacgcccctcatcggtttgcgccttgcagctcaactatgccccagcctcccacaagccacctgcccgcgtcctccgccaggcgtccagcccggacctgcccccgcggccgccaaggcgcacgtgaagctcccgggcggggggagcgcaaggaggcgggagtttgcggacgcgaacgcaggcctaggaagggaagcgattccagggcgcacgcgcagagcctggagactgggcggggcgtgcctcccgcaggggttacgaacgaaaggcgagcgcgtggcgctcaggagcccgcgcacgcgctgtggtctcgccccgcccatgagcgtccgcgcggccgtcgtagcatcttttcttcagacccgcccggctcgtctacttaacctagcggaggcttggagtgagagcagggaagtgtggggcgaggtgggcggggcgttgcacgcgtgcgcggccagcgaaagaagggagggggcgggagatccgagacaacgttaccccgtcaacacccaatcaggagccggcctgaccccgccccctcttctcacgttattggctgagaggcccccagatgggcggggccggccgtggggttggggagggc

SEQ ID NO: 10191 - DNA, 6000 bp, Homo sapiens
ccactgctgtaagataatctagaaggagaagttgctgtgacttcaacaggtactcatggtcaaaatcaattactctgcagaagccttcattacgatgaaagtcattcaaatcctgagattccaagagagatcacataagaaagacacattggatattgtcaacagggctgattaaacacaaaggaagaggaaagatagcagaaagtgtgcaaaaccagaagagagattctatggccatgtgctgctactgaataacggacccaaaccaagcttttaggaaggagaatgacacattagggaagcagcaggatctaagttgctcctcatttgtctgaatggaggcaatgttatgacatgcggaagcaagatgtctaagatagcagacatctgggggtccctgaatatagagaaacatttttggaaaaggctttcatgttgggtgtggagggcagtcatggagattagttcaggaggctatgggcaggaggatctctttggggagacagggctgtagatgatgtctctttaacatcactgctttacatctggccattgcagatgcctgagatctcttgtttttctgtttgttttaaactactgtcacgtatccctagccccttctctgtctaagctacattttctttactatttattaatatttccttttcccacaaatgcctatttttatagaataagtttgtcatttcccttttctgaaaatatgggctttaattgctcttgagtgctcccttatgctgcacttacatctcaatgtaaagagtcggctgtgtaaaatacagtttatttaggaaacactcagagtttataatttaccgagactgtgctgggccctttacaattaatatagactgtaaaattagtgggctgaggacagtatctttgacaaacacagaagaaaaggatgaaaaaaatacttttttttttttttgagatggagtttcattcttgttgcccacgctggagtgtaatggtgcaatctcggcttacagcaacctctgcctcctgggttcaagtgattctcctgcctcagcctcctgagtagctgggagtacaggcatgcaccatcacacccagcttattttgtatttttagtagagatggggtttctccatgttagtggggctggtctcgaactcccaacctcaggtgatccacccacctcagcctcccaaagtgctgggattgcagacatgagccactgcacccggcctgaaaaaaataccttttaaaatgtcattaaatatggcttgaaaggagctattacagataacaagccatgaatgaggagaaagactctatgtccagatgaaagactatctgggcctgaaaccatcaagaggtcaggctgtaaacagctccaggactagcaggacattgaaaaggttctgtaggaattcattacaaagataagaagcaaactggctgggcatggtggctcacacctgtaatcccagcactttgggaggtcgaggcaggcaaatcacttgaggccaggagttcaagaccacccagacaaacatggtggaaccccgtctctactaaaaatacaaaattagccggatgtggtggcacatgcctgtaatcccagctacttgggaggctgaggcaggagaatcgcgtgaatctgggaggtggaggtttcagtgagccgagatcgcaccattgcactctaacctgggcaacgagtgaaactccgcctcaaaaaatcaaaacaaaacaaaaaaagaggcaaacaagaactaatgtccccagaaaccaaggtcatagagttctagaactgctaagataaaatgaccttagaaatcatctagctcaatggttctgaaggaaaaaaggtagacttccttctgaacactggagccagcctttcttgggatgccctcagttcctacatttttgtgtctatcagaattacagactgctaggccccatcttcagtttctaattgagtaggtctaggatcgagcttgaaaagatgcatttctagtatggtagttgatgctaattttgttggtccagggaccgcactttgagaatcactgatttagtctctcattctactgattaggcaaattaggccctaggagataagacaacattctcaataacatgttacaagttagagaatgaaaattacattctgattctcctccagattcttctgaggaactgattgtaatctcataggtgcaaaaagaataaaccaattttaaactgatataaagtgtatttttaaacatttatttatatattggtcctactgtttcaaaatattttcacccttctggtccatgaataaaaatccttatttgaatgcaaaatattaatgtattcttgctgagaagccatcatgggaagttacagaagtgacaaataaattaattgagcatgatagaattctaatgaagtaaataattcttgaaagtgctctatgaagtagacagttgtgtgtttttggtattcaacccaaaataattcatattttgctatttttaatgcatttctgatttccatgcatttttaattcatttttatttctttgtagagaaaataaccagaacattacaaataatactggaagttgtaccagaagaagataagttatgaactaatggacttgagatcttggcaatctgcccaaggggagacacaaaatagggatttttacttcattttctgaaagtctagagaattacaactttggtgataaacaaaaggagtcagttatttttattcatatattttagcatattcgaactaatttctaagaaatttagttataactctatgtagttatagaaagtgaatatgcagttattctatgagtcgcacaattcttgagtctctgatacctacctattggggttaggagaaaagactagacaattactatgtggtcattctctacaacatatgttagcacggcaaagaaccttcaaattgaagactgagatttttctgtatatatgggttttgtaaagatggttttacacactatagatgtctatactgtgaaaagtgttttcaattctgaaaaaaagcatacatcatgattatggcaaagaggagagaaagaaatttattttacattgacattgcattgcttccccttagataccaatttagataacaaacactcatgctttaatggattatacccagagcactttgaacaaaggtcagtggggattgttgaatacattaaagaagagtttctaggggctactgtttatgagacacatccaggagttatgtttaagtaaaaatccttgagaatttattatgtcagatgttttttcattcattatcaggaagttttagttatctgtcatttttttttttcacatcagtttgatcaggaaagtgtataacacatcttagagcaagagttagtttggtattaaatcctcattagaacaaccacctgtttcactaataacttacccctgatgagtctatctaaacatatgcattttaagccttcaaattacattatcaacatgagagaaatcaccaacaaagaagatgttcaaaataatagtcccatatctgtaatcatatctacatgcaatgttagtaattctgaagttttttaaatttatggctatttttacacgatgatgaattttgacagtttgtgcattttctttatacattttatattcttctgttaaaatatctcttcagatgaaactgtccagattaattaggaaaaggcatatattaacataaaaattgcaaaagaaatgtcgctgtaaataagatttacaactgatgtttctagaaaatttccacttctatatctaggctttgtcagtaatttccacaccttaattatcattcaacttgcaaaagagacaactgataagaagaaaattgaaatgagaatctgtggataagtgtttgtgttcagaagatgttgttttgccagtattagaaaatactgtgagccgggcatggtggcttacatctgtaatcccagcactttgggaggctgagggggtggatcacctgaggtcgggagttctagaccagcctgaccaacatggagaaaccccatctctactaaaaatacaaaattagctgggcatggtggcacatgctggtaatctcagctattgaggaggctgaggcaggagaattgcttgaacccgggaggcggaggttgcagtgagccaagattgcaccactgtactccagcctgggtgacaaagtcagactccatctccaaaaaaaaaagattatatatatatatatatgtgtgtgtatgtgtgtgtgtgtgtgtgtgtgtatatatatatatatatatatacacacacacacacacactttttatatatatatatatatatatatagtggaacttacaaatgagagtaatataatgatgaaattttgaactgttatttataaacatctaaggtaaaatggttagtcatggccagagtatgtttcatcctttaatttttgtccatttgaaaataaggatttttgaaagaattataccaattaaaattattaaaggcaaacatagaattcataaaaaattgtccaaagtagaaatgatgacctataatttggagcatttccaattcagtaatttcaattttgctcttgaaaacatttaatatatatccaagactgacatttctttagctgaacctaacgtttgggtctctgagtgaatttataataactccttccttccttagcatagggttttcaaaatttgatttataattcctatttccagtaaatattgttcatttgtccacatctctccctatgatatgttgctggaggtaagaatttctttcatattcctattttttttttccccatagactaggctcatagaatttaaacaagcaaattttcctgagctttttcttgccaaatgaaagaagactggtaaattctcatagagaggtttgtgtagttcttggctcttcctggggttaatgtgcttatattcacagtggcaaattggtctcagactttaatttatttatttttgatttgaatttctctttaaaagtatcaatttaaaaggtaactagaattattctttctcattttcaaaagtgatttttgcattattaaatttccctgccattgtaatgccatttcacgcagaaaaaaagtcagccagtaattaagaaaaaaagtgatggagattaagtagtattttggcttatttttaggactcatcatgagaagacacagttcctttaatcaggaaattaatatccataattttcactcaaaattgcagtatgtaaagcagattctcaaaaactctcctgaacacttatttatatatatgtttttatataagtaaaatttttctcatatttttatacgatatgcacacacacacatacatgcacatactacttactacatgttctgtacttgtactttgtaccatgcatattcaaatgtttatatacataagtttattataacataaacagtaaaagtaatgaatactgtttaaaataactaatatagtattttttaatttttgtggggatggattctcaaatacttgtgattttaaaagattctaaagctaaaacacaacttgattttaaaaagaatgattctccttacacaattataaatatttgcagtaaatattttccttataatactgttttgaccccatttaaaaagtattagattatattcctttgatccaatgaaaactgaaccttataaatggttagctgaaagtagaccttattcttgtccttctttagaagagtaaagatttgtcctagggaagatggctgacttcggttcccaacatgcgtatgcatttagactgtagctcctcagccctgtggacacaaaatttggacagcttattaggttacgttagcaatgcatgacggtttctccaacactaagatattcacgttgaaacagatttcctgttcgtcttatgtgtctggtaaaattgtttccccaatt

SEQ ID NO: 10192 - DNA, 6000 bp, Homo sapiens
ctcacatccaggtcacgctgatgcaagaggtaggttcccacggtcttgggcagctgcacccctgtggctttgcaaagtatagcctctctcccagttgctttcacaggctggtgttgagtgtctgcagcttttcctggtgcacagcgcaagctgtcagtggatctaccattctggggtctggaggatggtggccctcttctgacagttccactaggtggtgccccacaaggactctgtgtggggggctctgaccccacatttcccttcagcactgccctagcagagcttctccatgagacccccgcccctgcagcaaacttccacctgggcatccaggcgtttccatacatcctatgaaatctaggtagaggttcctaaaccttaattctcaacttctgggtacccacaggctcaccacctggaagctgccaaggcttggggcttccaccctctgaagcagcagcctgagctgtacgttgaccccttttagccatggctggagcagctggaacacagagtaccaagtccctaggctgcacagagcagaggagccctgggcccagcccacaaaactgtcttttcctcctaggtctctggacctgtgatgagagtggctgacatgaagacctctgacatgccgtggagacattttcccattgtcgtgtggattaacatttggcttcttgttacttatgaaaatttctgcagtggagattttcatttctatcacattgtcaggctgcaaattttcaaaccttttattttctgtttcccttttaaaacggagtgcctctaatagcacccaagtcacctcttgagtgctttgctgcttagaaattttttacaccatatatcctaaatcatctccctcaagttcaaagttccacaaatatctaagacggggcaaaatgcagccagtctctttttttatatatgctgtgtggtatggattgaaaaatgtacttattacatgtgaatattcaattgtaccaccacaatttgttgaaaagactaggctttctctaccaactgcatgtgtacctatgttgaaaaccagttccccacactgtcttattctgttttgtgttgctataacagaacacctgggaatgggtaatttataaagaaaagagatttatttaactcacagtctggctagctgggaagttcaaggacatggctctggcttgtggtgaggcttttgtgctaggccaaaagatggcagagaaggtcaaaggggaagcagacgcatgcaaagagggaaaacctgaggggcacccagctttataacaacccattctcatgggaatgaatccagtctcgtcagagcaagaactcactcactactgcaatggcatcaagccacctacgaggacaggaccttcatgacccaaatacctcccattaggccccactttccagcactgccacactggggaccaaatttcaacatgagttttggttgggacaaaccaaccatatccaggccataatacatacacatgtaagtctatatagaatctattctgttccattgatttgtttgccttgatactaatactctttgataactctttgataactatagctgtatatcattctataaatcctaaagtcgggtagtgtttctgaggggggttatcttgagacacaagaaaaaaactcagcatgggctcattctgccaactatatagtttaaccagacgaattctgggaaaaacaatgatgactattgtcattactattatttactattgtttgatatttttgttaaagtaataaggaaaaaaacctcagaaaataagtataaatataagaaagaaaagatcattttctgccatagacataattatacatcttgaaaataaaagtcaacccactggaaatacttgtggaatactttgtttccttttctctattttctgcaccattaaaaagcacattcctaaacatatgaaaatatacaaacatttttaaagtattatttgaattatctaggttctgagtccactcattgtatttgagttaaaacttcattctgcatagctctttaatcctgataatcgaggcatttcctatattctgcatttttcaagtggcaaggtgttgtggaaagggcacaggctttgaatcctcactctgcatcttaagatctgtgtgaataagttatgtaactgatctgggtctatttcctcataagtaaaataaggatgatacctgtgggtcaattgcatatagcaacttgcacatagtagaacattaataaaacacagctctgattttgattacaaaacaggcttccaacaggacatcactctgttccatcaaggagcatgaacctttctgcttttttttttttttttttttttttttttttttgacacaatgtctcactctgccatccaagctggagtgcagtggcactatctgggctcactgcaacctctgcctcctgggctcatcccacctcagcttcctcccacctcagcttcccaggtagctaggactacaggcatgcaccaccatgcccagttaaattttttgtatttttttgtagagatggggtttcatcatgtttcccaggctggtctcaggcagctcggctcaagtgatctacctgcctcagcctctcaaagagctgggattacatgcatgagccaccatgccaggtcacctttcctgctttttatgtttttctagatttctgattactctagtccctccaatcttgattacattgccttggtctcttcccaaatctctcttcaactttgatgtgtcagaacacttcacgactctaccattcagcattacattctgggactcctccgcttgtattattaaacactacatcactctcaaaagccataccccttgtcttatttgcagattattctttctcctctgacattatcacattgtattattctgatgaaaagttgcctattaaacaaattataaatattatattcaatcatcctttcaataagtggcaaataattttggagatatgttaaggccttaaatttcaaggttagagattagatttcatgctgtgggtaatgaagggtcattggaaactattgaatgagctgaggattaaactacgaagtgtaggtgggaggctctgaaggggggcaactagttaggtaactctgaacaacagtttctaaagtagtgagaatctaaactagagaaatggcacagggactggagggggtgaggacctcttttagatgattttatggagttagagtttaatttatggaggcagtgaatgtagcagccaaagagtaaaaaaatgttctcaaggttttgagtactatgtgaccaagaagatactactaaatcttgcaaaaattcactattcttacatttttagttttcagcttcctcactgcaaactttgaatggatcctttaaaaaatccctctctagcagttcaagtgtatttgttatgggccacagaagtatgttgaataatagaagtcagaaggacggaagaaagaaataaagggtataatattgttacaaagtatctcaaacaaaatgtctttttaaccagtaaattttaacactatccaaacactctcccagagatgacaaagtcaaaagtttagaaatgctggtcttaattagtgaagcaatgtgaaaaaactcagtgatcttgacccctagccaataatgatacgttgtgcacggaatgccaccaaacccttaagattgaaactcttcaacaagggtcttagactcacaagtcaattaaatgttgttaattaatcttccaataaaattaaattgttataccaaattcaaagtcaagatttactataaaatattaagtagtaaaattaatattgatccaatatataaaaggcaaagcagcttgtgattgcataatcatagcataaactacgtttatgctaagatttatttcaatgtgtttgaaactacaggctctgagagagacaggcctgatttacatcccgtttccactgtttacatgttgtgtaacttcgagcaagttgccatcagtttcatcacctgggttgccacgaaggttaaacaatgaatgtaagccccttagagcacaatgaacacaataaatgttagcagctcttattaatagtgttgttcgagagaaaaagaacatattgttttatatacaatgtatttattaacacttaacgcatctgtatttgtcatatacacacaccagacaggaaagctccttattaatcaccatgactgcagatctgttaacatctagaactctggagaaaacctagagccctaatcttgctgcacttattactggacgttgttcataaatatgatttacataaaattcaggacccaatcattgcgcaacaggaggtagcacggtctgcagagagggcgggagctcagaggaggaaaagtcttcggacttgcagggggaattcctcctgggctaacccgggagcggggtccaggccacaaccggccggcggcggcacaggctccatgtgcggctccccctggaggcggttgagcccctcggagcaggagcgcgtagcacacacctcgggccgccaccgcctcccgcccgccaccgcacgcgcacgcgcggttagtagtcgctgctgcgcggccgccggcgggactggtctgaagagacgcggggaccaagtggcaacgacttggacatctgagctgtcactgccgaaaacaggccgcaagagaggtgcgtgagcagcaggccgcgttcccgctgtcccgctgccctttgcgcgcagattggggtgaggaagcggagtcgttgctgcttcccccaggcaccccgttactttgccgccagagggctgaaccggtcggggccaagtgagggtggatgttgagtctggcgatggggctgcagcgagctagggtcttgactgggctctggcggccccgtgggtggacgcaggaggtggtgccacctgggaccctttgtgtcttcagcaccgccgcatccacctgctgcgcccgggctggggcggacgagcacggggacagctaggtgcctagcccggccggcctcccctgcgggcttgaggagccaccgggagccgaggccgttattccagcggttgccattgcagccccgttccacgcttgagcccggggcgctctcccaatggttgtagagggggcccggggcgcgtctgggcgctgctcactctgctgactgctccttacagaaacccaaacgagatcaaaataggctcggctgtctcagtctccacctatgtggaagcgaagggaccccacttcacggcggtggggccagggactgttggccgctccctcgatacccgcgcagagcccattgtgcgccgccggggggcgggcgaaagggctgggttgaatccagagaggccctaattactagactcattatcgccccaggcctgtttaccatcaatcagacactttcgctgattttatttatagcatctgcccaagcaacaaagaggaggtgtttgcttgggagttaaaagcaaatggcaaccaaagctcaggactgggagagaaaaggtaaataacgtggccacaggaagaagtctcaaattagaaaagagttcattaacgtataaactttttgttgcttaaaagcaggcaaaatcccgatctcatctgatgattttgcttgttttacaaatgtcgacatcactcgaggtagccctcctttgggtcattgtaagtttgacctgttttcagtttggagttttgccttcacgtcttattggtttgatcttccagtaacatttagatctcatctccaaatcctcagaacaagatattctgtactctctgtcttagctagttgataaggttaattattgtgtgtaaatgatgtaagtatgttgatgcatttgtctagaaattgaagtgttgtaagttagctgtagtactttttaagtacctaataaatactggtgtttttaaatagaaaactagaattatgaactttaaaga

SEQ ID NO: 10193 - DNA, 6000 bp, Homo sapiens
cttccttccatctcccatttttccctccctccctcccttcctttgtttcttcttttcttctatatatattgagtacctattatgtgccaggtacacttctactgctgagaataaagtattgaacaaggaagacataagacttacatttaagaaagagttcaaatcttcttaaggcagaccagatctgaaaagaaaaatcccagaaaagcctcagctgatcatgctcaatttcttctcctaaactcaggatgctgtataaccacagaaatgacaaatgtttacctcgctcaatttcctaacctacaaaatggtaataagaactcttcccttgaataactcttccattttttaagtcaaatgaaagcacattgaatatcttagcatactgttcacacatagagacaagttgagttaataaaccttatgttttcttccctcttcttacttagcaactcttattaccataattcctctttgtcctcttattcattcgtctactttccttcttgcctgcttttctccactaaggatatttgagggctttccaagaaacccacccttgagttttatataatagtcttatagctactttgcattggaaagaaaatttgcttgtgctttgaaaatgctttaactcattatttaaagttgataaattctcagttttacaaatagaatttggtcaatgtgctgaatcaaaaaccctactgggcagtgggaactagcattgaaggatacagagatggtctctctccttgtagatcttatgggctatggcaggaggcagatcacaagtgtgatggcggagcaatccaggagataggaggatcagtgggaagacctgtataaggaagtattttttaaagatttaatccagagtctcctagatggcattcagagggccaagaaccttcagctgaaacagtatagaaaaatgtgtgtgcatggtcactgcagaggcacacacctgtagctgcatgctaggttggcagaaaagttcatcagattctccaggtggagtgtgaccaagcaggtgttcagtgtttaaataaacggtttatgaatgttgtggaaagactatgtggtactcatacttaatgatgttattaataatgcccttaatgatataaacagctaacatatttttacttctctgcactagtggctaagcattgtgttaggagctttacacagattatctcatttaaaacacaaaatagcttccagaagatagtggcagatctagtagttgcctgtcctacagtctcacgccttttgtccttgctacagagtccctgttgtttttcacctttctccaaatgggcacattctggttggctctttctcagtccctccacttggagtgaattgtaattggtataaacaaatcatagtggtctaatttgacttgccaaataattggctaggcctggaaaggccatgcagttttgagacttgagggaaacactgttgagaatttatgagaagagttttcttgctctaaaatatggatgccaggtaaatatgttgtcctttctatctgtggatattgtcattggcaagtgatgtatagcaccaaacagcaacttggcccaatttgaggaccaggctaaagaggataagccaatgcatcaagcatggtcagagaatggaaggagtgagatataaaggacctagaaccctgataggattatcgagctactgaattaaccagtcttggaactgcccaccccaccactgcccagatcttgacaaagagggataataaatgtccttattgtttaagatattcctgttggatgttctgttacttgtaaccaagagaatgcctagagatgagttattcggtttctacaaaattgaagcacagagaagttaagttactgtccaaggtcacatagctgctaagagggaaaaccagagtccaaaacctgtctgactcctgaggggggccttgtgcctaatgaccagctgtaatccctttgcactgaccttgacatttcaattctgtatgagcagaatagtgctgatttaagtgcattgcatttcaagaataaaaatttgctgtacggtgttgttagtctggcctagagtaagattattggtgaccctgaggcctccctggactgtgactccctcattgataacagttatgaagcagcagaagagaaatgtgatgggtcctctcctagccttccgctccacacctcctctttacctgtgattactgatttgagagagaatctatccaatggatgtgtaaaattttagtttttgtcaactgtgtttttaactgcatgataaatcttacttagattgattccttgaattcttgcgtatggatgtgtctgagactgaggaattatcccatatgtgcatcataaatatttatatacataaatattattacttgatggtttgtacctgcctgagaataaagtcaccttaagagtcagtcctcatccttgtagagacagacaccatcaggacataatgtaattaattctgggagtctttggacatgctgttgggagtggtgatgtggcacatcttagacttcaggatcatggacaagagcatgtccaagtcaggctgaaacagcgaaagagtggactggtgggacatttctggaagactgtagagattagactagcatatgacataatgaaacattctatagggtaccttggctggaaaatcctgctttttggcttaaaagtaccttttggacatagccagaatttaggcagcacttatgacattgggatgttgaagacattgtgactatcacaccatgaaatacaacatctgattaaactattacataaagaggatctttttaaaagaatcactttatatctccatactgtctttgtcttaactccgtatgtgttaaaatatgaagcccattttttttcccccaaccaaaagctttcaagcccaatcattgacttggaacactgagagattagttgaagagccatgtgaatgggacttgaatcaacatgtagaagttctaacttgcaaggaatgggctttgcacataattcattttagtggcatgtttagagttatctgttggtctcttctgggctgaaaacatttcctaggtttaaattctttaatcaggtattaatcatatagctgtatgcttgtaacatccatttctgttggataccatttgttaagttaatgtattttattatccatctacttaaaaatataatatgagctactaacaaaactacaataactcagtaagatgaagataaaattaaacaaatcaggaaaaaagtcaagtggaatagtgagatgaaatcaggaagccttagtacatggaagtggattatgcaagattatgcacatgtattaaagctgcatcaatgaagtgataagactcaaacagtccccaagttagaaacattcctaactgatcaagagaagcagcattgactttccctgacactaagccctgaggaaatgtttttcctgtaagtctttataaaggggactctaaaatgtaataagaagtcccctaaatagtatgtttacaataaatatacagttctgtaaaagtgattatattgggagctggtatacaaaacggtgcatcccacacttccatagttagatctatgtgcatggttttctcttttcctccatgaagcaaagctgctaaattgagaataggtttccaaaccttaatatttgcccattgtgactatgacccttttgcaggtgtgaaaactgaagcagttagctatagtgcagtcagtcacagtccatattggaaatcacagcccttaaggttatattgtgaacttactcactttgcctccctactctttgtctttttcattatatatttttttaaaacgatgggtttcccttgagtttagagtgcacctgttcatgtttatatctgggaatgcatccttccactgggaagacctctgtgcataaattctgggtatctctttgttttacaaaacatatatgggaaggtacagctaaaagataaaagtcaaatgattctgaattatgatactcattcccaaaaaagagggagatgcttaaatgtgaattgcttggaaaaaaatcaacaaccagctctcctctctggacttcatgggcatttcaatgtatctttgtgggtggagtgggaagaggctggcccttaacaatcataccacgtggaagcttttggtgtatataaagtaaatcaggctcagtgtaaaacattgtttacaaaacggtgtcattttataagttaacttttcccatgattgtaccccaagagagaacacctgttagtatatagtatatagtatatagaataacataacctggggtatgttattcagatttttattttctctgggaatactaacatttatgtaactctgcacaatggtcttctatcttgagttagaatattggtcaaaaggaattgagctttagctttcagcaggtcagggccatcacgtggcccatcgccttcatctcctgctgttcacattgatggagtacaggtgattgcagggagaaaaatatcttgttttcttcctctgctgggaacacacagaacccccaaaacattgaaagtcaccttttactttggattcttgcaatacaatccaacccataaggtgtcgagagggtgttgagatgtcagatgaggttggctggcccagttgcccatcgccttgtctttttgcctggacttttgttgccatttgcatatggtccctctcctagagaagcactcctttgcctcagtctttttaactcttcctcttctccttcagcactttgcctcctcctgcaaactcagcatcagtgactctctgatctgcctatttttagttttgaacgctttctttatgctgcaagtggaaagtcatggaggtatttccatatgtgaacctgtagcacaaggaaagggttcatgccagagacatgaagttgaagctaccctcatataggagatatttaaaatcatgagactggatgagataacgaaatcagagaatgaagacggagaaaagaagatgtttactcagcagtttgaaagtactgatgcctgtgtatatgaggtgtatgtgaaaataaattccattgtgaaatctcagaggtaagaacaaaaattaaaaataagtatcagcttttataagtctgttccttctgctaaattacatatgagattcatactggccaaagaatttacttctgagcttcagggaaataaagccttggaagaaatacttagctaggatcctctcatgaatttgtttgtcatttaaagttttatggtattagacgttatcaatatctatgatagacatatagtatttgtaatccaaattcatttttggataaataaaattttctaatcatatactttttgtgtgtttccagatacctgtaagaatactatgaaaatattcggtcatggattgctttgttgtttacatatggtttctttctctttattttattattgtttggtgatgaagaatagtacaaatgtatttgaaaatgattgttgtcctgaatagttagagttgtacatgacaatgatcatatgaaccagaactaagagaacttcacttgttactaacactgttaatgctaataataaacagttaaaaagagaatttgaagtcatatagtaagaacttgggaaagtaggcgtcataacttgtttttcaggagtatctggaaatgaaagatgatgtaggtgtatttgggctagtgtgtgtgtgtgcatgtgtgggtgtgtgtgtgtgtgtgtgaatgacttagtgatataaaagtgaggtaacttttgagcattagtcagccagttacttacagttgctaccagtatttccatgtattctttggccacaggattaagagtatcaaactatcgcaagaacaaaaaaccaaacaccgcatattctcactcataggtgggaattgaacaatgagatcacatggacacaggaaggggaacat

SEQ ID NO: 10194 - DNA, 6000 bp, Homo sapiens
gggtgatgagaaggactagaagtttctaccctgtgagccatgggactcacagaaagggaaaggcagaagagggcctggatgctggatgggcagtcaacaaacatcatctctaggtggcacccaagctgttcggtgcccctccttcctacccaactccaagcccatagcacctagagaacatattgaagttatctgtatgtctttccactactagactgtgagtggacatggtctgtggtttattgagctttgtggcacttcccatcccctaaatcctggcagtgtgcccggcacataataaataccttttgaaaaatctgaagtgaaagagtaaattgaaagtaaattcttactaaaactattaattcattagtgttaattcagtgcttactttgaatcagttttcacagaattttagagcaaaacgctgtgatacaaacaacctgtaaatgatgcgttatgtcttctgtaccttagtgacttttccagatgggagaggatgggaataaaaatgaggaagagggaaaacattttgctaactgaaatccctgcataaaacgaaagtctctgcttctgtatctcgtaaggtctctaacggaactagattccatttcagaacagttggctgtgtttctagcccaaagcacctactgacattattaaaatataatagcacagcagtatccccttctctttactctgctagcacaatgtgtttgaacgtagaaagccaaatgtggagagcctctgtttgaaaacagctcttgagatacacactttaaaattcagtttgattttccatttgtggcattttctttaactggggggaaaagttatatttaccacccatatttattagaacccatctcccaacctgccttgtctctgattctcccctgtggtatttagccaggcatctgctatggctcgggcaccagggagtcaataatgagtgacccagcccctgccctcaacatgctcaccacagaatacacctaagggggcagctcatgcattctcagacttgagcccctgcaaaggacccagtgctgaaagtcatttataattatttataatttataataacgttttaagcaaaactcaagatctggcttttagaagacataaaaatagattggagaagcatcatttcaataaaggatgctttatacattgtgctaataattcttgtttatcaaggcagcagtacataggtgtttggtatacatttgattgtgaatccttataattgtcttgtacttgcccaagacacacagccagcgaaggtggttatgtccagaatcctggcctggtctctctcaaacctgaggccatgctcttcacagctattctgtatcgaataggtcagctttccaaccacaaaggaaaccacaagtttagccaagtaaagaaagacatttgcaaagtcatggcagggtgtctatcatgccattgcagtctgtgctatctcccttcgccacagggtttcagctggtggcgtaatgtgttggcttcctagggcaggaaagcactccagtttagtggggtttatggaaatctatggcaaaacaaaactcttttctttcctactgaaaaaaaatatgatctgaagctaatttatcatcaccaggtaccccttcagtgttgttgtaggcagaattgaaataataacttctgcctttgaagaaggcatggctatagaattagaatgaaatggaggatagaggactaggtgaaggttagatctttggacatagaagtgccgccaaccgtaatgtctggtgatgttccccagcctgtgggaggcagatgagattgaaaccagggtgtacatgagtgacctggagcccgtaagtaacagtaacacagagcagagagcgctagatgaggtggagctcagaggagcatgggaagttgaatgagacagtaaggagcattctggaagctataatgggtagttaggagaatgccagagtgattctgatgcagtccttccaaatgccggcagagcccaagctgtgaccagtgacgcagactggaagtcccgtttactgggagagaagaggttaaggaacacccaggtgaacaattaggtcctccacaatgaagacaggtaatgtggaggaaagagagcttgtcatggtaagtgaaagcagcctgaatccatttttgcgctctatgaagcaatatataaatttaatataagaaatatttgttcctataaaatctatatgttttgatagcaaaaaacaaaattatgatttctgtgaaaaatataattcacatccggaacatcttatggttgtgttttgtttaaaaagtatgtaggtttggccgggtgcggtggctcacgcctgtaatcccagcactttgagaggccgaggtgggtggatcacctgaggtcaggagttcgagaccagcctggccaacacggtgaaacctcatctctactaaaaatacaaaaattagccagacatgttggtgggtgcctgtaatcccagctacttggtaggctgaggcaggagaatcacttaaacctaggaggtgaaggttgcagtgagccaagatcgccccactgcactctagcctgggcaacagagcaagactccctctcaaaaaaaaaaaaaaagtatgttgatgtttgtattttagctgcattgctaaccgtttatagtgttttgaatggatgaatgctaatgtttatgtgtatatatttttgttttcttaaaaacaggttcttgctcaagtaccaactctatggacccaggacaggtttgtcccatgacctgctgtgaacagtgtgttgtctgatagaagattcggttggcaaaccatctctctattgccttacagagcaagcaaagaagatggatcgattgaagagccatctgactgtgtgctttctaccttctgtgccctttttaatcctagtatccactctagccaccgctaagagtgtgactaacagcactttaaatggcactaacgtggtcttgggctctgtgcccgtaatcattgccagaactgaccatatcatagtcaaggaagggaacagtgccttgattaactgtagtgtttatggcatccctgacccacagttcaagtggtataattccattggcaagctgctgaaagaagaagaggatgagaaggagagaggaggaggtaggctttaaagttgtatcaaatgtcataataaaatataaacaggagctttggagccagcacccgtgatgttagttcttctcatgcaaatgatttaaagatctcatcttgtcttgtttttctaaggcaggagagaatatatatccttaaggattcaaagaagcaattaattcatttttttccctcattgacacagaagacaaaggacaaacacagaagtctttttaaaggcttcttggaattttgtaatataatacatccaatacattatagagacaaatgtaaaatggattttcctaaataatatattcaatttttaagggagttttgttttctttcatggagatggctggaataaacaatatagccattgtttatcattaaatgtccatttaattcattggccgtggatttaaagaccacacttctgaaagaaacctcagtgcaagtctcagccactggctgggattcctggagacctggctgcagtttctaggctgaggcagggagggagggaggatgcaataacaaggaaggatgtgggacaacaggagactgcttggtttttaataaatgcatttctgaccaaaaagtgtgagtcacctcactccgggaaagactagccagagagaggattgggtcttcgggaatcggtgcatttcttgttttagatgcgagaagtaattgtctgaaaacccaatcctggtcagattgaccagaaggagttaatctgctttcctaggcatttactgtgtgaagtagaggggttggggtgggggagtgaaaagaacattgttctaaagtagcagcttattagtttcttccattcacattgccctcctgttccacaattctttaaccaatgagcaatccccaaaagagtttctgctccaggaaaacctacattttaaatctctttccctcattttatcttaattgccctgaaaaaagaatagaggctaatgctgtatatctccttaggagctaagtgaatggagttttcttgcagttgcctacttctggttcacagctgtgttccgaatggttgaggctgctagccgtctaattggccaggatgtggggtttgctgtagtgctgtcacttacattgcttttggttagccagtcaaggttgtagagcattataaagcttcttcctttaagtcaaaatattacatattatgaatcgcgtttaacctaggagagtcgaacttttacccaccaagaggaattgtgggaccatagcaaagttaaattagaactcacattgaagacattatagttcaaatacccatttactgaaatttgcccaaagtcctgctattattaagtggctatgactaggcctgtaatcccagcactttgggaggccaaggcaggcagatcacctgagatccagagtttgagaccagcctggccaacatggtaaaaccccatctctactaaaaatacaaaaattagccggacatggtggcacgtgcctgtaattccagctactcaggaggccgaggcagaataatctcttgaacccaggaggcaggcgttgcagtgagcagagatcacgccactgcactacagcctgggcgacagagtgagactctgtctcaattttaaaaagtggctataacaagaaccttcactactgacagtggaaaggtgagggaacacaacccctagcccacactggttttggttcctacagccacttcctccaggacaagtcagaaggcagtgatgtcacacttgtgaatggagggcaatagccatggtaacaaagacactgcaggccaggtaccttagcaggtctttctgcagggctgagctatcgctagggaacccacggtgactgaatcaaagggaagaaagacccaagacctggatctcccttttacatggaccctaaagcaaaggttatccctgggtattaaaaagctgggttggggcactgaactcctcagtcctagagaggaagagaactgtgggaatagcatagcactggggcctgaatttcagttccaacatttcgaggattatcccaaagtgtagtatcttactgcgtctgagatacatatgtggtatcttagcgaaaaggtccttgtaactgctgactcagcgttggcaagctgactctgcaccgtccctccttcatctgtgtattgagggcattgaactagttggtagttatatttggctccattttcttttgtttgtgggtgctaagatggactatagtagtagcctgtcagtagaccccaagctagtggccgccagtcaaaagcctttgccacagagaactgctccatcagaattcagcactctggtttgtagccagcagccttgctgataaatcagttagctattttaaatctctttaaaactttcaagttttaaaaagaactcgtgatactagtacttgatgttccagctcagcttttgtaattacaatgcatgatggtaatttcagagcataagcaacatgggataatatacaaagcagtgtacctaacaaccaagcaatacacagaaaacaacagaaacgagagattcttgctcaaaaaatatcagaatctgagagctggaatggcctattggtaaacccacagtctttaacttttcatttttgaagggggaaatgtccatattataatatggacatagatttccattttcaaaccaataggctagaagtttatatggagcggtgttttttgtgttttgttttttgtttttttttttaaataaagaggtgattgaatatagtatgaaaaatactaggccaagcgcgtggctcatgcctgtaatcccagcactttgggaggccgaggtgggtggatca

SEQ ID NO: 10195 - DNA, 6000 bp, Homo sapiens
aagtagaatgtcactttttggcagcttcaggaacctcaagatattttggaatccttgagaaaaggggaatgtacccagttcatacaggtattgggtacagtctcatagcaaatccatggtttggcttcccagccttgggaggtttttaaaaatcgaatgtgagattccttatgtaaaagttccagcaaagccaactttaaaaaaggtcatatagccaatcactgttcttactgcactttgtgcaaataattaggccaattacaataggagtaaaacttatgttgcaaataaattggtcttactatgtcttatctttggtagacctaggggactacagagagaaacatatgtttcagaagaaaactatagtatgcctgttattggattttagccttgtccattgtttttaagtttttattatttgcctacaatttggactgcattctgaattattttctggctacaagtctttaaggttttcaaatttttctctcatttttctaaattgaaatcactagaaattaaaaacatgcttttttttttaaagctctgcaaactaaaactagataacatgatataaactttcagggaaatcactagagaaacttacatacaaacagtcttcatgcctattgatgtctggactctgccgaacgttcatttgaatacctgattcgaactacaatccagaaaaatctgtcagattgccatctaaagatgcttcagagatgctagaaaaattagtttatagactactccagacattaatctttgttttttttatgtttctacagaaatgcctcttactaaagatctgtttgtctgcactgtatatggaggtcaagcccatctgccatgccgcctcctggaatgggaccctgctgtttaactcaactgaacttttctcaggactaagaggctgattcgagaagatatgagataacatatttaaatttgttcttttctgcttatcctaacttgtttttctcctcctttgcctgcctcctaaatagcaacctttaactcacatctttccaaagttatcaaccttgcctttaataagtgaaactttcttaaagaaaaacttccaaaggggaacagaaggaaactaaaatatttcctctccaaatatattttcttgacatatttcaagaaaactattcagaaaagctggaaattcaagaatagctgaaaagctgccttttgtggggggagattcgcatcagtagagaaaacctgcattgatgcagccaggccctctctgagaccttcctttgtctggatataggaaagattaactgagagtctgacacctttaaaagtctgaaagaaacattcaccttgtgttcttggtgtgggctgagccctgcaaggtttcatctgcatagaaagaccagctttgcaagcccgggctcctcttctccccctcccataagctgtcttgccaccgtatcctattttgccatgataaaagccccaattctttctgtaacctcaagatggaatatataagatttgctaccccactgggggttgaggtaatcactctatggttctctgtgctcattaataaatttgtatgccatttctcctatttatccatctttgctcagttgattttcagtgaactttcagagagtaaaggggaagtcttcccttggcttcaacaaggttatgtcatgaaaaatttctagccaggcacggtggcttatgccagcactttgggaggcagaggtgggtggatcaccagaggtcaggagtttgagaccagccttgctaacatggtgaaaccccgtctctactaaaaaatgcctgtaatcccagctactcaggaggctgaggcaggagaatcgcttgaacctgggaggcagaggttgcagtcagccaagatcatgccattgcactccagccagggcaacaaaagcgagactccatctcaaaaaaaaaaaaaagaaaagaaaagaaaaatttatattcatctcagaattttacaagtttagctaaagccttaattttgagtcccatggttggtaagtatctccgtttttaaaaagaagtgttagttatatttccacaggacttgctaaaaggtggtctaggcaatgaaactgaagatgcgggatgaatgggaagaatattttggaaacagaaccttaggacttgatggacaattaggtgacaggaatgagaaagcagaaataccggataattagagtaaaaaaataatgtactaagtaagataatgaattaatttatatgtttattgaatcccatataaaattatgtaacttgttagatttcaggggagataatggcctctctatacctgagatctaggatactgacaccatttacatcatcactgtaagataaatgaattcaacatcaacattttgatctattcacttataataaggcaaaggaaagaaaacatcatgattttgattattaaaagccagtatatgatgatttgtatctttagtgtattctaaatttcatatattttactgggaatgttaaaaatatttatgaattaggccaggcatggtggctcacgcctgtaatcccagcactttgggaggccgaggtgggtgggtcatgaggtcaggagatcgagaccatcctggctaacacagtgaaaccccatctctactaaaaatacaaaaaaaaaaaaaattagccgggcgtggtggtgggcacctgtagtcccagctactcgggaggctgaggcaggagaatggcatgaacccgggaggtggagcttgcagtgagccgagatggcgccattgcactctagcctgggtgactgagccagactctgtctcaaaaaaaaaaaaaaaaaattatgaattatatttattgttggaagatatcaccatctttctcaagcatgtggcaaaccagttggatactgagaaacaatgtggttaactgactaagatcatgaactctggagtattttgtcctgggtatgaattttgcattcccatttattatgagaatttgggcaagtgtttaatctctttgtggattaattccctcatctgtaaagtggggataacagtattttccttttttagtgagaattatattagctaatatgaagcccttagtacaatgcctgacacttagcacactgtactcagtttatgttataattattattttgtatttcaggattatcatagaatccgatgggaaaaaaacaaaaaacagttctaatttttagaattcaaatattattttgaataagtcttcaggagatagattgtaagttgcttgtggtgatcctaaaactgagcttatgaatcaatctccaaaatctatcacttatctttttttttttttttgagacacggtctcactctgttgtccaggctgaagtgcagtggtgcagtcttggctcactgcagccttaacctcccaggataaagtgatccttccacctcagcctcccaagtagctgggactacaggcgtgcaccaccacaccaagctaattttttgtttatttttttggagagacgaggtctcactatgttgcccaggctgatctcaaactcctgagcttcagggatatacctgcctcaggctctgtaagtgccagaagtacaagtgtgagccagcaacttatatttattgaacaaatgtattagtgttatgctttgctacagtcacagttcatgttagtcaatttctagaagggtgatgcatttctgaatgatatgttgaacacttttaatttttgttgactacttcctttcccctcccataagaataactgtattcccatgtaactgaagtgcatttacacacccctgccaggagtatacctcttccattacgtgagaaagagctgtgcagatgtttatgtggcatttgaatgatatgctctgcatttatccatgcattctgctaaaaatattgttatttatttttcatatcaccttttccccattagatagcaatgttcctcaaggtaagtaatcatatccattttattttattcttccacttgctcacagcatagatatgtatacttttgggtgtgctttgcatgaaaaagctgtgtacaccttggggactgacttactgaaataacttctccagtatgactcttgaaagaactaggtcaataacccatagagttatataattttttttttttttttagcttgaggagaccttagagatcactttttccagatccttcattttacaaattaggaaatgagccaggattacaactcatcctctcaactgtcaagccctgtgctctttcagcctcatcaactgcctcttggattgaattgtttattttccaggtgatttctgcatattatgatgtgtgtgtgtgtgtatgtcagggtgtgtgcatgtgtgtttgagtgtatggtttttagaactttataaccttgtccaattacagaaacatattttatgtagaagaaagaggagatgacaaaggataaattaaagggagaattttctcttcctcttgtctttattaatgttattatcattaagaaacaaaatggtacacagaagacaagggaacataaaattatcatatgaaacctgtcttttggaataatctatttccagactccacttagagatcattatcttggctaccgagtcggttgtggggtgctgagacaacgtgtgtgtctgtaatgtgcattcaatgtatttaggagagagactttgcacgtgtctctaatgaaagtgaaagggggcagggtgggggcctctggggaggagacccacagtgaaggggaggaaaacgggcttctcgcagaggaggcaggtggaaagagggaggggtctgtgcgcccgcagagtcgccaggcgccctgcgagttgtctccgctgggaggggcgaggctgtcacttgccagggcgcgaggagcctcagcgcggcttggagaacttggccccgcgcagcgtctggtcactcgctctcctctggggactgcagagaagcaggacctcgggccatgggtgagtgcgcgggcgggcgcgtacacctcgcccaaaggctcggcctcgggaatgggcattatagaaagaaaatgaatgttcctcggcctcagactgcgtccttcccagctctgttccccccgcgcctggcgtcccccgccccccgccctcttgtctccggacttttttttctgggagagaggcgatggcgatggggtggcacctggaggcgagggagggtgcccgactgtttacagtgggtcgggagggtggggggctgcgcttgggcgctgatcctctgcgccggccccaggacccaagcctgggggtccggtctaccgtgctgggggcggtatttgggaaataaagaaagactaagagacccaggatccgaatagcgaggcgattacagggagatctctgtcctcccgagttcccacgttttcatgttctctttggggagcaagttgaaacggggcacgagaaatggaaacttcctaaaacttccactttgtacaggtttgagcagaggaaggtgctggtgcagggccagactggggacaatttctagtccctttccaaacgaagtgcccatttgcacaaaaggtttgaggttgaggctgaaggctgattcttcctaaattccacctgggtaaacagcgtgattaaaagggcgtccacactggctcgggtcactggacggtggagttcggcgcagttcagcttcgctcaagtttccaggcagggtccgcttattcggtgcttagcggaggcagcttggaatagctccaggaatgtgactgcgtgtggcggaggggaggaagaactgggtgtgaaatagccgattcacacccagcactaggacgcagggtcccacgagtcacctcgaagagcgagggagaagctggggaggagaaagcactcgccatccctggactggcgtatccacaggcgcaggggagatgctgctcttccgcggttgccgactgcgttcagcccgcagcccgagttactcttc

SEQ ID NO: 10196 - DNA, 6000 bp, Homo sapiens
agcccaatataagattcctgtcccaatataagatgaaagtgtcccaaaattctccttcagccttcctagttaagtcttaccaaggctgtcatagtatgaggtgctctcagcccctgtatttggaacagcctcggggagagagggcaccttgtcctgaaaccgtctctaccagtcctagtcatgggtccttgtacaggtcaactagctgaattagactttttctacagcaaatgtaatgctagctgggtaattatttcttagggtttcagcttacaaaggcaaatgttggttgttactgtaaaaagtgcatttaaaaatcagtttaaaaagctataaatagagtatgaggtttagttagataaatgtggacccataggacaaaatttctcctgttctaatatcattcaaatgtgttcttgtgacttgggagaattttttcactagtagcacatacatgacttcaaaaactgcttcaatttcaacaacttcagtggaagaggaaaatgtgaatgtatgccacagaaaaccattcgatgcctcaaaaagtggctgtagagatgccccaaaccctgtttgaagatgcatattcaaagaactcaaataacatattaatgaaatgtggtttatttgtttattttatttttattttttttgagacagagtctcgctctgtcgcccaggctggagtgcagtggcgcgatctcagcttactgcaagctccgcttcccaggttcacaccattctcctgcctcagcctcccaagtagctgggactacaggcgcctgccaccacgcctggctaattttttttttgtatttttagtagagatggagtttcaccgtgttagccaggatggtcttgatctcctgacctcgtgatctgcccgcctcggcctcccaaagtgctgggattacaggtgtgagccaccgcgcccggcctaatgaaatgtgaatttaaaacagtatttctaaagtaatttagttcttcatgtgatttaactggagatgtagtttaatgaatacagaaactgctataagatatttgaccctgcatcctaaaaatttatctgttcaaattcgacatattgtgtttgagatctctttattttggggggcatatatgatatttgtgaccaatgtgaatggttgaggtatggtcctcattttactggttaacagttcaaagctttgtgtctcactctttctctgataactttataaggggatgggcagggagtggtttaagtgtagaagtattcagctggacttgaatatttcaataagtcagattaataaaatcagggcatctgctttgtttcttctttttacatccttaggaaattcaattggtgatctataagatcactttaatgaaaattaagtgggtttaagatttattatacttaattgggaagaaaaagccacaaggcagtgggtgggaataactgactccctgtggaaccacttgcatgtttgttatgggatcccaaagttaccccaaatctttctcctgatgctcagagtgaggagatgggcccagagcagtgaccacagtcagggagatcagtgggatagggtttggacagcaacctctgctttcctctccagctgggagactggcatctcttttgagctgccgtacctccctctctctagggagagcctgactgctcttttggttcaaaagggaatggcttaagcaaatctaactttagggaatttgccaagccagggttaaggagcacgaatccaacaggtttggagtggtgctttgaaagagcagcaaatggcctggctgctgctctcttgttcctccctgaagcctgagctctgcccagctagtgaatgacaaagggggcgctttcagcctctgtaaatagcctattgtacaaggggaggaggcggggcacggaatggcagcatcttgccagcttgggttgctgcgttaaggaaagatgtcaggctttcttaatttgccactgcaggggcaagggtgtcatttatgtgggtttgtttgagggctgcattcctagtgaagtattccatcaaactgccattattcatcttgatgaaagcttgaggaactttagaaggagagaaacatccagaccacccggtttttggtttctaaatgacatgaagagaatacaatgttaatgtaagtaaaagtttgcagagttgcaggggcagtgtgtgtgtgtgtgtgtgtatgtttgtgtatgtgtatcttcaagagaatgatgtccttgtgagtcacctctggccctgagccactattttcatggtacaaataaaatggtgaagaggtgaacctttgtgtatagtgggccttgaactcaccacgtgttcagaggccagggtgatacaataaatgctaacgtttttgtaagacattgagcatttaggtggacctcaggagggagctgtcataatacctgggagtgtgagtactggaaggactttagaaacctgacctcatggttcctaacctgggttgggctaaaggagacttgtgatagttatgtgtgttctcaggggagagggtcagtggcttagcatagttaagaattattagcataggttggatttagagtcacattggttggtgtcccgttcttgactaacatcctggggaaggcttataagtctctggccttggtttcttcctcatcagtttgcttttgtgatgttcagataagacactggatatgaaagcctttccaaaacactaagtaaatgctaattgcatttttagttctatccaaagtttgggtagacgggtaccaggattttggtttctgacagtccgtgcagttcagtttccatcaccctgcctcgctatgcctgtctctgcccaggtctatttaaaggaatctcctgtgctggatctttacactgggcttgtgcccagatttccttggccattgttaccttccccatccttctgtggttttagactccaggtttacagaaaacccagctgagcaaacccactttctgtaagagtggggaggagggtgcacaggagtggctgtagaggaaggagaagctggctgtcagtagccttatgtgttcccagctgggaaatactggctccttaagcctttaagccaattgaattatatttttggcaaacagcggcatgatttacatgcccaggctataaatttccttagatgtttatatggaaatttgattttgaaagaataaagaaatattcaaaccagaacactactggaataagaatacaatctgtctgagttttaccatttgttagcaagtgtatgagtcttagtccttcttagagaccccttagtctaatgcttatgttcacatacagcgttgaaagactatttcttgtgcctgattttctttggatgtaggtgtacctccatttttaaataccccaagtgccttttccttaatagcagttaatagaagggaaaagatttataatgctatcagtgtctgtttaagagttgttcttcacacatatctaaatgagctattgtcttagttctttatgcatagactatagttttcctatgtatagcattaatcagtttgttcagtgaagttggcttgcagcttgttacctggctgccatttaagaggcatgaattaaactgctatagtttgtcattatcacccactaaatataggaatttggctggattcaaacccttagtattatagattagtatctaatgaaatgttcttgtacacatgctactaaatatataattttctgaagttttttttttaaagtgttctttcttagatttaataaactttcttggtgtaaagcagtctatagcatggctactgctgatgcttaaaatagacaaattaatcccctgtgtctgactgtatttgtttacagaggaattatttaagattctcactcagggatgtgatcctgttgaacagcacctgcaaattcacacaatctaggttttatgggagttactctaggagctttggggagagaagagagaaaggcatggcagtgtgtgtcggggtgagtacttcctattcaggcctggagtgctgcagggtgatgaagacaactagaggtggaaggatttgagggcaaggcaagtttgcacattatattcccaaggctgctttgaggttgtggagttgcaatactgtttctgaaatctgaacactcagtgtcaataggacatggacttgatttgtctgcttatcccgcctggtgtacatcccttcctcagaaaggccttcccccgtgccttgcagaccttgcttgtttgatttttatcttccctgctagaaggttagcccactgaaagcctagaccaggtcatcaacactgtcttcccagcgcctggccaaagcctggctcacactaggtgctcagatatgcagtgacgggagtagctcaattcctatgtattcgtctagaataaatctgctgtcagcatgctctgggcaatctgtttctttcttggtatgccttaccttggttagacataccacccggcatcctatccttcatttcagtggtttaaaaaatatatgcccgttgtctcttattgggaagctgagcagaaagaaaacagtgtctgttttcagaaccggtcctggcagcaacactcactgatgcctgtccctgcccatgggtggagcagtggggtgactttgctgctggctgcccattggcctatcctccaccctctgctctcctgagaagtcaagtgtggattttgtctgctagttacctttagcccagtgggcagcagcgtggggctcggcatgtgacttgtgccctgagagaccttggtaggctgggggagcgcagctgagccctgctaacccccgcccacttccaggctcattgccctcttctgtgtctgcagtggggtgtcacctagtagtcagctgttggtggcacagatggtgagtggttttgttaagtgctggtgccttctttccagaaccatggcctgaagaaatctgcttatctgttctttctttgctgtcatggtaaaccttgaaatttcgtgtgtgtgtttgtgtgtgtgtgtgtgagtgagtacacttacatggattcattgtagcagagattgaatgagcagagcaaatacattatgttggttctggtagtattaatggcctgtaaaacagagaccattaaatttaaaattaatttcatttaaatttaaattttagcagaaaatttctgtattttaacaaagaaaaagagatgcaaatcaaaaccacaatgcatttctctgatgaccagtgatgatgagcattttttcacgtgtctgttggtggcataaatgtcttcttttgagaagtgtctgttcatatcctttgcccacttgtttgttgtttttcttgtaaatttttgttttttttcttgtaaatttgtttgggttctttgtagattctggatattagccctttgtcagatggacagattgcaaaaattttctcccattctgtaggttgcctgttcactctgatggtagtttcttttgctgtgcagaagcttcttaattttgtctgaacactccttgtaggcagtgtttttacctgcgtgctttacttgttctgcactcaggatgaatcacagagcgttggtagaggaaataatcataaaatctaatatttttgagcactttctaacgtgtgtgagatcattcttacctctttatgtgagtcatttagcagtcagaaaagccctgcgagataaggtgctatttccgtctccatttacagatgaggaaactgaggcacagggaagggaggtcatatgtcccaaatcatacagctcatatgccagggaggcagaatttggctctagcatctagggtctttttttttttttttcttttttgagacggggtctcactttgttgcccagattggagtgcagtggcacgatcccggctcactgcaaccctctgcctcctggattcaggcgattctcctgcctcaccctcctgagtagctgggattacaggtgtcc

SEQ ID NO: 10197 - DNA, 6000 bp, Homo sapiens; identical to SEQ ID NO: 3818

SEQ ID NO: 10198 - DNA, 6000 bp, Homo sapiens
tctcactctgtcacccaggctagagtacagtggcgcgatctcggctcgctgcaacctctgcctcccaggttcaagcgattcttctgcctcagccccccgagtagctgggactacaggcgcccaccaccacgcccagctaatttttgtatttttagtagagatggggtttcactacattgtccaggctggtctcgaactcctgacctcatgatctatccgcctcagcctcccaaagtgctgggattacaggcgtgagacactgcaccccgcctactatacatttttaacttgtgactaacttcaggtgatatcatataacctcatacgtagtcaaagaaccttacaacattacatttccatttttctctttcagccattgtgctattgttgttacatattttgatttctcatatgatataaaccccacaatacattatttttacgttaatcagatgattatcaaggcaagtggatcacctgaggtcaggagttcaagaccagcctggccaatgtggtgaaaccccgcctctactaaaaattcaaaacttagccaggtgtgctggagcatgcctgtaatcccagctacttgggaggctgaagcaggagaatcgcttgaacctgggaggcggcggttgcagtgagtcgagatcctgccactgcagtccagtctgggcgacagagtgagactctgactcaaaaaagaaaaacactctttatactcactcatttagttgccgtttctggtgttcctcatttctttgtgtagattcagttttccattgggtatgaccttccttctgcttgagggacagcttagacactcctgcaggtgattctttcgctctgctcgatctaaaaacagctttattatttcccaacctctgtctcctctcctttggggactccaattatacccatgtttcaccacctgaaggtgaaccacagttcactgatgctctttccatttttctagtcatttttctccgtttcatttggacagtttgtattgctatgttttcaagttcactgatcctttttttgagacggagtcttgctctgtcacccaggctggagtgcagtggtgtgatctgggctcactgcaaccttcgcctcttgggttcaagtgattctgctgtctcagcctcctgagtagctgggactacaggaacacgccaccacacccagctaagttttctatttttagtagagatggggtttcaccatgttggccaggctggtcttgaactcctgacctcaggtgatccacctgccttggtctcccaaagtgctgggattataggtgtgagccacggcgcccagccacactgatcctttcttttgcagtgttccattaatcccatctcgtgtattatttctctgacactacttttcatccccagaagtacgatttgaggcttttttccccgtctttacttaacatattgtctttcctttcctccagcatcttgaacatatggaacatggtcacagcataagcatgtgtgtgctgtcctctacttgccctgtcacctccagcatcttgaacatatggaacatggtcacagcataagcatgtgtgtgctgtcctctacttgccctgtcacctccagcatcttgaacatatggaacatggtcacagcataagcatgtgtgtgctgtcctctacttgccctgtcacctccagcatcttgaacatatggaacatggtcacagcataagcatgtgtgtgctctcctctacttgccctgtcacctttgtcatttccaggtcagttactacaacctccacctcccggattcaagtgattctcctgcctcagccttctgagtaactggggctacaggttgcctgccaccacgcctggctagtttttttatttttagtagagatggggtttcaccatgttgtccaggctggttgtgaacttctggtctgaagtgattcgccctcctcggcctcccagagtgctgggattacaggcgtgagccactgtgcccggccccaggtcaattttgattgatttttcccatctctccatatgggtcataatgtcctgcctcttttcatgcctgtttttttgttttttgtttttcccggatattcaatattttgtattctaccttgtttggtgctggatatttttgtaaacctatacatatctttgcatttgtttctcgaatgtgatcaagttacttggaaactgtgtggtccttttttttcaggcagggtctcactgtgtcgcacgggctggagtgtagtggtgtgatcttggctctctgcagtctcggccccctgggctcaagtgattctcccacctcagcctccccaatagctggggccacaggcacgcatcaccacattggcgactttttggatttttgtagagatggggtttcaccgtgttgctcaggctagtctcgacctcctgggctcaactggtctgcctgccttggcttcccaaagttctgggattacaggtgtgagcccccacatctggctctgggtcttcttattcagtggtgtttggtgggacctgaactgtatttagtctcgtgttgatgcttccctactacggggtgagaacttcttcctgctctaacgatgcttccccactctggctgctgagcacaggcactattcccagccctgcatgggctctgatcctgggtgggtctttccctggccttgagtgttttcttcacgctcctgcactgatctgtgcttagctgaagcctccaggcagaccctctgtgggtgtctgggcttctcggtgcagccccctcctctccagcactctggagcacctgtgaactccagcccctgcctggccacctctgtcttcccagttgagggagacgccggtggctgcctgggttttctctgcaccggcctgggcagtgggcgggactgtcctcgctgccgggtcgcttcccctctctccagcaccacggtcctcggtttcgtgagcccagtgccttacgtgctgttttcacacctatttttttggttgctgcagctgagagtgtgtaagtcactgttactgcatctccattctctgccaagcctcctccacccgcctgtccttgtcagtccctacacctgctgttcctgagatgccgcctctgtgaggcctgcccggctctcccccagtcctgcctcttctgccccggggcaggtgctgtcgcgggcaagcgaggatccgtgctagcgaacctgcgcgcctggggctcaccggggctgggtaggtggctacaagaacctgtcttcccgcggtcaccccatggggttggctgaggatggggcctgagaccccgagggtggctgaccgccccgtttcagttttaaggggcaggacgtgcttgcgccggcccctcggctccgcgctgcctgacccgaagggccgtgggagcggggagggcccagtccctgttccgggggtgggcgaggggcggggggctgcctgaggacggggcctgggccggccgcgggctgggacgtggcgggcggggcggggcggggcggggcggggcggggcgaggagacgaggaaaaacgcctcgggagctgccgcgccggcgccgccgccaccgccagagggcagcgcgtgccggcgcgggaggcccgggccccgcccccgcccggccaggccccgccccctccccgtccccgcccctgtccgcctcgggccccgccccgtctgccgctccgcccctggccccgccccccgtcccggccccgcccgccaggggccgcgacgctgcccgtgcccctcccactgcccgctcattcgggggccggcacctgccggcctgtccgctccctgcttatactttgcacgctcgcagccacgtttccgcacacctgtcccctttccacgcacctgtgtccggcagcccgcacatctgtgggagcgctgcctcctcgccagctgtccgggaagttcagcgccgctctcccacgggcgtgagaccgccccacccacctgtccgtgactgcagctccggccgggagggcggcaggtgggccccggcgctgctggctccttgtgggacagggccgcggcggcggcgcaggacgttctcccgccgggaggaccacgcggcggtccctggacccttccccgggtgcacagcggcggctgcgccagcgggggcaggatgggccgtccgagcgcacctccatccgccctcgcgacgcccacgctggcccagacgcgggatttggggtggaggacgctgggctgggaaccagcaccttgggacggccgggtagttcgggccttgaggagtcccacaccctgacagctggcgccccccacgccccgcctagctctcctcggcctggggacaccggctgccaggcctctccagtttcagcctttcctgggaggacttcctggaagagggggcttcaggccccagaaagagaggctgctctgggggatggaggaggtgctgggatggtgactccgcggagtcgagggtgtgaggcgggatgtgggcaggccgtgaggtttgtgttgcaagactgggaggcaggatgaggggaggccatggggcggctggaggtgcggcctgggagccctgcgtgctgggccctgggcagggacggcaggcgaggcgtgtggaggaagagccgcgaagagctgggcgctgtcttctccacgcctccgtttcttcatctgctcctggggccgcctgcccggtagcggagattgaatcgcatgttgacgtctattacgatgattaatgttcttgtcattcccgtcactagcaggtgagaggctgggaggcctcaggtgggaacatacctttggccaaaggcaccaggtaacccgaacgccccggggaggacccctgcctgcatcgccgcggccgtccccccctaccccgtccccagcagctccggctgggcgaggccctgcttctcccttctgctcccgaagaccccccggggcgcagacctggaagcctcgaagctcccgcggccgtccagtccgcccccttctgagcaaccagagagcggtctgggcccggcccggggctgcgcagaggtcagactgccgcgggcagggccggagcctgctctgggggtcgcggaggtgtctcgagagttgaggacccgacccgggcgcgcgcgggcgcaggtatggggagggcgcggcggctcctggccggtcctaggagcctgcggggaccaagggcgcgcgggcggggccgggggcgcggcgaggctcgggttggggcggggcgggggcgggggcggggccggacccggggaagccgcccgcccgcggggacgtccgcaccgcgagggttaaggccgggagcccggcggggcgggggcggtgtgcgcgcgcggattggggaaaagtttggcggcggggcggggcacgggggagggctgacgcgcgcggattggccggaagttgtgccgggggcgggtcgggggtccgggctcggcgctcgctccgggagagttgacaaagccccgcagggaaggacgcctcgcggcgcggcgccccgggcccctcgccccgccgccccgggatcccggccccggcccccggccccgcggactcgcccccgccgcctgcccggtccgggaccccgcgccccgagcgcccgagcccggaccccgacccggcccgagccgcccgcgcccaggtagcgccgccccgccccgagaccgggcccgggggcgcggggcggcgggatgcggcgcccggggcggcgatgaccgcggagcgcacgccgcgggcccggccctgaccccgccgcccgcccgctgagccccccgccgaggtgagccccccgcgcgcgcggccgcgaccccaggtgggcacacgggggagggcgggggtccggggcgggggcggggaggggcgggttcggggccccagctgggcacgggtcatgcgcgccgccgccgctcctgcgggcccccggcctgccccgcccccgcccccgcgccccacgtgggccccccccagcgcaaattt

SEQ ID NO: 10199 - DNA, 6000 bp, Homo sapiens; identical to SEQ ID NO: 1090

SEQ ID NO: 10200 - DNA, 6000 bp, Homo sapiens
tattttaatacttttcaaattttgtgagaataaatttaaaaggcaaagtcaggcatggtggcacatgcctgtatttgggaggctgagacgggaagattgtttgagcccaggagttcaagaccagcctggacagcatagtaagaccctgtctcaaaaataaaatagaaggcagaaactacccataaactataatagctatagccccactaacagcccagtccagttcagcagggctacccaggggcccttcttcctccatcccatggtggcctgccctgatccctggcacccaaccctgtgccctgacagtgtggaagggcactagtggttcctggggaaggtggtaggagatggggagctccgaggggagatcgcatggctcccagggggtcccatgggcagaagggacttgatacccactccggacctccgtgtcccctgtccttccactcagcctcatggcagggccgagggaagctccccgcagcagccccagccctaggccaggttctgatcccagaggggagctgggcaggaggctctctctggcagctcgcctgccctgggttccaggtctccaagcctcggcctccctgcccacctccctgtcgggaaaggcggcagctgcctgcccggagtgctgtggggaacaggcggtgtggatctgagactgtgctgggaatgtcctctctgccgaaggcgcctctgccattttccgagtacctgcaagggagacgcaggagacgcgggtgtgagcggggccatgggcaacctgcggaggccctgcacccaggatgggcctccctcccaggcaccctctgccactcacccacgcaggccccagcaagccaggctgcccagctctgagtcaccgccagggctgggctgggccgggccgtcagccgcacgcgccgcttgtctcggcccctgcctcccatactcaccttcaggggggacccctgggtatgggcctcaggaggtgggtgggggtgcagggggagtgggtagggaggtgtaaaccggagtccagcagatgggaagttcctgtccggccggcacctgcttggagcctcctgcacatgcggaccctcaacaggctccccgagtcctcgcctgccctccctgcctcaaaggccccagaagggcctacttcatcaggtgccacgaggatgaagccaggtaatattgcaaagggtctgtggaaacgcttgagcaagggcactgtgatgaaattgtggctactgacagctaatgtgcagagtcaccgaaattcaggagtcaagcagccggcctggcctcacctcagtgtcgggggaatgccatctgcacctgtgggcttggaagtgatccatttgaacaatacaattattcagacaatactaaaccgagctttcaggcaagacctcccgtggccctgacagtcctggggcagagtgggcagcaactccttgctggtggccgtggcggcactaggacccttttgaaaccaatttggcaaaattagcggcaccacggaaatgctcctgccctttgacctaactgctcccagacagtgccactggagaagccattcagaatgtggagggcgccagaggaggcagctgccacgcagtgcgtagtgggcagaacggcggcctccaaaagacatagtcatgtcctcaccccttgcagcctgtgaacgtgaccgtatttggaaaaggatctttgcaaatgtaattaaggtgagaatcttgagatgggggatcctcttggattatccaagtgggccctatatccaacgacaagtgtctgtataagagatggaagagaagatggcagagtgggaagcagatgctggagcaatgaggctgcgagccaagggacttggagccctgggacacttggagcccccaggagctggaaaaggcaggaaagatcttccctggagccttcagaggcagtgcagccctgcctacaccttgattccagacatctgctcttccagactatgagaaagtaaatttaagtcaattagtgtgcagtaatttgtgagggcaacctagaaatacaagatgctactgaactaaggaatccccggctgctactggagggagaggtggtgggcctgggccagggctgcggggacaaagggagggagtgggttgtgaaagtgcctggtccccagtccctcctcctgccagcactgcccactggtcaaacccacccagaagctggagagcaagggaccctcagagatagggtctgtaggatcaggctttcaaggacaaatgggagaggggctggggaagggacacatggggaccagacccctactgggcatttctgccaaggagaggatcctggtgaggaagaaagcagaaagctatgtgttcacagatgcacggatgctcccctcccagagacccgtggccgtgggtgcagagggagtcagtccttcttggaggtactgggaaaggagcctacagctccactgagcccttctgcctacaggaggggccccactcagcagctgttccctgagggagacctgtccacgcgtgagctccttcccacagtcccatccagtcccccaggggaaggggcaagacggtcaggtcaggacccacacgcatgctggtgctttcagaacctgatgacttagttggttaagagagctcacacctgcaatcccagcactttgggaggctgaggcaggtggatcagttgaggtcaggagttcaagaccagcctggccaacatggtgaagccccgtctctactaacaatacaaaaattagccgagtgtggtggtgcacacctgtaatcctagctacttgggaggctgagacaggagaatcacttcaatcagggaggcagagattgcttgagctgagactgtgccactgcactccagcctgggtgacagagcgagactccctctcaaaaaaaaaaaaaaaaaaaaaaaagagcagggccaatgtgctgctgtgccttggggaacggtgtcctgggagcggacctggctggcagtgacctggggctgtgcactggagggggctggacagtgcacttggaggtgggtgagcctgggccccaagacggtctggggacatgggcttggccagagcaggaaatgagggtggccaaggacaggtgctgagccaccgagtcggcacagaggggtgggcatgagggcttcctgggagcagggcccttccaagtccctgaggtcagcccagggacaccctggcctctgggagattcatggtggggctgtgcatgggctgggtggggtcagcaggcagccagtcactgaggggctttcagcgcccattttcctgatgagcacctccagtcctggaagccacaagccaggcacgcagcccacccggccggccctcccggccagctcactggctcccatgggccccggacctccttgggctttgcctgaaggtgggagcagatggccttttccttgtgagggtggacacagaagccaacagtcatgtggggtgaggggacccaggcacctccagcgtcccccgcagggcagcaccttcccctcctgggaacccacccctcttcagctggactctgagcccaccccgtggagcccagaacctcgggccagctcaggctctgccaccagctctctgtcatcctccctcagagccgggctgtgctccccaagccaggggtatccagcccccgctcttcatcctaggccgggcaggcagccagccccaggcctgtgtcctccttggggggcggggggtagggacccctcgcgcggggctctcaggcggcttagctgcgtgcggccccaggtcagtcaacgcagcctctgcacctcgccggtcaggtacgcaggccgcgccgggctgccccagacctgcggcgcacacgggaggctcagcctggaatgccgtcctgccctcctccacctgaggaattgccgctcacaccacagggttcagctccgcggcatctcggcgaagcctcctgacatcccgacccccgccgagacctcccctctgagctcctgagcacagccccaggggacccgagctgcgcgctatgcaaacacaggcctgccctcgccctcggtgcgccccgtgcccgccgccccctgggccgccccgcggtgcgactaggggcctagcccgcctgccccggctcccacgccctcgagaccgccgggcgcccccgcccggccacgccccctcggatgccccgctccgccccgagggggcgtgccctgcgcccccgcgagccgggcggggaccgggcgggagcggggcggggccggggcggggcgcggaccgtcccccactggctgcggcgcgcggggcagcccaggctcagtgcgcggtggcggcggcgtcgcgggcagctggcgccgcgcggtcctgctctgccggtcgcacggacgcaccggcgggccgccggccggagggacggggcgggagctgggcccgcggacagcgagccggagcgggagccgcgcgtagcgagccgggctccggcgctcgccaggtccgtgcttggggccgggcaggctcgcggaggggtccaacggtgctcgcggaggggtcggggcgcggctgtcgcggaaccacagaggtccctgcagcgggccgggccggggcgcgggcttcccgctccggaaagtttgccgccgccgccgccctgggagggctttgcagcagccagggagggaagggggaggagggagggaccgcggcggggaggaggcggccggcgccaggcggcccgggagccctgggcggcggcggcggcgggcggggcggctgggggtcggaggggtcgggacgcaggagccggccaccgccgctttcgtccctgtccgcccctctaacgagctgccttcctcctcctgtagtctcccgagcggcgcccgcctcccgccggtgcccgcgccgggccgtggggggcagcatgcccgcgcgcgctgcctgaggacgccgcggcccccgcccccgccatgggcgcccctgcctgcgccctcgcgctctgcgtggccgtggccatcgtggccggcgcctcctcggagtccttggggacggagcagcgcgtcgtggggcgagcggcaggtaagaagggacccactaggcacgggagaggccggcccgtgcgggcagaggcgttggggacgggaaccggccccgggtcggaggggccgccgggtgtgagtgacgccccggggttagagcccggattccgctgcctccttgccggagagcgcggccagagctagcgcggcgacttgtggtgcgcccggagccgcagctaccctccaagtgcgaggccaccacggggagccaggctgggggttggcgtccgcagccccgatcccctgcgactccctagccctggcctgtcgggagggcgcggggggccccatttccacgattcccgctgttgttattcgggttctgcgcagacggaaagttcccattgttggcgtccccctcccccgggccccagtttgtggccagcttcggccaaggcgagagaccggacttctaagggtgggtgtgcgcgtcagcgaagcccggcccctgcccgcccgaagaggcagcagcctccagcgtccccgctgccgaccctgcccctgcctgggggccgagggcgcttccccgtgggtgcgcgccgagctccaggcaagcgaggggcgcgtgtcccagcgtcgcgggccctagactgggctggcggtccaggtcccgcgggacgtcgagggtctgaagggaggtcccaaggggcgaggggaggggaaggggcgcccggccggacctgcacacgcgccgcggttcctcgtgggccgggccgagagctccggtgccgccgccgcgtacacccgcagccggctccggacgggcgaggggggcgcgcacagctcagcccggcggccgcgcggagggaggccttggcccggtgagctcgcgccccacccgggccgaggcccgaacagccgcttctttgtacctcgacgcggcca

SEQ ID NO: 10201 - DNA, 6000 bp, Homo sapiens
ttccctcatgtcatatgagggactcggtgggaggtaattgaatcatgggggtgggtctttcccattctcataatagtgaataagtttcacaagatctgatggttttataaagaggagttcccctgcacaagctgtctcttgcctactgccatgtaagacgtgcctgttgccttctgccaaattacccagtctcaggtatgtctttatctgcagtgcgacaatgaactaatactgttccttatgtttttctgtgtttgtaaaaataatcagccaaaggtcatcagtttatttgagggaaacttctcacattaaagccagtcaccaaaatggaaataaggcactcaaaggaaacagacattggcagaagaaaatttaaaagaaaaatgaaaaacctacatctgtaataaaagcctcagaaatattcacaaaacagcaagagaagattataaaaagcaaaaagacctgaacgtgtagaacacaactgtatatataagtatatatatatatatatatatatatatatatatatagtataaatttaaaaaagcaacagagaagttggaagataatgataaatttatattcaagaaagtataagaagacaaagaaaaaaggtgaaaatatagaaaattaaagactaggaagtctaacaaggaaatcattcctatatgagtaacaggaatttcagaaagagaaaacagaatttggaggaggggaaattaccaaaaaattgagaaaatatctcagtatttaaagacatgagtttgtaggttaaaagggctcatggattgtccagtacaatgaaaaacaactacttttgcccaacttcatctctgaaatttcatactcctaagaatagaaggaaattctgaaaatttccagatagaaaaaaaacaggccaaagaataaaaaacaaaacaaacaacaacaaaaaaggtcaaataaacaggaataggaaaatgggttcagatttctcaacagcaacacagaaaacaatggaacacagtcttcaaaattttgaagggaaatgctttccaatgcaaaaatgtacccaaccaaattctcaatcaagtgtgaggttagaataatgacactttgaattcttatgcaaaaatctcagacatccaatcaaattctcaattaagtgtgaaggtagaataatgacattttgaattcttatgcaaaaaatctcagaaagtttagtccctgtgtatcttctcaagaagctattggaagatgtgctccataaaacaagaaagaggaggatgtgagatctagttgtattagttcgttttcatgctgctcataaagacacacctgaaactgggaacagaaagagggttaattggacttacagttctgcatggctggggaggcctcagaatcatggcatgaggtgaaaggcacttcttacatggcagcggcaagagaaaaatgaggaagaagcaaaagtggaaacacctgataaacccatcagatcttgtgagacttattcactatcaccagaataccagaatagcatgggaaagaccggcccccatgattcaattactcccaccctgcctccccacccccaccccaacctagctctctcccacaacacgtgggaattctgggagatacaattcaagttgagatttgggtggggacacagccaaaccatatcattccaccccggcccctccaaatctcacatcctcacatttcaaaaccaatcatgccttctcaacagaccctcaaagtcttaacttcaacattagcccaaaagtccacagttcaaagtttcatctgagacaaggcaaatgccttctgcctatgagcctgtaatatcaaaagcaagctagttactttctagataatgattacctccagggtaaacaagaggtttacaacaaataaaatgtcataatgtcccaaacagaataatgtcccaaacagaaacatcaagaaatagcatataggtattgtattagtctgttcttgcattgctatagatacctgaaactgctcatttataagaaaaagaggttgaattggctcacagttctgcaggctgtaggaagcatagtggcttctgcatctggagaggcttcaggaagtttccaaatgtggtggaaggcaaagggggagcaatgggtcttacacggtggcagcagggagcaagagagagggaggaggtgctacacacttcttttttttttttttttgagacagagtctcactctgtcaccaggctggagtgcagtggtgagatctcagctcactgcaacctccgcctcccaggttcaagcgattcttctgcctcagcctcccgaagagctgggactacaggtgcgtgccaccacgcccagctaatttttgtatttttagtatagatggggtttcaccatgttggccaggatggtctcgatccgtgattcccaacacaccccccacaccagcctcccaaactgctgtgattacaggtgtgagccacggcgccctgccagtgctacacagtttaaaacaaccagatctcacttactatcatgagaatagcaacaaggggatggtgctagactattcttgagaaacccacacccatgataaaatcacctcccaccaggccccacctccaacgttggggattacaatttcacattagatttggtgggacgagccatgccagggatgccccaaaattactaaactaaagggaaaagtcaggctgggaactgctcagggcaaacttgcctcccattctattcaaagtcattcagctgctcactgagatatatgcatattctgatggccttctttggaaaggcttatcagaaactcaaaagaaggcaaccatttgtctctcacctacctgagacctggaagccccctccgtgcttcgagttgtccccgcctctctggacagaaccaatgtacttcttacatatattgattgatatctcatgtctccctaaaatgtataaaaccaagctgtgccctgaccaccttgggtacatgtcgtcaggacttcctgaggttgtgtcatggacacgtgtcctcaaccttgctaaaataaactttctaaattaattgagacctgtctcaaaatttgcgggttcacacatgttatttagaaatatggaagtaaacacaggaacaaaacttgaaagaattaaaaatgctttcctctggaaagtggatttaacttaaggaggaactgaacaggagaatgcgggttttggttacagaaaaaaagagattcaaataaaacagtagagaacacctgttctgtcctcccttgtgtttatcaagtgcttgccaggcactcaaagttcattgctgtcattattgtaagaattgaggacttgggcctccacgtggtattctattaatactggctctttttttttttttttttgagacggagtctcactctgttgcccagactggagtgcagtggcccgatctcggctcactgcgagctctgcctcctgggttcacgccgttttcccgcctcagcctcccgagtagctgggacaacaggcgcccgccaccgcgcctggctaatcttttgtatttttagtagagacggggtttcaccgtgttagcaaggatggtctcgatctcttgacctcgtgatccacccgcctcggcctcccaaagtgctgggattacaggtgtgagccaccgcgcccggccaatcctggctctcttaaactgaacatctccaggattttgcatctatcaggaagggatattgtgacctctgacaagttacagtcggcggtaggtatccatggagaattggttccaggaacctcctggataccaaaatccacagatgctcaaggcccttatattaaatggtgtagtatacagtatttgcacatcctcttctataattcacgtcatctccagattccttgtaatatcaagtactatgtaattgttacataagtagttgttacattggattatttagggaatgatgacaaggaaaaaaaagtccgtacatgttccgtacagatgcaagcattctttttttcctcaaatgtttctcatccgtggttagctgaatttggatgatgaatccgcaaatctggagggccgaacatgcttaacttccctgagtttatccattgctaaagcgagagaaattacaaacttagctaggaagggtgttgcggaaagtaattaatattatacttgcaaagtgcttggcacgttgttgtggttattatttcctgaaaacaaacaaacaccacttattggttggtgtgaaagagggcatctgtcaaagttgtcgtcctttggagccagaaaagtatttcttctgatgatgactgacctctcctcacctctccttcaaccttgcggcttctttggggctccctccccgtggacagcggtcaagattagcctgggccacagtgcactggtcctgtcctgggtgatgttccaagctcactcttttttaattttatttatttattaattttttttttagacagagtctcactctgtcgcccagggctggagtgcagtggtgcaatcactgctcgctgcagcctcgatcccctggggtcaagcctcctcacatctcacctcgcaggtagctgagactacagatgcgcaccaccaggaccagctaagttttgtatttttttgtagagaggaggtttctcacctgtatgttactcaggtttgtctcgaactcctatactcaagcgatccgcccgtctaggcctctcaaagtgctgggattacaggcatgagccgccgcgccccgccccacgctcagtcttgaaattgtctggaacgggaaacggcaaacagcgagatatccgagcgagagtcccgccctgcatcagtttgcggaaccgccttggtagaaggagagaaggggagtggaggaagcacgggactggagggaccaaagttccccgatggcggcccaggggtgcgcggcatcgcggctgctccagctgctgctgcagcttctgcttctactgttgctgctggcggcgggcggggcgcgcgcgcggtggcgcggggagggcaccagcgcacacttgcgggacatcttcctgggccgctgcgccgagtaccgcgcactgctgagtcccgagcagcggtgaggcagtcggccgggtggaaggggagccggaaagaggcaacggtggggagggcctggggaggggaaaactggcgctaaagttcggggtgagggggcaatgagagaggccttgaggggagaggtgagtgtggagacagcgatggtcctgaacgatgggggcgagtgaggagggggctgtgaagtgtgtctgcaggtgaggggtgcgctgtgcggggtctagagatgagtgtgtgtgtgtgcgcgcacacacacactgtagaggtgaggggtgtgtgcgtgtgttctagaggtgaggggggtgtgtgtgtgcgcgcgctctagaggtgggaggtgtgtgtgtgctctagaggtggatgtgtgtgtgtgtgctctagaggtgggggtgtgtgtgtgtgtgtgtgctctagaggtgaggggtgtgtgtgtgtgttctaaaggtgagatgtgtgtgtgtgttctagaggtaaggggtgtgtgtgttccagaggtgaggtgtctgtatgtgtgttctagaggtgaggggtgtgtgcatgtgtgttctagaggtgaagggggtgtgtgtgcgtgcgctctagaggtgaggggtgtgtgtattctagaggtgaggggtgtgtgtgttctagaagtgaggggtgtgtgtgttctggaggtgagatgtgtgtgtgtgtgttctagaggtgaggggtgcgtgcatgtgttctagaggtgtgtgtgtatctgtgttctagaggtgaggggtgtgtgtgtgtagtctagaggtgacaggtgtgtgtgtgtggtctataggtgagggatgtgtgtgtggtctagaggtgagggatgtgtgtgtggtctagaggtgaggggtgtgtgtgttctagaggtgagggggtgtatgtgtattc

SEQ ID NO: 10202 - DNA, 6000 bp, Homo sapiens
ttggggaggccgagatgggctggtcacttgaagccaggagtttgagaccagcctggccaacatggtgaaaccctgtttctactaaaaataatacaaaaaaagtaggcatggtggctcaagcctataattccagccaagattgcaccactacactccagcctgggcaacagggagatagtctgtctcaaaataaaataactttagggagacgacaacccgatttgaaggaagatgtgggacccacatagaacagatgtattcactcaattagtccctactgtacagcaggccccatttcagggcactggggctgtagctcttgaacgggcagtgagcttgcatgatgctctgattattaagaagctgtaatgttttttccaacccagccatccttcgttattctaattactccttacatatacttttgtatatctctgcttctctcttctcaccctcccaccacattaattctgagcactatatcttaatactctaggtatgattaccccaaagaatcaagttaacttaccacctcccacattctaggcactatacattcattcatataaccatgttttgctgggattatctgggggatgcagaaggggctttataattagcaatgccccttactttgacttgcccatcgaatccctcaaagcatacttatcattagtaaaaaaaaaaaattagaccatcgacagcatggtctttagagacagaactgggctgagtctacccctgaacagttgtgtgatttttaaagccatcacttcatcttccagcctcatgcgatcccactgattatgacatagtttcagtggtgccccttgctgcgaaggaggctgagaagggctgtcttgatttggggctgccatctgttaaactaacaaccaggaatctgtttgtaggaaagacaggatctgggggaataaataacaatctgtagccgtggtggctccatgccctcctgacaagattctttgtggtctttcaggccagcatatctttgtgaatttccacctcccggatcttgctgtgggcaccatcttgctcatactctccctgctggtcctctgtggttgcctgatcatgattgtcaagatcctgggctctgtgctcaaggggcaggtcgccactgtcatcaagaagaccatcaacactggtaggtacactgccctcacttgtaggcctcacatgtagtcactgcatggggtgtgggggtcctttagattcccatctagcaatggcctctgcatggagtttctctctcagattggatcagcaccagaagtgaggatgtcattcacctggaaatgttcttggcatcctgggtggggtctagggagcaggcccaagtttccattgcatcttggcaaggtcctgagcaggagttcatatctagagagctgtgagtcaggccttccttcttagcgggtttcctgtatgctcagagctttactggctctgtcaagaccccttagaaaaaggaccccaggtgtctgccctcgcccccacctcccttcactcttgtaaaggaaatgtgatgcataaatacatcagcatctagaggtggccaatgagactgctggctaagaggatttcctgccaagtagggtgtcctggccaatgagagctcgctaagccaatgacatcatcacttcatgaaagctcagtgaaatatagccaagaaaattcgccccccaccccagattgtcttggggaacagagcaactctgggtgcttctgggaaatgcagggcctgatccggtgctagttgggtggaggactcagttggcaggcatgttccaagctgctacagtttcttgatgctctttaaggcagaaatgaaggttgaaggtcaaatgtgggtgctgacaggagaccagggcaggcgaggaagcatgctctcagcactttctggaaggagagtggttacttgggtgggttcactctttctaacctgacctccagggaatctgtgtttttgttttcataacacttacctgtatccttggtttttccatctgaatatgcggagcaaaagacaatggggaatgaaactggattctaaaactctactctgtaatctgagaccatatatgggatgatgtacaacctcacccctaagcccagcccctaccccaggccaccaggccataccttccccggagaggccatgacatctcttccttctgtcttccagatttcccctttccctttgcatggttgactggctacctggccatcctcgtcggggcaggcatgaccttcatcgtacagagcagctctgtgttcacgtcggccttgacccccctgattggtgagttacaccctggcttctccctctggccaccactgccatttcctgtcatcccatggggctgatatgtttgtgttttgtgtttcccccaggaatcggcgtgataaccattgagagggcttatccactcacgctgggctccaacatcggcaccaccaccaccgccatcctggccgccttagccagccctggcaatgcattgaggagttcactccaggtcaggacttggggcacggggacaggggccctgggagtgggaccacccatggtcttgcaaactggtctctaacaagagccaggcttttctctgtactatccaaaatatggaactaatatgtggaggggaagccacgggtaaagttttcaggaccttgatatgagaacaatcaaaactatcagttctgagagaagcagtaagaccctcataactggtggttgtttcagcaaaagtggggtggccccttgatatagatgtggaaaaggtacttaggaagcacagacaccacctcccatctcctcactgcctcctatggggaactttacaattaggagaactccttggcatggaccatctatgttactttgtgcaagacctttgggatttgaatttatttatttatttttattttatttttttgagacagagtctcgcactgtagcccaggctggagtgcagtgatacaatctccactcactgcaacctccacctcccaggttcaagtgattttcctgcctcagcctcccgagcagctgggattacaggcacctgccaccacacctggctgattttttgtatttttagtagagacggggtttccctatgttggccaggctggtcttgaactctggacctcatgatgtgcttgccttggcctcccaaagtgctgggattacaggcgtgagccactgcacccagccggggatttgaattcttatctcaccatttacatactaagtgacctttggcaagtgatctaacctgagcgtcaattccctcatctgaaagatggaggacataacccctatctcattaggattattataaagatctgatgaggcaaagccatctgtgcaacagaaatagaaattcaggcatctaatataaattaaccgcatatgtcatcctaaaattttttagtagatacatttttaaaagtagaaacaggctgattcattcttcaataatgtatttgatctaaaccattatcactttaatatgtcatctgtcaaaaattgagagtctttgaaatctggtgtgtatttcatacttaaagcacatctcagtgtggacatgcggctagtgtattggacagtgctggtccacagcctgggcatggaaattggcaccttgggaaagtgaccaagcgcctggcctctggagccaggctcccaggatgtgaatttccacctcttccatctcccacctgtgggacttgaggagcctccattttctcatgtcaagaaataatggttgccactctgtagagtgttttttgagaattgagataatgcacagttgagtgctcctggccctcccagacacatagtaggtcctcatggaatccaggtaccctctgggctgagccataaggacaaagaaggcctggaaggcccgagactgtgctgcctgtgatgcctgctagcttacctccccctcctcctccctactgccacccgcattgggcaacaggcccctcacctgtccaacctcttgtgttgcagatcgccctgtgccactttttcttcaacatctccggcatcttgctgtggtacccgatcccgttcactcgcctgcccatccgcatggccaaggggctgggcaacatctctgccaagtatcgctggttcgccgtcttctacctgatcatcttcttcttcctgatcccgctgacggtgtttggcctctcgctggccggctggcgggtgctggttggtgtcggggttcccgtcgtcttcatcatcatcctggtactgtgcctccgactcctgcagtctcgctgcccacgcgtcctgccgaagaaactccagaactggaacttcctgccgctgtggatgcgctcgctgaagccctgggatgccgtcgtctccaagttcaccggctgcttccagatgcgctgctgctgctgctgccgcgtgtgctgccgcgcgtgctgcttgctgtgtgactgccccaagtgctgccgctgcagcaagtgctgcgaggacttggaggaggcgcaggaggggcaggatgtccctgtcaaggctcctgagacctttgataacataaccattagcagagaggctcagggtgaggtccctgcctcggactcaaagaccgaatgcacggccttgtaggggacgccccagattgtcagggatggggggatggtccttgagttttgcatgctctcctccctcccacttctgcaccctttcaccacctcgaggagatttgctccccattagcgaatgaaattgatgcagtcctacctaactcgattccctttggcttggtggtaggcctgcagggcacttttattccaacccctggtcactcagtaatcttttactccaggaaggcacaggatggtacctaaagagaattagagaatgaacctggcgggacggatgtctaatcctgcgcctagctgggttggtcagtagaacctattttcagactcaaaaaccatcttcagaaagaaaaggcccagggaaggaatgtatgagaggctctcccagatgaggaagtgtactctctatgactatcaagctcaggcctctccctttttttaaaccaaagtctggcaaccaagagcagcagctccatggcctccttgccccagatcagcctgggtcaggggacatagtgtcattgtttggaaactgcagaccacaaggtgtgggtctatcccacttcctagtgctccccacattccccatcagggcttcctcacgtggacaggtgtgctagtccaggcagttcacttgcagtttccttgtcctcatgcttcggggatgggagccacgcctgaactagagttcaggctggatacatgtgctcacctgctgctcttgtcttcctaagagacagagagtggggcagatggaggagaagaaagtgaggaatgagtagcatagcattctgccaaaagggccccagattcttaatttagcaaactaagaagcccaattcaaaagcattgtggctaaagtctaacgctcctctcttggtcagataacaaaagccctccctgttggatcttttgaaataaaacgtgcaagttatccaggctcgtagcctgcatgctgccaccttgaatcccagggagtatctgcacctggaatagctctccacccctctctgcctccttactttctgtgcaagatgacttcctgggttaacttccttctttccatccacccacccactggaatctctttccaaacatttttccattttcccacagatgggctttgattagctgtcctctctccatgcctgcaaagctccagatttttggggaaagctgtacccaactggactgcccagtgaactgggatcattaagtacagtcgagcacacgtgtgtgcatgggtcaaaggggtgtgttccttctcatcctagatgccttctctgtgccttccacagcctcctgcctgattacaccactgcccccgccccaccctcagccatc

SEQ ID NO: 10203 - DNA, 6000 bp, Homo sapiens
aaagttctcaatgactgccctataagtatcagcatctgtcgttagaaaattcattgctgctgaaatagtcaaatttcttatatttctcattctagaaacatcccacattatgtatttcctaattacaatcaatcaaatttgtttgaataaagttttctaccgcctgttattcagaatgaacataagaagtggcctagctaggtcgacacagccaggtgctaaaacttctaaagctaatacataattttcaaccattcttgttataagcaaggtcatttgtttgggaattaaatttgtccaagcaattataatgaaatttctcccccaaatccttaacatgttatctagcttagaggtcattatccacagcagtatttgatatatcctgccacgatagtaaaaatatgcaaatctcccaagttcgtactgcaaagggcattggtaggtctaattttaccatcaatagtgaaaggagatagcttcagatgaccctaaataataggatgtactgcttttaacctatcaagggtctttttcccagaagtaatccagattttataaaatactgtgtgcccccaacttacatttttgtaaatgtatgaaaattaatgtaaagttgaaaaaattcataaactaatgatcttgtaagtaaaagacaaatgccagttatagtcactgactggatctttttatgtgtgtcatgacttgtaaatctctgctatattgcacatattttggcatgtaaacctttagaaaatgaataaaaaatcaactgtcaatatgtgctaaacttaaggtaaaaatcatttattctgtgttattttaaaacctaaaacactctattgaaatctgaaaaccagacagcgtgtgagctaataaacacttaaaattttatttttcaaagcttcttctttttttttttttttttgtaaatgagattttcatatcggccttgtggaaatgtttatagttatccagtagatagtatgaatcaacttagtttagtttctgtgtgcttcttttatagatacactgtaaaatatagctttgcatatgatttcttgatttaaacagcacaacttattctatgtcttggctagaaaccaattaaataaccactgatgcaagcagttattacctgcttaaaaggaaatctgtggtttccttatttaaactgatgagttttaatgtctatcaaaaaggctgttattgcaatgaataatttagtcatttcagtctactaaacatgttaatactacaagcatggatttaaggctgtaaaatatatctaaagtttctcagagtctcaaggatcagaatcatacttggaatagttatgcacagatatgtttactctttcaagtaatatatgtttaaaggacaatcgtttgtagtaattatttagaaaaggaagactgaagtatcaaatttagcgaaaggggttagagaaatggttgatcataaaggcctagaaaacacgtctacagatagaagaccctttttaaaaagatgaaaggtcaatggatttagagatatccgagtgtcatttcctctgtttgtcccttggtggagttcttgagttactttctccttttctgtcaaactgtttttatctttccagaactggctatcgtgtttactgtatttaacctttttctcatattattgtgaatacagcgtctattataaatgaaaggccccctgagatcacatctccagcatctactttgtattcttaaccataaacttttgttgtagttacttctcttactgtcttttcttgaggcttgaactacatcagggaccctgaatgctatttttcagttcagccactgaaatttcttaacggcaaaacaggtttaagcaagcgaggttagtaggtaaattaaaaaaaaaaaatctactgaatattttaagtttagggtaagatttctggcacagaaaatgaatcgtttgtcaaggttttattaaatgcatattagcacgggatgatatttatattttaatcaatttcattttttacatcttgatttcaaaggggtatttccttttattgttcttttttaaaaagccactaaagaaaaaacagaaatctccatttcaacattccctcaaacattttgcttcctacatgcgatgacgtctaatcactctgatcgatgcaagctttagggcactgatctcattttctctctccagttctggccgccaaagcagcagcagcagcagcagcagcagcagcagcagcaggctctttaatttattgcaggcggttacactttcgatcccatttccttctgaaccctttcctctcaggttgagtagataaatgcagcctcgggtctgagaagccgggggggggggggggggggggttggtgggtgggagcgaagccggatatcacattccctcggtgaggtctggtaccgggggggattaagtctcccggttccatttaatgaaattgctgagcacttgtgacactggctctaagactgcggaaatggggcgggggtgggagaaactgcttctctcttcattcatcctctgcgccggcgagaggagagagtgtcagcccctagagagggggcggaagaggactgggagctccagccgccgcaagggcgccccgagggctcctctcacctcccccgtacccctaccccgcccatttcctttgcttgcccagaacggcgctgcagggcaaagccgccgccacttctttgctgctctggcagaaaggtcggagcctgggactgatgggggtgggagcaaagccagcaggcttcttggcccccgcagtctgtcctcgctgttctccatgcagcacacgtcggacccatttcccacgctggcttggctccgccgcgaagttggtaggaatgagagtgaggagggcgggctggagacttcctcccgctcgcaaagaggaaaccactccactgtgaaggacgcgctgcaactccctagtcatccgggaagaaatgtgcagcgcgctgaggaaaagccgcccactccttcgcgccccgctcaagtgtgcgcctggagagtgcgcgccagagccgcgagcaaatgctttgaagatgcggagaggcttattcaagtttatggtctggagagggaagagggagtgcacaacgtttctgcccaagcggctgcctgaagtttgcaaaatcttagtaaggcgatgaggggagtgagtgcactgcaccatattgccgcgcatcggaatgcacggcgcaaggccgcggagtggagacggcttctcccatttgcctccaacctgggaaaaaggggaaccagggtcggaggtttggagagaggcaggcgttccgataaacccgggttcttgccaaatgtaagagggatttggctttactgccacttagccggccgcgaaggcgctgcggagcccacccccgcccccggctcgagactgcggcggtgcgcactgagcctgcgcgcggggcttttctcgctgatgctgcagatacagagctgagaggttcgggtgccagcagcgggagggttagcgggaaggccgggttccctgccctggcctcggaggaggagccaccacccctggggtgatgctactttcacagactggaaaatactcgccagctccctgacacacacttagacacacttccatccaacgggcatctacgatcccctgtagggagagcttggaaatctctgccgcctctccctcctcattcctgttcctgcgcccgcccaaacaaccgcgcgctacatctgctcgttgactttattggtgtttgtcttgtttaaatcattctgcctcgtcacccaggtctcgtaaagaatacccacactggacagattttattttttcggctttaaatttttctttgaggggaggcccttaaatgtgtatggatacgtcaggcgagctgaagactaagcaaatcccagcagcggccctttctctctttcgagatggtaaaaattctccccaaatacctacagtccgtctcagtcgtcttaatcctagccgggcctcttcgtttacagccactgaaataaatgagtaaatggctcagttcaaaaacacaaccagacctgagatctgatgaggccggctgcggtggtcgtgaatgaaaattggagaagccttgcttcaggaaatagggacagtcaagggacacaaagtcaaaaggagagatgggaaagctggggacactttggtacacaaagttgccattaaagtttatttcccttttatccagataggtgacgctacactttgccagttactaaaggctgcaggtttctgctcagaaaataatatcgaggtttccaacatgtgtttattccccaggcgcgcacacacggtctacccccgcaagcaagcacgacgacaggaatgtcaagcatttaaacaaagacagacatccttcaccctccacccaccgccgcccctgccccccgcaaccatccaaagtctgagctcccaaaaaaggatctttctccagctctctggagtttgatgttctctcttcactactgcagcccgtcatggtttttcagaacagagtggctttctgggcgctcgtaggttccccaggaccccgataaccatgtcctaaccaagatcctaaatcgcgaaccggagacactttccggggggaggaggacgtcgtctgagagggagggagaaggagaaacctatcctgacaccagctccgaaagctctcacgcgtgaactgggcattagtcaagggaggaggaaatttaccagcccgagggagggaaaacaagtcccccagagaagacggcggtactcgctagggagggggactgggctttggcttaaagaggactggctgggattgggcacactttgagcggcccctggagctgaggctgggctttcccgagcgcggcggctggctgacgctccctcccgcctccttatcccgggccctcctccctcgctctctcctagtgtgtagtttcggcggctcggctgctactgccgccgccgctgcagcagcagcgtcagggacaagcctgatccgtgagcgagcgagcacccagcagcaaccaccactttgggcaacttgcgggtttcctgctcgcgggtagcgaacgggagattcccactagcggttcagtgtctccgagccgctgcagcccgaggggcggcgggagcgcccgcaccagactctcccagacgcgaaaagggacgagacaactgcggaattcaccagccgtgccagggcacttccgaggccacaaccgactgacactttttctccccttggcaaactggatttttttttttaagctacttggcagctgtctctgactccacctccccctccacccccgcccgaaagcctttggcttttcttcggaaatccagacagaattgggcatctttgttaattgccgttggggacgcccggccgtgcgctttcgccggctaacgtcgcctgtgctccgagcctggtttgctcacctttgaactgcaaagggatcaagttcagcttgagttccctgcattgggaaggagagagagcgtgcaagagagcgagtgggagagggggaaaggggaaaggagaggagggaggagagagaggagggaggagagagaaagggagggagggaggggagggatcgagagagagcggggagagagaggctgcaatctcctccctgaatcgcgcacagcgctgcagatcccactgctccgacatgcgggccgaatgcaggtgagaaaaggcacggactctgcggctgcgaacccaaacttgggcaccgcacggtgcgcactgctcagccttcgcccccgtgggcgaaaggctgctgcggtttcaggcggctgcttcgtgactaatgaccttgcgcagagttgttaagaaaaaagagaaacccgcgctctccggggtgagaagggactgactctgggcgtctctgaagatggctcgggcttctctttggcgcgccggggggaccctgacactgaccgct

SEQ ID NO: 10204 - DNA, 6000 bp, Homo sapiens
cgcgctcccctcccccgctgtcgctgggaagccccactctgcccaggtctggttcctggagcatcagcgccccctttccctcgccggcaggatcgtttcctcccgacactggcctctcgccttgggcgcagggtttggggctcagctgtcaattccaaggaattcgtagggttcgacccacgcggcgggagggaacggagggagaatcaaaaggcatcctcccccacgacgcggaggcggtggtacgattcctcaaacgcccaagcttgagctttttttgtatgcgagatagaagccagggcaacctcgcccagataaccccgaaaacaaaggcacgaccagataagtgacttcaagggagtaaaggtcgttctatcggagaacgttccaaacctacacagaccctcttttctttgtaccgtatttcagaccacccagtcttgtacacacacacacaccacacaaaacaaaaacccatcattgtcatattggactcaacagtttgcccaatcctattaaataactagcaactatatagcccttcccctaaaagacccctagttcaaaacggcgcaaccgcttggagatttctcccgagggccctatttctcgttgggccgagtttgtagaagggacatttcttgattctagatttatattctctctgggtattaaatgcaattttgtatgttccttttcttcttttcaaagagaatacaaaactatagcagtctaagaaaataaccccaaaatggggaggcaaactcattctggaaatgatgggctgtttgtagtttcacaaaacctctttcccggcagagcaccaacacctcccccttccaccaccccccatcccatctggtctgcttctccccgccccccagttgttgtcgaagtctgggggttgggactggaccccctgattgcgtaagagcaaaaagcgaaggcgcaatctggacactgggagattcggagcgcagggagtttgagagaaacttttattttgaagagaccaaggttgagggggggcttatttcctgacagctatttacttagagcaaatgattagttttagaaggatggactataacattgaatcaattacaaaacgcggtttttgagcccattactgttggagctacagggagagaaacagaggaggagactgcaagagatcattggaggccgtgggcacgctctttactccatgtgtgggacattcattgcggaataacatcggaggagaaggtaagggaaaagaaaaaatgattttttgtttataagggaagtccctgatcagactctgggactggagaaagcgaagtaacttcaaactttgggcgacaagaaaaaaaaaaaggagctggattccagttgtgtgtccagagagtaatttttttttttcggaataaacttcacttggggacgggtgggagataaccatagagttagaaagtctaggtattttttttaaacacacattttccagacctatttttaaaaacaatgtttttctaacaaccctatggcctcccaaagaaattgtttaggcttacatttttgaggtttcttttgggagtgggggtggtgttcgtgaatactgggccgaacaccaaggaactgggggtggaggcagaggtgtttgccctcttcttggcagtgggtcctggaaggcgacaggttttaaatgagtgttttcattcctcgcctgcggtttggcgggacagcgctgcagcccatggtgtggagcgcggctgggggaccagggggaggtggggagaggggagcgtggaggggagcgtggaggggggcgcgcgaaggggttgcggggcgcaggaggcgggctgggctcggctggagaccggacctcggtgttggcctacagcacagggagccggccgaatgcgcgtgattactggacggcgctgctctgggagagagtcggggccagatttggcgcggcggtgaggcggctgcgggacaagcagaggcgcgcgggcgtgggcaagggtttggggcgctctggagcggtttgttgggtcagtgaggtgccagggagagcgggtgcctgccgggcagtgtgctcgggttgcacgccctagcgcgggggcgacagcggcggcgcgggcgggcggtctggaataatgacaaacacatttggccctgagtgaagaagtcgtcgtcgcctcgcattccagcaactgggatttgaggaatttcgaaccgcacaccaaggggccctcattgtgctccgtggcccccgcccccgcctgtcttcccgcgccccctcctcggtggaatcatttctgcattgcccgggggctctgctttcgctcagttctggccgcaggcaggaagagaggaaaggtctccaggaaggtgccgaacttcttgtgaggaagttagggacgacttggaactggggaaacttgtttgcaggtaagacagaaaggtgggaggtaaaccatattctccctccgggcacccgagccctggacaccccctacccggcacccttctccgcgcgggggtgcgtggcacttgccgtctgagctcgcccagcgctgctcggtcctctctagttggccttttttccattcctctccctgccggcttcagagccgtctgtgcgtacttctccttcctctgctgtctacccccatggaaaccagatttacacacgaaattaactccgcccggctgcgcccagggagcgggcggcgtccatttggcattgaatatgtgggatcagctgttctattccgggagggtgtcggccaggtcggagcgacgagtgtggcccaacccgagtacgttgccagagggagccaggagcctgggccgggccaggtgtgcgagagctgccgatggcctggcctcgcgtcttggtcgggaaggacttgctggcctggcaggctgtgcgttgtgcatccctcccgcagccagagcgccggtcccgcacttcgctccccgaattgtgctaagacctcaggatgtgcgcaaggagtgcctggaagaacttgccactcactccatcttcctgggtgggaggcaagcatggatggggcccatatcaggtccctaccgccccgcgtccgaaaagccgcgggctgggcggtgtgggaaatggctttttggctccgaggccaaattgctcaatgttttggaccgactcgcctcgccgcggtcgctcctgacaagaactagacagatttttggagcagggagcatccagggcaaacgcacgacagtcctccgcagtgcatctcaccggacaaacatccccggagccacaggaggggaggaaggggctctccgggcgtgcgcacctccccagccgccgcgctgtcccatccccgacccctaatctggtcaacctggaccccggcactgctgaattgcatcccctcttctccctttctcctcggcctcctcctttccacaaccctcaagatgaggaggccctgcctcgactccccgacaggcgcaaggccgaccaggctcgctttgacgccctggtcaggccctgcttcggagcttgcagttttgggttgacccaagtgcagctggacctcgttcacaagagtgaggggaagccaagaatgaacccgtcgttagcccccggtgccctggctcttgtttaaatccttagatcgagaaggacttgaaggagatcccaggctcccagctctgcgcccctgggccagtttcctctcgggacgcggactgaggagggatgcagggggaggggcattgggccgggctttccagctgcaaacacgtctggcgccgaggcgggcccattttgtgcctcctggggacggaccgtgggcggcgcgcagcggcgggacgcgttttggggacgtggtggccagcgccttcctgcagaccccacagggaagtactccctttgacctccggggagctgcgaccaggttatacgttgctggtggaaaagtgacaattctaggaaaagagctaaaagccggatcggtgaccgaaaggtgtgggtctcagggttccccgggtctaactcgccgggtccaaccgcagcatcagccttggggcggcagataatctttcggtctcgcctggggcgcaagatgcaggatcgggggcaaatggcttctcccaacttccccctaattcgggttctgccagatggttgtcgtttgctgaagtggctcggcggcatttccttttgttttaaactgatcaatgagcgaacctgggatgggctgaaaaagtagattgtaggagggaataatgggaaacccgacttggggcgcctccttccctgcctcctactgcagtttctcggcccccgcgaaaggggagcgacaagcgcgggtgggcgcggactcttgagggggcagaggcggctatggcgcgtgtcgggcaaggtggcaccagaaggcacttttgtgtgtgtgtgtgacaagagtctcgctctgtcgcccaggctgaagtgcagtggtgcgatctcggctcactgcaacctctgcctcccaggttcaagcgattctcctgcctcagcctcccgagtaactgggattacaggtgcccgccaccacgccaggctaatttttgtatttttagtagagacggggtttcaccatattggccatgctggtctcgaactcctgacctcaggtgatccgcccacctcggcctcccaaagtgctgggatttacaggcgtaagccaccgcgcccggccaggaacggttcttaaatgccgagagggcgcatgctagctctcctcagcattcccggtgagccgctacccacggccgtgcggctctcgtgcccataggaggcgctggcgagctcctgtaaccctaaacccctcggcccctttccccccacccgcccggattctcttcccgctctcccccctctctccacacccgcccggccccctctcgggtctcagttgaaaacaatgcaaacgcagagcgtcgtgcctggggcgcagcggcctctgcagctctgaggttcagagcgcggcgcgcaggggcgcaggggcgcaggtccccggagcggctgggcatcgccgccaaccccgggacaaccaagccgccgaggacttggtggaggtgggagggagagcggaccgcgcagtgttcctctgggtcccggggtcagaagccggacagtggcgggggctggacagtccgagcgcagagcctcccgggcgaagtctgcgcgcagcactcccggctgcgctgtcggggaccaggagcctgggctgcgggcgagctagctggcgagccgggtaagattcgcggggctgtcgcgccctctagtgggctccggggacgcatcccgctttccccagccccgggcggtcggcgccgctatctcagtggagcgcagcgctggaaccccgggggcccggagcggaggctaatctgggtcacctttcccctcctccgggcagccagtggactcctcgcaggctctgtgtgggcccgggaggcgccgggtggacgagagggggccgaggtctctgggtttggattgagaatgggacgtccttgtaattcaatgtgggagaagcaggggagtgtggaggaggacgggtcccgtgcgttcttggggggcaggcgccgtcttctgcgttccagcccctcgccagctcccttgccccgcgggcggcctgttgctgtttgtttgttttacgaccctgcgttattgtgcaacggtaacagtcgtttccaatcagctgcgcggccgtcgcggccctcgccaggctggtttatgggggcggcggtggcgcgcggacagataggacagcgcggcccgggaacggcgtcgaggtccaggcggtccccctgccccgagggggcggaaatgctgaggtggcgagagcgtgggttgcacagaaccctagtagcgagtccggctgagcctctgcggcctagcccagcagcgtcgtcttcccggctccgaagacgtcttcccgaagccccgctgccccggcgcaccagctcccggtg

SEQ ID NO: 10205 - DNA, 6000 bp, Homo sapiens
gggaaggtctgagcagcatagaataacgttggacttgtcattaactccttcatgcgaagagcttactgcttttttgaagctttgtcacatttacagcgtaatgacagccaagacactggtttgtctttttcattaggccactttaccttctttttttttgagacagagtttcactcattgcccattgtgcaatgggcgcagtctcagctcactgcaacctccgcctcccaggttgaagcaattctcccgtctcagcctcccaagtaactgggattataggcttccgccaccatgccactttaccttctaagatatttttagacttcagcgtaggacgatctgtgttaacagctgtattaaacttgtcttagctggaaccaactctctataccctgctgaggtttgtgggtcttactctgtccttcagagtgttaatgaaatttttcttagcttcccgtcgttcaaatgttttttaaacatacctgggtctttcatgcaagttactaatacaaatttgaatgagatgtagctaagaactaaatctgaaatcacaaatgcctaacaaataaggtaattttggccaagcgtggtggctcacgcctgtaatctcagcactttgggaggctgaggtgggtggatcacttgaggtcaggagtttgagaccagcctggccaacatgatgagaaaccctgtcttgactaaaaatacaaaaattagctgggcttggtggtgcatacctataatcccagctacttgtgaggctgaggcaggagaatcgcttgaacctgggaggtggaggttgcagtgagccaagatcacaccactgcactccagcctgagtgacagagtgagattttgtctcaaaaaaaaaaaaaaaaagggaattttaatgcatggatatagcaggtctgtactctgttcttaaaattgttttggagaattatatgtaaatctgcattatacatgtttagtatcctcaatctaaaatccacagtgctccaaaatctgaaacttgagcactgacatacatgaaatgctcaatggaacattttggatttctggattaggggtactcagctatgatataaatattccaaaatctaaaaaaatccaaaattccaactacttctggtcccatacatttcaggtaagggatactcaaattgtagcaaccatcgtcagaggttaccgtcgttactgatggctttcagagtgattagacagtaaataagtgtaatgaccatgacaagaaaattttcaaaaaaactaaatcttatttacgtgcaaaataaaataattttgaataatgattttaagaagtaactgattttttttttccagaaaatatttacaccagcagctccagttcataccaataaagaagatcctgctacccaaactaatttgggatttatccatgcatttgtcgctgccatatcagttattattgtatctgaattgggtgataagacattttttatagcagccatcatggcaatgcgctataaccgcctgaccgtgctggctggtgcaatgcttgccttgggactaatgacatgcttgtcaggtgagtgtgcttttccctctcatgagttcgctgaattaaagggaaagcgtgttgtgtgacatggagtcactgagtcattaacctagtcttatgggaatttggcttacaccttatttgtggtcttccaaccttttccttgtgtatcctttccttgtgtatcctctaaaataattttgtaccccctctcgcatagttgtctgaaatttttcatcttcaatttaaggaattgcaaagatctaatttctgttatattgtgtaaagtaagacagttagggctgggcacagtcactcacgcctgtaatcccagcactttgggaggccgaagtggacagatcacgaggtcaggagttccgagatcagcctgaccaatgtggtgaaaccgcatctctactgaaaatacaaaaattagctgggcatggtaatgtgcacctgtaatcccagcaactcaggaggctgaggcaggagaatcgcttgaacccaggaggcagaggttgcagtgagctgagatcgcgccactacactccagcctgggtgatagagtgagactccatctcaaaaaaaaaaaaaaaaaaaaaaaagggagactgttagggtgtttttaaaatctacccagtgactctaaataccattagtaatttgatacccactatcaccatcattcctttaaaacaaatgtgaatatacttttttaacagttggaaatttacatttttttcttcctataatttatattttcatttacttcccttaattttactctaatgattataaatttttgcttcaaaatttattacaaagctggtccaagtgcaatggtgtatacaactaatcgatgacaaaccagttacagatttctttcttccttgtccacccccactgcttcactttatgagcctaaagaaatatatatatggatcaccccatcatatctacctgcaataaaaatatgcatttaatatcattgaattttcaaagatattgtaaatttctcctagtaaatctcttaagtgttaactctatgaattgagttgttatagttattagtactcaaagaaaatatattataaatttaaataatcattttaaaaaattggaaatacatctcttaatgagatgatagggctattttttatttatttatttatttatttttttttagagactgagtcttgctctatcactcaggctggagtgcagtggcatgatcatagctcactgagacctggaactcctgggctcaagtgatccttccacctcagcctcctgagtagctgggaccataggctcatgccaccatgcccagctaaattttttgttttttgtagagacagggtctggttgtgttgcccaggctgatcttgaactcctgggctcaagctatctttccaccttagcctcccagtgtactgatattataggtatgtgtgcctgcccatccttttaccttgtatttattttttaaatttttatttatttatctttttatttattttgagacagactcttgctctgtcacccaggccggagtgcagtggcatgatcccgactcacttaaacctccatctcccaggctcaggcgattttcctgcctcagcctcccaagtagctgagactacaggcacatgccatcacgcctggatacttattgtatgttttggtagagatagagttttaccatgttggccaggctggtctcaaactcctgacctcaaatgatcgcccgccttggcctcccaaagtgctgcgattacaggcgtgagctaccacgcctggcccctggcccatcattttacaatttttaaacattttatagaaataattttaagtttacaaagcagcaaaaataaaatagtatgaagaacacttatataacttttgcctagattcacctgttgttaacattttatcccatttgttttagcatttgtactcttatctaaataaaattgtaaatgtgtatatatacacgttgtttacatacctgtctatagtgtgtacatatacatacattatttataagctatataatgcacacatataatcacaacatttaatatatattatgtattgatacagtacttgaatctgtcatccatattttaattttggatgacctaatgtcctttcttgttttttgaaaggacataggctgggcgcggtggctcacgcctgtgatcccagcactttgggaggctgaggcaggcggatcacgaggtcaggagatcgaggccatcctggctaacacggtgaaaccccgtctctactaaaaaaatccaaaaaactagccaggcttggtggcgggcatctgtagtcctagctacttgggagactgaggcaggagaatggcgtcaacccgggaggcagagcttgtagtgagccgagattgtgccactgcactccagcctgggcgacagagtgagactccgtctcaaaaaaaaaaaaaaggacatgaaatttttaaatatttcacttgtgttatcagttttatgtaatttaagtgggtttaacagtctttatattattttgcctcaactgttaaatcatatgtgtttatttctacatcttctcttttatagctttatttagttttatagatttaaccactttttttttatactttatgttctgggatacatgtgcagaacgtgcaggtttgttacacaggtatacatgtgccatggtgatttgttgcactcatcaacccgtcatctaggttttaagccctgcatgcactaggtattggtcctaatgctctccctccccttgcccctgacccctcaataatgtcctttatatcagtgtttttcccttcggtctaggtcagatattgcatttagttatttattatctttttagtcttttaatctgaaatatatccatagcctttttttaaaatgttttctgacatcaacctttttgggagaattacagtgtatccctcctccctccaccccaggaatgggctgttccccattttttgtttgtctgatgtttcctgatggttagattgaggtaggcattcctgactagaaaactgcataggtgatactttgtctctccaagaatgtctcatctggaagcacatggtgtccatttattcctcattggtgacattaattttggtgacccagtcaatatttcttttctgtgttgtcttcccttgcaactactatctaatctgtagggatatacttaaagacagtacaaataccctcttcctcatcaaaatttctccaaagattttgcatcaattgatgattcttgcataattagatctttcattgatgcttgcaaaatgatgcttttaattctaatacttcttgcatattcaccagtgagccttggtattctactgccagcaagagctctccttcctttcccatttgtttgtctttttactagcagtacaaacttatggattccttttttcaatggtttataattaattatttaactattttgctgcttaaattatccgatgttaggccagtgagagcctctccaaactgtgtcctgtgtctttgtggcatgctcccatttgattttgctcctcactttctagtacaacaagatattacaggttcatcatgcacctgctctgcccagtcctggaactggccatttctcggcggagctttgaggagctttttaggggagaatggtattagaacccaagatctaggtgcaaggttactgagctccttgttactgagatgtctttgcctcttgtctttttcagtggacagagctagaaaatatatgcttgtatcctgtgtgtacacatacatatatacaaatatacatccatacatatatacacacacaataatttaaatacagatgtgcacacaaacataggtttgctgcatttctaaccatgattttaagatcttttcagttttgtaatgtagggaattatttacatacaggttatacatttacaggcagatttgtaagtgttgcacccgttttataaaaagagctggtgaattaaagagtaattgtatttttctttctttctttttttttttctgagatgggatctcactctgttgcccaagctgggatgcagtggcatgatcgcagctcactgcagctttgacctcctgggctcaagtgatcctcctatctcagcccctcaagtaggctgggaccaaggcgtgtgtcaccccgtcaggctaatttttgtattttttttgtagagacaggatttcgccatgttgaccagtggtctcaagctcctgggctcaagtaatccgcccgactcggtctcccaaagtgctgggattacaggcatgagccaccgtgcctggccagagtaattgtatttattatatgtatggtcgtgtcctctgttccttacatagttgtttttgtttgtttatgagacagggtgtcactatgtttcccaggctggttttgaacttctaggc

SEQ ID NO: 10206 - DNA, 6000 bp, Homo sapiens
cacctgaagccagcatagctctggatctcactcaaggtccatggcaagtacttcctgggtacccttgatgtttattcaaagcccaaggtctcttagtcagcaggtgatgaatcttgccaagactgggtccttactttcaaagcaggaggttccctttagcccagggtatgtctaaaaatgtcacctgggagctagggcctggaattggggccttaagactctgcctagtatcttaacctactgtggctaagctggtatccaagttggaagacaaagtcctctttactcttccctctactctcctcaagcagaaggaaggagtttctcccagagctgcactgcttggagttgggggagaggtggtgcaagcactttcttggcttcccaagctggtgtctcgctaagtcatatgcaccccaagtctcttggctctgagcccagtacagcaccagtagaaacttccaggagttgcaaactagtttatgacacacgattttggaattttaatcccccaaaattgatatactggttgctcaggtgcctatatgtaataaataagacaacctatgaaaggggttaggcatggtacctagagaggaagacctggaggtagtgttacatccttcttccattccattttgcagaagtcaccactgagttgctgtctaatgagtagtgattcatgttttgctaaattgagaatgccagactacagagtaatgctctgtggaggagagccgagcagggatatgtagtatctatgctgttttttaggcaggagaccaatttatttttttctgttagaggtggggacaaacctacatcacatctttagaaatggacaaaaggttgattatctgactctagacttctcccttctagaagctaattctatggagtacgtatggacacaaagaagggaacagacacaggggcctacgtgaagtggagggagggaggaaggtgaggatcaaaaaactacctattgggtactattcttattacctaggtggcagataatctgtacaccaaacccctgtgacacacaatttacctatatagcaaacctgcacatgtacgcctatatctaaaataaaagttaaaaaaaattaaagctagttctgatttagggatctttgatgttgaatgttgatgaaaagtgatttatatttgtgattgctagtttcagaaccactacgatgaaaaaagtgactaaacttttggtaatgtgaacacactactccttagaagtattgtccagactccaaattctgcctgtcatttcttcattttcatgccctcctgattgcctaaaatagttagacttcccatttcatgattggaaaggcattgcaaatatttttacattaaagtcctggaactgtagattattttctaccagggatattaagaaatttcaggccaggtgcagtggctcatgcctgtaatcccagcactttggagggccgaggagcggggatcacaaggttgggagatcgagaccatcctgactaacacggtgaaaccccgtctctactaaaaatacaaaaaattagccgggcattgtggtgggtgcctgtagtcccagctactcaggaggctgaggcaggagaatggtgtgaacccgggaggcggagcttgcagtgagctgagttagcgccactgcactccagcctgggcaatagtgtgagactctgtctcaaaaaaaaaaaaaatttctaatcacaaagtaaaacatattcattgtaccttgtatcagtatgtactcaattaccttattttaatgttctgcatacatttatatttagcagatttttttctggtattggtttatgtgctaatttacttatttatttaaagaataaattacttagttaatatttattttccctacatacatgtaaactctgtaagatcagagatctttttgtcagaggctgaagataaagcctgttaagccaattaagagcatagacagtgctcagtaaacatttgctgaatggaatacatgagtgaattgtaaacactttggaatttatagaaaagtgaacataagaaaacagaagccctagaaataaaccatataacactgaaagtgtacctgtgtatttaaatatgcctgtatatgtagaagtccttgctttgtaccgtagtgcatgactgtaaaaaaaagactttgcaaactgaaattatgcaaaacaatcctaataatcaatgaaaacagttactattgctctttgacctttaaaaatttttaaatcactacagtctctcttgttgttagctataaaggtatagggaaatggaaaaaggtaaaactaatatttattcagtacacagtaatttaaaacattagaaatattgatattaaaattgtttcattgtacagtcttatcaggagtagtttgaatagtgcttgccttcttcctgttgtacaacttatgatacagagcatgcattttttttcaatgcctagacaaactgtcatgctctctaaatgtggatcagcttacattttatcctgtgtgctttccatgtcaagaaatgtctcctaaaactccttgaatgtgaagtttttagccagtatcactttctctaggacatcatcatccttttcattacaatcactttccttgtttatgttgattaattcaccttcactaagttcctctaactgcatatacagagtctttcaatggtgaatggcagcatcgtttacattccatgattagctacgtcgtctccatttacgtttgatacaaattttacttccaatagtattaatttttgtttgtgtacattgccttcattcttgttgtccagttctgtctttgattatccatgtcacttgcatttatctttgggagacaagaaggcaacacagctacacactttgctgtctgtgtgtgaactgaacaacaaacacgcagtgatcaatcactgacatattttaaagaaacaccccatgattggtcaatgatcattatgcacacatgttagttacgtagtgatttatggactgaagagctagctgcaaagtttgtactttatgaaattactattaatataccatgttaactgaaatttgaactgtattgttagggactatgttatttaatctaaattgtggtgactgaaatgtacacatatcagactgagcaccgtgagggctgcctcaattcctagctttattttatagaaatatatatttcttgtttctttactaaaatgggatcatttaatgtgtattatttttatttttaattttatatggtatacatgtcaaaaaagtccagctattttgacttcatattttatgattgagtggtatttcattgtgtagttgtaccatactttatttaaccaatcttcctttatggatgtttaggatttttctgttttctcagttataaacaatgctagaatgatcacctctgtcactaaacctttgagataactcttatttatttagaatgaatgtatttctagtacaagaattgttggctcacaggatatatacactatttaaaaattttcatgtcccaccagaaattttcatgtccttcaagcatttccctttagagagatgtttccatttaggctcctaccagtaacataaatcaagaagtgctgggtgcatgattcccaaacccttgcccacgttgggattatcatttttttttttatttttgacatttaattaattaattaattaattaatttatagacagggtcttgctttgtcacccaggctggagtgcaatggcatgatctcggctcactgcaacctctgtctcccaggttcaagccattttcctgcctcaccctcttgagtagctgggaatacaggcacacgccaccacgcctggctaattttttgtatttttttagtagaaacagggtttcaccatgttggccaggctggtctcgaactcctgacctcaggtgatccacccgcctcggcctcccaaagtgttgggatcgcaggtgtaagccaccgcgccctgccattttttgacattttaataggtgaaacacattttattttaatgattagtttcgatttttaattaggttgaatatttttcatgggtttatttgtactaaataaattttgatctatggaattttattctgtcctgtattataatagttttcagatggtagggatttttggttttattgggtcatttgtgtacatatatttctacaaatttatatatgcatgtgtgtatgtgtgtctatccataataaatatatttgtgtgtacttgaactgcattcacatgtatataacattgttggttttacccagggattttgaggagtatttgtgggccttaaatttgtaacatgaccatcaatttccaactgcttttctttctctctctctctttcttttcttcttcttcttctttcttctttcgtcgtcttcttcttcttcttttttttttttttgaaagggagtaacccatgacctgggggaaattctagttaatttttcattgcatgattttcaggagatagggtcaaaaggagctagtagggcattcaattatgtgcttgagtgtgttggaaaatgttttttttttttttctctctccctcaagtgtacaatattttacttgggcttgtttttcaagtgcattgaagtgtgactaaacatttttgggtactaccattctgtaaagaagagggcccatcttgttaaatattccttcatcaactttgcagttagccagttattggcagggagaagcctgcgagggcatgagctttaggcattggacagagggagggtgggtgggaggcggggacttgggggatctcaggattggggtactttgttgtccctcccactgctgtatgaaaaagtgactggttcaagctggcttttgtcttataattttggatgagtcataagtggagaaggaggggaagtgagtggttagacctcagctcatctgagggctaaaggttctttgtgacacatcacacagaattggagtgctgtccttctggagagtggtggagaaccaagatacagttcagaaccaaaggaatagagaagggctttgatttctttttggctttagattggggatttgggaggcttagcaggaaagatgtccactgaaaatgtggaagggaagcccagtaaccttggggagagaggaagagcccggagctccactttcctcagggttgtccagccaatgtttaaccacagtattttcacttctgcagtctctcctgctgcagaacgcatccgattcatcttgggagaggaggatgacagcccagctccccctcagctcttcacggaactggatgagctgctggccgtggatgggcaggagatggagtggaaggaaacagccaggtgaggcatagctgactgtatgtagtactgacccagggaaacaagggcagggcaagatgcttgatcctggagtgccgttctttagccttagcactttgaatggccaatgggcatgatgttggctgggataaggagtaaataattctatttcttcttttcttttttgttgacatgaatgcagggcacctcttatttcactattggggcattgtttcattgatccatgttgctataattttggcttttataaggaattagaaataaagctcaatttatatactatttaatagtaaaatattttagagagataataaactcaggtacccaaaaatgacagccaagagatatgtttccacagtgtccacatgccaagatctcttgtgagattttgtgtgacttattactcattccctgtcaagaggtgggttttggccaggtgcagtggcttgtgcctgtaatcacagaattttagtaggccgaggcaggtggattgcctgagcctagggttcaagaccagcctgggcaacataatgggaccccatctctacaaaaaaaaaaagaaaaaaaaatcagccgggcatggtggtgcatgcctgtggtcccagctactcaggaggc

SEQ ID NO: 10207 - DNA, 6000 bp, Homo sapiens
cttaatcatctttgtatccttccatatttcttcatatccttagcacatggtaagcactaatgattgaatggcaagacttgcttgactaaagaggagagggctttgtggggcatagtcataaataaaggtggagacttgtggagaactggggctgacccttgtaaaggacaaggtatttcctaaaatatgttttgtttcaacgcaagaaaagggacacttcactcattttcaaagacaatagagtttcattaagtattgatgctacagttatctttaaataggtaccattttgcagtgttggagaatacctcaagccacaaatgtcaccacatcatttaccatttgtcaccaacaagtggtcaccaagtaggggcagggagtagggagtgctgctttctattagggaagagccactagagaaagagagcaatgagggaagagtttaaaagaaatcattcttcatttttccccctcgggttttaatttgcttactgcaccatatgatacagtagactcacattgacaataagcacagtgccattgattaacgggctgtgagcactgtgctaagggccttaaagccacatcattgcatgctagtccagccataatgctcttttcccttcctatgtttaaagtcaaaacagtgactttgaccatcaatattccttatgggatgttttcatttttccaattatactatacaatgaatttccatgggccatattaatcctagctggtattagccaaaccccatagacactccatatacactatctatgctgctgcatataagcagttatcatcaaatatttataaaataaccattatatcaacagcaacatgttaggtgtttcaggtagttagaagaaaagtaggacatagtctgccctcaagaagtttaccatctaagcggagccaagacacagcaaagagaaaacatggctatattgaatcagtgccagtctttattaagacttttagtaaataaaattgctttgaccttacaatgacatcattcatccagattgctgttcaggttgaaattagatgaagcaatgttgccttataaagcaagcaaagagaccttggtttcattagcagcactaccattaaataacattgacaaagtcacctaaattccttgggtcccactttacttatcttgagaatgggagttgctttgttttttggtttctgattgtctttttttttttaacctcatacactatgcaaatgccaatctgaaaacctccccatttccatccaaaatgtgccatgatttaagaggttctgacctagagagaaagttttacatgctcactaattattgtcctcttatcacacgtacaaaaaatgtgtttgtcttactcttactacaatagtatccaatttgtccaaacctggctggaatcccagtacacccaatttttcctgtttaagctcgttaatgtggtaaataagccctatgggttcagtacattcccaattttggttcatccatatctcttgtatatctttcctcacttatcagcattttactcaactcactgtttccttaatgggaaggaaaaaaaaaaaaacaaagtaaaggccaatctttttcctttattttactagtgtttgtataggaggtgtgtcttacagtataggagattcagatatagcattaaccaaatagtcttgcctaaaataaccatagccagtaaacctgatagccagaagattttcaatcctctaacccccattccaacatactaataaactttaaaaattcaaatacaataacaatcatgtaagaaactggttttataactatgcctggggtatagtttcaagagttcccagtgggaggaggttcacttttcattcaatgacattttttactatttggcagattcaccatgtgcttgtataagatttattatattaaaaatttaaaaacaatattggccaacattcattgcacatttgctatgtggcaggccttttatattcattaccttatttaatcctcctaacaaccataaagcaattttttttaaagtttctccattttatagatgaagaaacagggggttaaaaacttattcaaggacatacatttattgaccaaactcacattttatgggaataaaaatatatgatagagataaaaattctgtgagaagttcaattaccatacaaggtgaagcaggagtaccctatcaataaaggagcatgtttattgagtatattttgccaggcttgtagcagtaagttatgctgaaatttaggcagagctccagggctttagttaccggattttaacttgttcattctacagcttccatttctcaaccatcctgttaaaggatttgattggaactggaggtttcacatttggggagagtgttggccatagacagcccatgacctttgtttaccaaagctacctcccttatttctatagatcaaagaagcagtggtgtttctgggtttctatttatggtctctttcattcccatacccacagaaataaatgtgagcctttagggaaagcaaactgtggaacatcttcaggttttcaggtacatagattaggtcagctgaatcagccttcaggacataaatcagaattttgaaggctaagagtttgaaacgagcacagcaaaggtctagttctttgcaaaaaaaaaaaaaattgtctttttgcaaatacctggcagatgtaaataagcttcaaaattgcaatagcaattattttagcaacagatataagtataccaaatgctttttgcacctttgaattgtgttttcattttgtttaattttcacatctagctgagataaaaattagtgggagtggtcattttttgtactgtatctagcatacatgatttccagtagcaaggtataataattcatatgctagcatgagccttagaggtaacaaatgctcattttgtgatgctcttctaatcctgccattagttttagtcttaaaatgaccatattcctttccagggagctcccgtcttatgaacagatcagttttggggggatctctggatttattttttccaatcactgtttctttcataaacacgtattgaggacttactgtgtgtcagatattcttctgggtgctggagttggagctaagaataaacacagcaggcaaataatccatacctgcatggaggttacagtctagttctggaagagaagcaataacaagtaaattatatagtatgttagaaggtgaggagtactatgagaaatattaagctgggagtctggggtgggggttgaaaacttaaattgaattgtgttttagtccattttcacacttctgataaacatacccgagactgagcaatttacaaaagaaagaggtttaattggacttaacagttccatgtggctggggaagcctcaaaatcatggcggaaggcaaggaggcacaagtcacatcttatgtggatggcagcaggcaataaaaaagaaagcttgttcagggaaactcccccttacagaaccatcagatctcatgagactcattcactatcatgagaacagcacaggaaagacccgcccccataatttgatcaccttccacagggttcctcccacaacatgtgggaactgtgggagttgcaattcaagatgagatttgggtggggacacagccaaaccatatcaagttgttaaggaaggcctcactgagaaggtgacatttgagcgaagacttgaaggaaatgagagaatgagctgtgtggagacctggaggacaattgttccaagccaaggaaacagtcagtgcaaaggccctgaggcaaaggtgtgtcaggcatgagagtaaagagaaggagaccagtatggttatagcagagggagcaagggtcctataataggggctggtatgcttagaaaagtagctggggccagaccccatagggctttgcaaggcattttaatgatttggcttttactctgagatgaggatccattcaaaggttttgaacagaggagtgataacaatctgatttcatttcttatagatatattattaattatgcaagagggtctcacaattaattatccaccaaattctgcttaacccatattgccattcaactaaggtgctaatgagactctgagaacttgtgctctaagtgctggatttagataatggagatggggatttggctgacagctcagttggatgactttgggcacttcaattaacatctctgagccccattttccttgtcagagaaacaagtttaaactatacctgccccatggccttattttgaggatcaagtaaaaactaaatatagaagcactttataaattataagacaatataaatgtcaggagaggtggtgatagcaacagtggttgtggttgtgtcaccattatttcagggaaaattaagcccagaacctaagtcagaatgttaggaatgcaagcttccctttcccatctcttcttattaaattactatggaaatggggcctcctcttccttccccagcacttgggatccagaagacaacaaggactcagatgatgccaacagaacatgccagtcaggatcctagcaggaagagttgtcattgacagggtgtttggtagaccggggcctccacggtgggtgggtctgctgtcctagtgagagcgtcacaactttccctctccctggccccataagcatccccagttcagtgcagggcattacgctgtcctcagatgggcaacttttccaagtaatcacaaccctcttctgtttctccaccaggcattcctcctatggaagacttttggacgaccatgactacgggtcctggggaaactacaacaaccctctgtacgatgactcctaacaatggaatatggcctgggatgaggattaactgttctttatttataagtgcttatccagtagaattaataagtacctgatgcgcattgaacgacaatcttaagccctgttttgttggtatggttgtttttgttttcctccctctcctctggctgctacaacttcccctttctggtacaagaagaaccattctttaaaggtgagtggaggctgatttgcagctgaagtgggccagccttgcaccagccaggccagaccaccatggtgaaggcttctttccccactgcaggacccactttgagaaggaccgaggaggaggatttgggttgttttgttaggggttactttcaggggaacatttcatttgtgttatttcttaaacttctatttaggaaattacattaagtattaatgaggggaaaggaaatgagctctacgaggatttcaccctgcatgggagagagcagggttttctcagattcctttttaatctctatttatctggttgtttctgacaggatgctgcctgcttggctctacaagctggaaagcagcttcttagctgcctaattaatgaaagatgaaaataggaagtgccctggagggggccagcaggtcacggggcagaatctctcaggttgctgtgggatctcagtgtgcccctacctgttctcccctccaggccacctgtctctgtaaaggatgtctgctctgttcaaaaggcagctgggatcccagcccacaagtgatcagcagagttgcatttccaaagaaaaaggctatgagatgagctgagttatagagagaaagggagaggcatgtacggtgtggggaagtggaagagaagctggcgggggagaaggaggctaacctgcactgagtacttcattaggacaagtgagaatcagctattgataatggccagagatatccacagcttggaggagcccagagaccgtttgctttatacccacacagcaactggtccactgctttactgtctgttggataatggctgtaaaatgtttaaaaacaaaacaaaacaaaaaagaggcactagtctatctgcaattactcaacgaggcattttcataggaaacagactatgattaatccatttattcttcccac

SEQ ID NO: 10208 - DNA, 6000 bp, Homo sapiens
agaacacatcagtataggccaatgtttcagtttaggtgatctatcaaaatgatacacttgactgagtcatgattattgctatcatttaccgagtgcctaaaaataatcaccacaaacctttgaaggaggtatcatctctattttatacataaggaaactaaggttcagaaagattaagaacaaagtcatacagcttttagggagcaggggcagggttttagcccagatctctctgagtccaaaggcgttgctcttaactaccacaccgtaagtccgtgggagaaaaagagactttcacaatatttaataaatgcctatcacaagacaaacagataactaattcatgtatgctatgctgatcacagtttcttaagcaactcctaaaccatctattatttattatctgaccttaaggaatggaactggtgttggtgttgaatagaaagcactcctttgtaaccaatcaccactttcatcctcatcctctctcctccccactgccttgcttttcaatagtgttttaaatttttgaaaaccccttaaaatacattatcttaattcttaaattcatatatttacttggtacttattgtaccatatgccatacattgtgtagcagtcagaaaaggtataactacaaagttctattttacagatgatgaggaaactgaggtctagaaagattaagtaatttgtccaaggtaacaaagatagttagtaaatagattagggacaaattctctgattattggttggatccttaattggttagccacagatatacttagcaaaaaacagtatcagggagaagaaaataatttaggagatagagttctcattattacccagttcaatgaacatttattgaacacttactaggaattcatacacctagactacaaagacttgtgtttgacttggcagatcgaagttatgaactttggataactggtcatgtcactgagaagcttttatgactgaccaaatattactcttcaatgcaggcagaacattcacctttatctggctaatcaagattcttttacagtgaatcacttctcttactttacaacctaactcagaaccccttaccttgcactccaatcagaaccagcaagatgatgcccaagaggaaaagaacaccacttttcttcatagtgatagaatggagttccaagtcactcctgtattggattttgagcctgagaaattctttagagaacacattttggggatcatatttatttaggatattcatttctctcctaaactctgattggctagtatctttagctgagctaactaaattgaccacaaacttgattgtgctgggggaaaccctagtctcagatccaagggaatttctgcatgtttttatttccatttcacataaatgggtggtttatagtaagggatgtgaaactagcaacactgatagcctttggcacattcacagttgctcacctgtgtgaagaataggttatataatgaatatactaatgttatacaacaaaggttggagatgtggtttccagatgggaaatattaaagtccagataaataatatacttttcaaattcccttactatttatggcatattcttctgtataatagatggctacattgatattttcttatattgcccacttaacaacttaaagcaccttaatttcctctgggaccaggtcattttctactagtggtaagctcattctgtatcattcctgctacagtattattttttaaactaataaattggttagaataaggggtcagttgcatgtaagagacccaaattaacagtggctaagaaatgcaataaaaatgaagataaatagctgggacctaattaaagagcttttgcacagcaaaaggaacagtcagcagagtaaacagacaacccacagagtgggagaaaatcttcacaatctatatacctgacaaaggactaatatccagaatctagaatgaattcaaacaaatcattaagtaaaaaacaaacaatcccattaaaaagtgggctaaggacatcaatatacaattctcaaaagaagatacacgaatagccaacaaacatatgaaaaaatgctcatcactaatgatcagggaaatgcaaatcaaaaccacggtgtgataccaccttacacctgcaagaatggccataatcaaaaaatcaaaaaacagcagatgttggtgtggacttggtgatcagggaacacttctacactgctggtgggaatgtaaactagcacagccgctatggaaaacagtgtggagattccttaaagaactaaaaagcagaattaccattttatccagcaatcccactactgggtatctacccagaggaaaagaagtcattatttgaaaaatgtacttgcacatgcatgtttatagcagcacaattcacaattgcaaaatcatggaaccaacccaaatgcccatcaatcaatgagtgaataaagaaactgtggtttatatatacacaatcgaatactactcagtcacaaaaaggaatgaattaacggcattagcagtgacctggatgagattggagactattattctaagtgaagtaactcaggaatggaaaaccaatcatcatctgttctcactggtatgtgggagctaagctatgaggacacaaaggcataagaatgatacaatggagtttggggacttgtggagaagagtgggagcggggtgagggataaaagactacaaatagggtgcagtgtatactgcttgggtgatgggtgaaccgaaatctcacaaatcaccactaaagaacttattcgtgtaaccaaataccacctgtaccccaataacttatggaaaaataaaaaaaaaaaaaacaacaacagaaaacagtggctaagatagaagcttatttctccctgagagatgtaggtggattagcacttggatagtggctctttcccatgaggtcttccaggcttctcctttcttgtgttgtcaccatctctagattgctgccctcatgcacatggccaaaggtggcttgccaccatgtccaatttccaggtataggatgatgagaaggcagaaaaagggcatgtccctcctttttagacatcctagaagttgcacccatcattttctatcacctcccatggaggcaggccttaatcacatggctacacctagttgtaggggaagttaagaaacgtcatctttattttggttgactagctaaagattggagatttccttattgtaaaacaatgtttctcaacgttttttttcattatggactcagcactgcatgcgtgtgtgcgcgcatgtgcacccacacacacacacacacccccccacatttcaccttgctctgagaaaaaataaaatgaactgaaaactaaatttaatttcttcctgaagagagaaatcaaatgctaagaaataagattttgttgggtagggttgaaccttggtaggccactagtcattgcaatatctaaaattttttagctctccaagaaccaatattttcccccttgggagcaatttacctctcttcccattgacaatgcatgctgtagaattggaggaaaatggatattagcatttcatgtcacatggtgcacattttttgactgacttctatacagattattaatacttaaatggaattacagaattctttttgaataaaacatgtggtgaccattgatacagcttatccatttgctcatgcttaattttggtactgactgtggcaatgcatagagtgcaaataggttcacgttcctgctttaccacttaatgactgtgtgcaaaatacttaatttttgtgagcttcatctccctcatttaagaaaattattagacctcacagggtgttaaaattaatgccaaggacggattgtcaactgcaaagcctcacagggctagtggctgttctttccagcaaagaaaggaggatggaaatttcttaggataagaactaaggcccagcactgttggtgctacccacctttctagcctcttcttacacagctctctgctcccatcactttgtcttctctcagttttcttttcttttctccttctccttcccctcccctcttcttttcttttcttttctttctttttgagaccgttttttttttttgcccaggctagagtgcaatggtgcaatctcagctcacggcaactttcgtctcccaggctcaagcgattctcctgcctcagcctcccaagtagctgggattacaggcatccaccaccatgccaggctaatttctgtatttttagtagagaccgggtttcaccacgttgcccaggccggtctcgaactcctgacctcaagtgatctgcccgccctcccaaagtgctgcaattgcaggcgtgagccactgcacccggcccttctctcagttttcaaaggggacaatgctccttcccatggcactgtttttgctcatgccattcttctgcctggagcgactgtgcatgctcctcattcctgccctcctgcatagtagttactcaccatagttacccaggccagcatcatttccctgggaagactttcctgaaccccagaggggctctcaccgcacacttgcagaggccttgctgagcccgtgtccgcagcaacgctacgtttccctgcaaccctatggttaacatttccttccaccactaggcaaggaaggcctgcgacgctccccgtctgagcatggtgctaaacacagtgcctagcacccagtaagcgcacacgcatgagggaaggagctgggagctggctcggcaggtctggaagttggatagggtctgtaaagggctgcctggctccaggggcctcacacgcagcgacctcagccgggcccaaggtgcgtgtactgcgcatgcccagccaactggtcttccagaaccttcttcagtgaggaggttatacccggaggtctcgacgctcgctcgtgctgctcgtgttgccgctgggtacgtttgctgccagtgctgatccagccggaggcgaagagaagcactttgggggcaaaaggtaggggttgtgccttcaggatctctcctctctgtcccctgagcggcccgcagcctccccagccgagatggccgtgcttttggggatgggtgggaaggttctcagcggcggtggccatgagcgaagaggcccgttttgcaggtttcacacgaggcttgggtgaggccagcagggaacgacggccccagaagggccagggcactgggcttaggggtaaccctgggccgtgggcttcagtgactgggaaagaggcccttcggataagagaaaggaggtgttggggtcagttgggagtcactgaggccagatcttatttgttacccaaaaaggggctaattttctgagatagcaagcggaatgggagggcttctctcgcctgaccctacttcgtggtgaaactgttctgccatggtagggtagggccccgcccctctgagcaggctggggccgctgcgcccagctcaggcctgtccagacactagtttcctgggcttcgtttaggaacttgtcatgcaaagtctgagagcaaccacattctctcaggaagcaggcagcgggaaggagaaaatcccattgatcgttgcatttatggctagacaaggcttttaggagaaacagaaacctgatgagaggatgttgcaggcgtttctcacagccctgggaatggagccaaagatgatctagagttgaaatcaacagttaccaattcctttttggacaagaattttaacttcctgtgccttgaaaaattccagttctgtgtccgtaggggatccaaatgctaatgtaaccccaaagaactttacaaagcggaattcttagttttcacaagtgtggcccagcctccctcttgaatctttttggttgtggaatcgaggtgttctgtttaattatccagtgtgactgactctgtggcagggacggtaagagccttccctttttacttgtgagaggagaagtttctctcataaag

SEQ ID NO: 10209 - DNA, 6000 bp, Homo sapiens
taattttgcctgttttaaaacttcatgttaataggaacacagtgtatactcttgacgtctggcttcttttgctcaacattaaaaacatacttcttttgggatttatttgactatctttccaatttgttaagttggattcttagctcattaattttcaaatttccttctttttttggtattttttacaactttaaaaaattgtgtcaaaatatatgtaacatgaaatttgtaactttaaccattcttttaaagtttataatttggtggcattaattacatttacaatattatgcaatcattatcactatttcaaaattttttcatcatcctccaaaaaaacctctgtatccattatgcactaactcctcatttcttccttctcccagtccctaaaaatctctaatttactttctgtctcatgagtttgcctattctagatatttcatataatggagttatacactatatgtccttttgcatttgacttctttcacttagcatgttttcagggttaatccatgttataacttatcaaaatttcattctttttatgaataattttccatgtatgtatatgccacattttgtttattaattcatctgttggtggacacttgggttcttatcactttttggctattgtgaataatgctgccataaacattgatgtacaaatatctgagttcctgttgttaattcttttaggtatatacctaagagtggaattgatgtgtcatatggtaaacctttgcttagctttttgaggactgccaaactattttccacagcaattgcaagatattatattcccaccagcaatgcatgagtgtcctaatttctccacatcctcaccaacacttgttattttctattcgtttgtttttattattataaccatcctaattggtgtgaagtagtatctcattgtggttttgatttgcatttccttaatgactaatgatgttgaacatcttttgatgtgatttttggccatttgtatatcttctttagggaaatatctattcaaatattttgtctattttttaattgggttgtttgtctttttgtcgttgagtggtgggagtttttaaatatattacggatattaaactcttatcaggtatatgatgtgcaaagattatctcctgtgggttatcttttcactctctctcttttttttttttttttttttttgagacagagtcttgctctatcacccaggctggagtgcagtggcgcaatctcggctcactgcaagctccacctcctgggtcgacgccattctcctgcctcagcctcccaagtagctgggactacaggcgcccaccaccacgcctggctaaatttttgtatttttagtagagatggggtttcaccatgttagccaggatggtcttgatctcctgacatcgtgatccgcccatctcagcctcccaaagtgctgggattacaggtgtgagccaccgcgcctggcctcttttcactctcttgatcatgtttttcgatatacagaagttttttattttaatgaagtccaatttatctattttttcttttgttgctttggcttttggtatcattttaagaagccattgccaaattcaaaattgtgcagatttgtccctatgttttattctaagaagtttgtagttttagctcttaaatttaggtctctaagctgttttgagttgatttttgtatacagtataagggcccaacttcattattttgcatgtaggtaggatttctccaagacttagggtagggatcttgtccatcttgttcctagtactgtgcctgacacacattatatactcattcaacaactattgatttgttatataccatactaggcactggagatgcaatggagaagaaaacagacctgatcctcgtcaccttggtactttgttgctagtgtttgctgaataaataaataagaaaccatctattttcatgacatctgcatcatcacaagttgataattgctctatatggtaattttgactccatacattgcataccataattgtagtcattacttagagaatctctcagtctctctctctctctctctcaactcaaaggtgaaatgtattaaatacagtaatcaagtgagtatatgttatttaagaatgaggttggtgattttccaggtgtttatttctagactttttgccaggtaagctggccatttcattcccaaaaggattattcaaatatataaaatagtattttcaaacactattatatattccagaaaaacaagcatttgaataacaaaaacaatagaacttagcaaacatggtgaaactcccatctctattaaaaatacaaaaattagcccggcatggtggtacgtgcctgtaatcctagctactcgggaagctgaggcaggaggatcgcttgaacccaggaggtggaggttgcagtgagctgagatcacaccactgcacaccagcctgggcaacagagtgagactctgtctcaaaaaagaaaacaaaacaaaacaaaaaaatagaactttaaggtgagaaatgggaaagcagtcctgaattggtagaaaccctaggcatatggacaaattgtttatttattatttgtttgtttatttaagagtgataatttgccaacatattattttgctaaatatttttaaaaggattattgcagctgtagaaaatatatagaaagccatcttaggaaactctacctcttgcttgctgatatataaattgtagtcagctttttcttctttttgtcacaacctttggagattccggtaaaatgcctccttcagaatatttctgggcatccgttatttgtttatttatttattttttttttggttacatgagtaagttctccagtggcaatttctgagattttggtgcacccatcacccaagcagtgtaccctgtacccaatgtgtagtcttttatctcttgtccccgtcctatccttccccccaagttcccaaagtccattttatcattcttacacctttgcatccccatagcttagctcctacttatgagtgagaatgtacaatgtttggttttccattccttagttacttcagttagaataatggtctccagttccatccaagttgctactaatgccattatttcattcctttttatggctgaatgttattccattatatatatgtgtatatatacacatatataccacaatttctctatccactcatcgattgatgggcatttgggctggttccatagttttgcaactgcaaattgtgctgctattaacatgtgtgtgcaagtatcttttttgtataatgacttttcttcctctgggtagatacccaggtagtgggactgctggatgaaatggtagatccacttttagttctttaaggaatctccacactgttttccatagtggttttactagtttacattcccaccagcagcgtaaaagtgttctcttttccccacatccacaccaacatctaattttttaaattttttgattatggccagttttgctggagtaaggtggtattacattgtggttttgatttgcatttcccttataattagtgatatctagccttttttcatatgtttgttcaccatttttatatcttcttttgagaattgtctattcatgtccttagcccatttgttgatgggattgcttgtttttttcttgctggcttgtttgagttccttgtagattctgaatattagtcctttgttggatatatagattgcaaagatttttcccactctgtgggctgtttactctgctgattatttcttttgctgtgtagaagctttttagtttaatcaagcattgtttgggcaaattgttacaaatcattcctgcaggactccattcagcctagataaccatacttttggcccagttctcacagaatttctacagaaaccctacctcctcaaagtaataaaaagtttgcattacaatcggactaatatcaaagaaaataaaaataacaattgggctaattataatgattacctacatagctttctccattaactaactcacaacagctctgttaagtagtcaggacaaatattaccacccccggttcacagctggaataatagtacttgcataataataattcttgagggattcttaaatgctggcactgtgttaatttctttatattcatcgaatatccccaataaccctacaggtagatactattattttccccattttcaggccaggtaattaatgaagcttaaaaatgtaagtaccctgcccccaggagtgcataattattaagtagcagaaccaatgcttatatttaaatcagaaacactcagaagtagcataagaatttagtaaaaacgaaacacaccctcgtgcaatccgtattatgtggccacgtgcctaccagggtcagctggatggtacttgtctgctagaagtgagtcgaggcagaagaatcaacacaggagctggaagggcctctggaaatcagctggggactagagacaggtgtgcagccctcggtttacagaggctgtgagaccaagagagttccaagacctccaggaaaacatctccctgctaaaaggctttcccaacctttagaaatctattcattttccccactttccatcctctttctcttgctatctctttatcgctcctcctgccttcttcctttctttccttcagtaaacgttttttgaaacgatgatgagcaaaaaacgcctgatccagtctatggcgcgtttcggtgggaagatgaacacgccttcccagcagagtaaaacgtgattacaccaaggaccggtaccctctcccttccctcggccaggtccacgtccccaggcgtcggagaaggggttggaccgcgcagcggggcgtcagagttgccaggcgcccggggcaaataccggcagcggtggttgtgcggtgtcctagcaacggggcggcagcagggcacacacaccgcccaagcccggacggtggccgcgaagctagggccaccatggcggaccgcaggcggcggctccggccggggacgttggccccggtgcgcgagggcgtgaactgcaggtccaggtaaacactcagcgcccgggccgagggcgcatcccacgcgggccgcgcgggggcgcctggagacccgcgcttgctggggcgggggcgaggggagaggtccagcctgccttccctcctcaatgcttcctgtacgtacaacataatacgctgagataaccaacgcttggcgctgctctttgcaaaggatttttcctgctgtcatcctcacaacccccgcctcccacgcccccagggatgtagactaatatccccatttctgatgggaaagtgatggccgcagagtccgctgcggaggctggtgccctcctgctagccacccacccttttccggcctagccaaccaactgttcgccagatgccccggggcgcctggagccctgtatccgatgttaggcatctgctgcccctggagcctttggtatccagatggcggctgtggccaagtggagcccagggttgggggagcgcctggggtgctagggaggtctgctaacattttgtacggttgtggtagcctcagagcaggaacaagaaggtttttgcctttaccgactccttgacaatcttttgagaatggaattcgtctgtcttggagacagcacgatgtggtggtgaagattccaaagtctagaatcagaaaggcttgagtagaaggctagttctcctcttgtttgcctggtgaccttaggcaagttggttgctccttctgggctcactttcctaactataaaatggggcaataacttaggaatcagctttctaagattgtcgtgaggattaatggagatagcacatgtaaagttgtcactggcacatagaacgtatcgtgtacatgttagcaattattcatagttgtttctagcagttattcataagagcttctttgggaagcttctcccccccatttaaaaattttgt

SEQ ID NO: 10210 - DNA, 6000 bp, Homo sapiens
atgtcacaagtaccttaaaagcacatacaaagagatacatggatgcaataaccttaatttaaaaaaaaacttttaatctcagttttttcctaagcaaaccaaaacttaataatatgacaacttgataatataaaagtttatttttaaatcctctcattgtgacttacacagaccgttcatgacatgcttggactttctggtttgtcctgaacatccctctttcttaaacaaccagtcattctactctaggactaaattctctctcgtatgaagaatctcatacaaaattatttttcatttgaaattatttctctttaagctttcttaccaaaaaaaaaattatttttataactttctctacatctcttgtatttcctggttcattttacctggttttatacataacctttaaataagctttgaattagacaaaaattgttcacccttttttaaaaggacacactttttttttaagaaagaatgttttcctacaaatatattttattggaaaatatccaaataatgaaatatctattatttaatttaactttagattctaaattatgacctgtttgtctacaattatttatcccattacatttacctaattattttaattgtttatgtagattatttatgaaaactgtgatagtcatcatttaaagttttggaaccaccattgcaaaattgtaactgaaacagtgaaaaagatttaaactaactgacttcatcttgcttttagcctccaatctgtccttgttcattcctgggtgtaggccaaactatttgggaccttagcttatagtttagctttgaaacaaagacagtaacagtcctttctcaaaacaaacctcagtccctgtggactaaactgcccaaagccacaagattagaagttatggtaatcttactaaattcaagatgtagctattttttattaaaccaatatcaatgtcttgtttattaaaggttacacaaggaaagttcattcagctttgggctaggttcatagttttataacccccatgtcaaattttgacaccttatagtatttggcagggataagtatgaaattgcttgattaataaatgcaaacaagaatgtatgctggcaattcttaagacatttctaatattactttaccaataattttaaagctagcttatttattaaagatttcacttaagttccgtaaacttgaaaaagcatttgattagtctcttattttttcctgataaactatttgattcaagtgcttttttctttaagccaattaattagagctttttaatatattttcagtagtgaaacattgtgtacacaacatataaatgcatagacatgttaggcatgccaatagaaacacatcttagattcataaaaaacgtttttttcctatcctagattttcaagattttgataacctgtttcacaaccttaggtagttgtcagctaaatagccttaaatttgcatattaaaggaaacaactcaggtgaaaatcaaatagcaaaatttgcatcataagatacagagagaaaaagtctagagggagattaaagatggatgccaaatcgaacataaaattataaaaatctatcataggattgcataaggagaccaattttatttagagactacctatcttttaaccagatctctgagccctgggcagagcccacactgaatcctgggtttccaaaaagggagaatttttatgaggctggaccatgtgatgtttttatggttcacttaaaaaaaatttttttaaaacaaagacatttttaagtgtctaaactacacttttctttaaaaacccaagagtagcctctgttgcagtaactattttagtcaataaatcaggtaacaatataaaagcaagcagtttaaaagctgagatgaacttgtctgtttacactcttcaagttccataaggagaaacaggtttctccccgaaagggagtctggtgtcttctccattttctttaaggaaccccaggctattataaactagtttaggtccctcatgcagcagagggtgaaagagaaaggagagacagcagaagtaaatgaagaaaacagaatccagtcaactgagaagaaaaaatttaaaaaacgggcgctaggcatggtggttcacatctataatcccagcactttgggaggccaaggcaggtggatcaactgaggtcaggagttcaagaccagcctggccaacatggtgaaacgtcatctgtactaaacatacaaaaattagctgggtgtggtggtacgtgcgtgtaatcccaactacttgggagactggggcaggagaatcccttgaatccaggaggtggaggttgcagtgagccaagatcacacgactgcactccagcctggacaacagagcaatactccacctcaaaaaaaaaaaaaaaaagacaaggtcctgggggagaaaaaaggaataaaaacatgaaggccttttaaatacaaacacatgtaaacgtacagacacacatcttggatggtagttttcaattaagctgactttaaccattaagttcctttaaaaaaacaactctttaaatctcatttccatatttcacgaactaggacaaattgccgctatttcagaagtaccaagtatcaaaccagaaagggcttgatttaggaaacaaaactcaggctgtcatggtgggaaaaaaaaggcagaaccctagctattgaaatgcagtgtgaggtgactgcctttgctttcagtttgacctggctagcaaaaaggtggctttgttatgtaaataaagccccttaagtagtcaaaattaaaattctttccttttttttctttttttttcctttttctggctgtttttctcccccccattataccaccttaccatactaccttttttgtgtgtgtctatgagaatttagccacttcagtggccttgttccccataatttggaactttccttcggatttgatcaagtcggaagaagttggtcaaacccaatgggaaaaagactgaaacaacaagaaaaagagaaacaataaaaaaaaacagttaagcaaaaaaaaaatgattgcacaacttatatgattactgagcactctaatggtaaagacattaagaccagctggttgttgattttaactttagccaagacaaaccccaatttagttatctaggggttgttgggtctcaggctgaagactgctttctatcctagtgaagcagccttgttgtctggggtgatacctgaggttcattgtctcatgcagaggaaatcaaggacatggacacacaaggagtgaggttaaaagcagaggattaataggcaaaaggaaaagaagaactttctcctgcagagagaggggtcccaaatgggtttctgcttcctcagtgaaatgcaggttttatagatgagcttgaggaggtggtgtttgatttacatagggcatgaaagattggttggaccaggtgtgccatttgcataagggtgcaaaaagctggccacccccaccctaatgttttattatgcaaatggattatcttcctggcccacaccatgttgcctgtttctttacacatggtgacaaaaaggaagatggagcctacacgttgaacatacctggcccccaggtagccattttgtattggcacagctgctggcagtaacctgtgcaagcttccagcttgcttatctatgtctgcagctcaatttttcaggctgctcttcattagacaaaagaagtttctcgggctgctttctgttagaagggaagccttgccaagaactcttaccctcactatctgcctaaataacttctatctcctgtgtcactaggagcaggaaaaaaaaaaaaaaacctcatcttccctgttggaagggaaactccgtaaaggagttacctaccttccatcatcatggaagcaggaaaaacttgcctgccttgtgttggaagcaactaaaactccaaaaaaaaaaaaaaaaaaaaaaaggttgtacagcaaaataaactttagatctcaaccagaattggggagatcagggattctctggaatgggtgcttccaggcctcagcaaattgtcctattggtttaagccataaagatagcccaaggttgaaccaagcactgataggagatttgttaaaggtcaggggcacctccactcagaatccctctgtggttaccaaaatgtgaaccctgaaaatctgagacaggtctcagttaatttagaaagtttattttgccaaggttgaggttgcacacccatgacacagcctcgggaggtcttgaagacatgtgcccaaggtggtcagagcacagtttggtttcatacattttagggggatatgagacatcaatcaacatatgtaagatgaacattggttcggtccggaaaggtgggacaactcaaagtggggagaggccttccaggtcataggtagataagagataaatggttgcattcttttgggtttctgattagcctctccaaagaaggcaatcagatatgcatttatctccatgagcagatgtgtgactttgaatagaatgggaggcaggtttgccctaagcagttcccagcttgactttttcctttagctgagtgattttgggaccccgagatattttcctttcaaaataggaatgaatatgttgtgatcattatcttgatgacaaacatttcgtcccaagatttgttcacacatgatgaatgtgctatgtatatttaatcttaatgaaatcccaaggaaaatattaattttaacactaataacgataaatgggcattgtactcacatagtgttcttactcccaggggcacaaagctcttcacaattaattatttcagtcattctcatagcagtcccatgaggtgggtggctgagtgtgtcctcttggaaaaaaaaaagaaaaaaggttactaattggattttcttctgttccacattctgtgttctagaaccgagtagctaccttataaagaccatctgtacatccactgtgaaatggagtttcaaaatcacaagcttctttcccacatgaacataagactaggagcacatatggaagagtaaagttgaagggaatttggatgatgatttggcaagatgctgtaagtggattaggcaaggctgctaaagagagacaggaaatggctgtgttagtgcttcggacctccgttagaagtagcagttcatggtgttgaaggtttgttgttgaaaataccttcctgaggcacctcttcattgtgcttattcttcccacaacattgtgccaagacactgtcaagcctgggcctgtcaaagcctgggatgtcaaaggcctgggtctttctcatcctgctgtaatgtattgatagctgggggctctgcagaaggacaagggaaaggtgagatgtttataattctcagtagtaccttttagctagtctcatgctcccttatcccccatttctctaccaggccagctttccacatgcttttgctttctcagaaacagagcctgtgtgtggacacatcttgtccctggagcagggaaacagtacagctaaacctctcactttacctagtgatcagctcatccctctccttcctttcacaatatgccattcagtcttctccagtagtctttcatcattttagtcctgtctctttggttagactgcaagctctttggctgaatgttcaggtcaggtgtttttcactccttttaatttgccctacatagccttcagcactggggcatttaggtgcacagtaaacacttgtggtttatctatttgccacccataattgtaaacagacattgcctgtacatattgactgccattttcgctgtgttttttttctttcattaaataaaggcttagctgtcatcactttgagtttgtcctcctcagttttccctgaagttaccctgaaacggggaggcaggggaggggggaggtcctttaaaatgcagtggattgtgcttaagttgagcagtgtatccagggagaggactaa

SEQ ID NO: 10211 - DNA, 6000 bp, Homo sapiens
cccccaatttttggaatatattttcttttcatttttggaatagatttataaagactttgcagtctctgccaaatttggcttctgggcccactttgattctgatctctacctcccttattgctgggcatcctgacatctcccacttctgcacagttaagctgccaactagagacttgacccaacaattgcaactggtaggaagttatttttagtaaagtgaatgaacacaaaaattacctacagatctatttattaggtggtttatgttaaaaaaatgaaaacctaaatggcagatagaaaattgattaaaatatggtaaattcatgtaatggaatactattcagacattaaaaataatgatggaaagatattcaaatcatgctaaatgaaggaatcatttaaaagatacattataatcccacttttgcttaactaaattatacatatatatgcaaaaagaaaatactgggtggatatacatcagaatgttagcaggttatctcgggaagattaagatgatttttatttgatcactttctgtattttttttttttacaatgactgtatcacatttgtgataagaaaagtacttctgaagttatttttcagaaattttactatatatgtaacaaatttttttcctccacaacttttatgtctattttagaagtattaaaataccagcagtcttttcatacatgctgcagaatcattttgaatcccaagaaagatcacagatgaataattactacaagagttttttattcagataagttaaacataatatatgtatatgtgtacataatgcactgtgttgctctactcttcgaaaaaatagttctttcttggaatacaatatttggaggccatagagcttaaataaatgtggaagaaaactgaagcaggtacacgagaaaagaatagggggaaaacactgagggcagaaaatttaatctgtcatgagaggcagaaacaactggaatcatagacatatgctgtagactttcaccatccagtgtggtggccactagctgtacatggctgttgagtacttgacatatggttgatcagattgagaagtgctataagtgtaaaatacataatgatttttgaagaaatagtacaaaaaagcaaaatatctcagtaatttaaaaatactgaatacatgttaaaaatgatttacatttgtctttattaactttaattactttcagatacttttttatacattgggaacatttaggtcttgatataaagtatgaaatagtaagcatccacatatgattagatatattagatattcccaccccccatgttttcctggagtaagtacctttctttgataggctagaaagtaaatagacttattctggtgggcaactcacttctgataaatttcagcagctaggacattcctgttatttttaaaagaatgacatttgaatagttgggacataatgattatttctcgtttcagatcatgtagcatggatatgccagatcagtcactaagtgggtagatatttgaacagatttctctaaatctgacttggctcttcattgataaattctactagtgtagagttttctgacactacagtgaaaggtagcagatccatcttttaatatatttaaataggagaaaggaggacaacattttacttttgtcgtgttaatgaaagatcctaacagactttatttccttaagtaaataaattctttcagatgaattattaccatctaaaataatctaagaaaagtaaattatacacctagtaaaatagcgttatcagtattttggttttctgtatacttcttggaattataggaggaatgtagatgatatttttcccttacagcttgactgtgtaagttatttttatgctggccgtagaatatatattacatgaccagaaatgaagattccattacattacttagtacaaattgaaaacaattagaaaatgtatgctttattcttatctcttttataaacaagtattttaatacattattatggcaaggagtgtagtggtacttcctttgtgtacttgtgtcagtggagctaaaacatcttgtcaattttctattaaattatcctttgatttgagatatggcacagatacctgtttccttccacaagacagaaaaattagattccaagataattaagatttgcccaaaacccaaagaaaagtaattggaactaaaactagaattctgtttttgggacaattggccatttgtagcaaaggacagcagatcattggttaagagcataaacttgagccagattgcctgattcaaattccggcccatttagttcctaagcatgtaactgtgttaaacatcttgacttttgtggctcacttattgataaatgggtataataatactatttactttagaggattaaagaagttaatatatgtaaagcatttagaacagtgaatggcatataatgtaatatattaatatattaatattaataagactaatattaggattaatgttttgttggtattaataaaataaatatatgctatacttatcaaagatatataaagatgaaagtataaaacactagagtaaaacatggttttatagttttataatcttgaaatgaagaaacctctactaagtatgatttaaaaatctgtcaagcataaaaaaagaattttactacataatcaagaaactatagcaaaagataccatgaacaaagtgaaaacataacagtaacctgggggaaatacttacagcacataacattaggctaattttctactgtgtgagaacagctagaaatcattaaggaaatcgcaatgctacagaaaaagcaaacagcagagaaagacacccaaatgagagtctcagcatcattcaaagttaactactgtaaactaaagtgtttctcacttttcagattggcagagattaatatatagtcagtattgggacaatgaggcaatatgaagcattattgatgggaggtataaattgatagaccttttaagagatatttgccaataatgtcaattttaaaaacataaaccttttgaacttccagtttgacttctagaaatttgtcttatagcttcatcataaaagttgacctcataaatatagattagttcaaccccaagatattcatcaatggagatttggtgaataatgttatatctctacaataaagtactatatgtaaatttttaaaagaataatgaggatttatatatgctaatacttaaggatattcagcatatattaagtaaaagcaagttgcggaactgtaatatcctttttgtgtgtttaaaaaatcaagtaaattatatacatgcttacatatgcattacatagatacatggatatacagaggatgcataagcattaactgtaactatatctgggaaataggatataagctactaggcagagatttttaattcatactctttattgtttgaattttttctacagtgggtatattgttacttttctagttaggaaaaataaaaactgagaaaaaagttttagctgtgtgcagtggctcatgcctataatcccagcattttgggaggttgagggaggagagtcacttgactctaggagtttaagaccagcctgggcacacagtgagaccctgtctctacaagaaaataaatttagaaacattggctgggccgtggtgtatgggagaccagcctgggcaacacagtgagagcctgtctctgtaaaaaataaataagtaaaaattagctggtcaccatggtgcacgcctgtggtcccagctgctcgggaggctgaggtgagaagattgcttgagcccaggagaacaaggctgtagtgaaccatgatcatgccatcgcgctctatagccatcacactctatagagcctggggtcagagcgagaccctgtctcaaagtttaaacttcttccaggatgggtatattagttactgatagctgcataacaaaataccccctaagcttaacaacttgtaaaacaacaactatttatttcacagtttctcaggaagataaacttgggagcagcctagctaggtggttctggctcagggtctctcatgagataacctgttggctgggctatagttatctcaagattctactgagtttggaggatctgcctgaaagctcagtcgtggttgttggcagatcttagtttctctttggctgttggccagagagttaagttcctccttgcatgggcttcttcatagggctgttcacggcttggcaggttagcttctttcagactggggtatctgagagaaagagagccagagctcaagactgggctaacatggaagtgacatatcatcacctttgccgtatgctactgttcatacagaccagtcctggtacattgtgagggaggactacaagggtgtgaataacaggaggtggggatcattgggggccatgttggaggcaggctaccataatgggtctataacagtgtataccttttgtaataagttgggattatggaaaagaaagttaattgcttcaatatttaaatgggggctatttttaaaaattagttatctctttacaaatacctgtaaatacttgctttttcaggtccagcccagaatcaaatgcaggttccatctggatatggattgcatcatcaaaactatattgctccctcaggacattactctcaaggacctgggaaaatgacctcattgccattggatacccagtgtggtgattactactctgctctctatacagtaccaacacaaaatgtgactcctaacacagtgaaccagcaaccaggagcacagcagttgtacagcaggggtcctcctgcccctcatattgtgggatccactctaggatctttccaaggtgctgcatcgtcagcatcccatttgcatacgagtgcctcccaaccatactcctcttttgtgaatcactacaatagtccagccatgtactctgccagctcttctgttgcgtctcagggatttccctctacttgtggtcattatgctatgtcaactgtttctaatgccgcgtatcctagtgtttcatatccctctctgcctgctggtgatacatatgggcaaatgtttacctcacagaatgctccgactgttaggccagttaaagataattcattctctggtcaaaatacagctatcagccatccatcgccacttccacctctaccatcacaacagcaccaccagcagcaaagtctttcaggatacagtactctaacgtggtcatctccaggccttccatcgactcaagacaatctcatccgaaaccacacaggatccctggctgtagcgaacaacaacccaaccattactggtaggttgaatgaaaagttcaccaaaacatgtttgaaaatcagtgcattcccaattaagttattatttacatgaaggttagaggtgatattgcctaatagaaaaactggaagtttgctaatttattgtggctttttgtagcacctctttgaaccctttcttctcatccattcccaattagccacccaaccatctgccttgtctagcttggttccttgccatgatcagtcaacatttattgatatattttatacatctgcaatagttgtctttaatgtgaattagatacagggcaaaatggaagggtctgttttgaggatatgttggccactattttctcttttatactagttcaaccttgggacagttgtttttttagccagagccccacttacttagaaaaaaggatggtttgcagcagtgcactggtttccccaagttagcccctattagtgacttttgcagaagacatctttcctgcacgtaaacagtgtttctcattttcagattagtaagttaggctgaaagatggggaagggaaaggaagatgcatgaagaataccctggtattcagcccttctgaccttcctaaaccaaggtgttgttaaattttttcatttaaaaattatgtatgtaagacgtggcttg

SEQ ID NO: 10212 - DNA, 6000 bp, Homo sapiens
attcacactgaaatgttaaatgacttccctgtggtgagtggtagacacacctattaaaatgcttttggcttcctctcttgaaagcaagcatagaaataatttttaatagaaagaaaaaagggtagactgataatgcagtttgtgtagagtcttcaaatatttgtacattctttgaattttggattttcttcaagattctggcagcatgttactccactgccagaatcttgtagtcaaatagtagtagtatcctagaagccaaaagagaatttagagaaagagagaatcactagtggctactgttaaatggaagtccaaacagataagtggaaaatgggcatttgtatgaattttgggaagcgttagtgcccttaacagtaagaatttggttagaattgtggtggattcaaaggctgacagtaaacatctggggagtaagtggagaccagcaaatagagactgatgttttaagatgcttaactccaaaggaaggatgagagtaaggctccagctccagggatgtgccagctgaaagctgtagaattacctacttttggtagaaatctttgaaaatcctgaaaaatataagaaaaggaaagaaaattgttcaagtccataaccttaaaattgttatcagtttcatctttactttgttatcattataatcactttatatatacatatatatcatatacataattttatttctgatcttcttagtgttatgttacaagtattttctgatattaaaattattttcaaacattatttttgaagttctataattttccatgataaaaatatagtgtaattaaattaatctactgttggctttatagtggtttctggctgtttgctgttggctatgaatgcaatggacatttttctacataagtattggtatctctgtagtgttataaaataatatgccagttgtatttcataacatttacaccagtttacattttcaccaacttcttaagactacactgtgcctttgcaagagttgagcattatcactaaaaataacatccttgccggttttataagagacaagtctaatttgttcatttgttcagtcattccactgtagccctgtcaatgcctcataccacttttcagaactcatgtgtatttattttcttttatattcttcactcaaatttccagtggagcttcgggagaaaaggaatggaaacacttgttttaatctgccattttaaactggaaacctctgcttgctccagatgttctaaacattccaaaaatattaatgattgtgcatttaaatctaatatttgtaaaagcaattgtttgctttgctttatgcttatttttttctctttccagataatcctttaaagctaaacatttttaatggatttatctaaaaacttttaacactgtgctattcaatttactttaaggaaggtttaaggtaaaaaatatagtgattttatttttcaaatataaagcaaatttttaacactattgaataagtttttctttcctcatctatttgtggtacttccttcgtcatctattaggcttatatttattcagggaattccaataggcttcctacactgatgcattgatttcatgtagaattcttgggctaattccagtttttaattattgggttttaaaatatgttttaagatttatatggatatcccaaatcattactgtttctttttcaaaaatgtattctctcttctttttatatttttccaatgaacataggtataattttgattaaatttcgaacaaaacccaacaatcatccagtgggatttggaagaaatgtatcagtctatttataacatgggaaggattaacttttagaatattttcttttgtgaaaacaaaagtgtttctatacatttagaaaatattcctgtgtatatatcttcaggggaagtctggccatgttacaggcaacaaatattctatgttggtaatgtaaaaggtatattgtacactttattgttattgtgaatgaagtattttttcatcatatgttactttaaaataatatttatttttatttcagtgagagtaacacatgcgcactgtggattcctttgtgaatacataaaaggaaaagttaaaactcttataattcacactatccagagaaaaacaatactattttggcaagtatcattcccatatgtgtacacatgtatatattttgcaaagtgctacatgatgtttataatgtttagtatcctaattttcagtcaacatttaatcttgaatatcttatgccatattctttttataagatttttctagtggctgcattatatgaatgaatgacagtgtatttaaccaatccccagttgttgagaatttaacataacttcaagatttgcagatggtaataatcctctcctgcactaaatgaaatcaggagaatacttagggaagtgaaatatctattatgtatgttgcaggttgtatttctgagatatcatttgtcattatatttgtttatggtgcatttgatatgtctgcatattttatttgtattgcttagtttgttttctattgagtatttttcaggtttctttaatataaataatattggctattataataacataattatattaaaatataagataattatatcttgacaatgctattctaaaatataagcagttcattaaaaattatgtgatttctttttactttgtagtaattactgaaataaaatattaaaattaaaaaggaagaattaaacaaaagcacagtgaaagcatttgttctctatgatcatttttgttttaagttatttatgatagataaagtagttttaactgtaactgaacagagtgtacctatggtctgctcagctagatccagaacccagtggagagaccagttttctaccattgttccatcatcaagtactcacctctcgaatatgcaagaagtgacagcagtgagcagtagctgctggaatacctacctgttttggcattagtcttatccctggagttcatatttccttgtaaaatatctcatttttccttcttcagatttgtgagaaggcaacattggagagacacataggtgaggcagtacagtagaataaacatttggaaggtttttctaagatcagctccttaattttctttcttcactgatcttgtaattgtagtcaactttactatagaatcagtatcttctccaaagttaattatttttaaagccttataataatgtaagtgacatttatattatatgtttgtaatgtgcattacttttacttattcttaatggtataatttcaactttcaaatagtttgaaacttcccttagagtaggagaggaaaaaagcatctggaaatatatgtattttagagttcaatcttgttattggaagaatctattagttgcctgctattgatttctttacattgcttgtagtgtttgaatgtttagaaggtatagttgttaaaactgcgtttagatgttgggaatttatacaaataggagggttaatgtattctaaggagtaaaaatagatatcaatttggttatatgtgtgttggtgatgtgtgtataaatctattttgagatttttgaaatgtgtccagtttgcatgagcaattgtttagatcttttttctatttgggggtctaatttagagtctaagaattcattatattgaataggttggtgggtgtatttgcacactatatggtccccacgtatagtatatttatctctaaaaacaataaaagacaactttattacacatatctgttaacatgaaaaggtaggagaagtactggccctcaagtgtacaggcatcctctgacttgacatttgcacctgagttaaaggtacaacatagaagtgtggtctgagacataatcattcatcagtcctttttcaataagtatttactgagatccattaaccctcttgagcttttctattaaaagtttctcttttacataatgccctgaaatgcatcagcaaattgacatagattacataaatatagattgctaggacaactatggtatttaggtaaagggaaaatatatgttaaagatcatttttcctctggaaaaaagtcttttctgcagaattaccaaactaccattcaaaataattattttctaaaacaatctttctttggtatgctttgattataactgcaaatgtaaccattgaattaaaatgatttaaataagagacacgtgctgatatacctggaaattaaaaaggtcagctcttcttcctgggattaacattgacattcaattagaagatgaacagatgttccatagatatttcatagatattcttccaaaaagatatattatgtgtcattcagccttatcaaaatgttatttcaaatgtttgaaaatagtttactgattcaattttcttcccaaacagatccatttttaatatatttcagtttatgtcaactttgctttcaattctatacttaaacataattgatctttcaaaaataaagaggtaattagaacaaatatcaggataatttttaatagtgattttttttgtatgttagtgtataatactatagaatgcattctttttttttattattatactttaagttttagggtacatgtgcacaatgtgcaggttagttacatatgtatacatgtgacatactggtgtgctgcgcccactaacttgtcatctagcattaggtatatatcccaatgctatccctcccccctccccccaccccacaacagtccccagagtgtgatgttccccctcctgtgtccatgtgttcccattgttcaattcccacctatgagtgagaatatgcggtgtttggttttttgttcttgcgatggtttactgagaatgatgatttccaatttcatccatgtccctacaaaggacatgaactcatcattttttatggctgcatagtattccatggtgtatatgtgccacattttcttaatccagtctatcattgttggacatttgggttggttccaagtctttgctattgtgaatagtgccgcaataaacatacgtgtgcatgtgtctttatagcagcatgatttatagtcctttgggtatatacccagtaatgggatggctgggttctagatccctgaggaatcgccacattgacttgcacaatggttgaactagtttacagtcccaccaacagtgtaaaagtgttcctatttctccacatcctctccggcacctgttgtttcctgactttttaatgattgccattctaactggtgtgagatgatatctcattgtggttttgatttgcatttctctgatggccagtgatggtgagcattttttcatgtgttttttggctgcataaatgtcttcttttgagaagtgtctgttcatgattttttttttagacaaagtattagatcagatatttttggggaaaaatgctttgtgattgcttgttttgaatggtgagcattgtattttgttttaagttgttttctggttgttattacagctatgaagtcttacactccatatttcattctcctgtggagtgctgttgggatagcgaaggctgccaaaatcatcatcgtgccgccaattatgtttgaaagccatatgtacattttcaagacgctagcctcagccttgcacgagagaggccaccatacagtgttcctcctctctgaaggcagagacatcgccccatctaatcattacagcctccagcgctacccagggatctttaacagtaccacctcagatgctttcctacagtccaagatgcggaatattttctctgggagattgacagcaatcgaactgtttgacatactggatcactatactaagaactgtgacctgatggttggcaaccatgccctgatccagggtctgaagaaagaaaaatttgacctgctgctggtggaccctaatgatatgtgtggatttgtgatagctcatcttttaggggttaaatatgctgtattttcaactggcctt

SEQ ID NO: 10213 - DNA, 6000 bp, Homo sapiens
cttttcattgatccacaggtccctttatacactgccgctccattctcagccgcagacgtgatgctaaaatcattttaactgcagcggttttcgcttggctttggccagtcttcaatttactgcagctggaaaaggattagccatttttgctggaatcctttccttctaagcgctcaaaggcaggacccatcttcatgaaagagccaagtgcgggggccggggggacccggcgttgcggggagttggggcgcggaaatcagggcagtagacgtgcattcgcgggactctcagaagcacgtctcaggctactatcacgcccatggacactagccctccttaactccttgccaggaggaaatggcaacgtatctccaggtcggaaaacgactctacttttcccgcaggttgtggtggtgtattcttgggtcattcattaccagaaagcagcaaaggaccttcctatctctttgcataaaaaggagattgaataggggcttctttcgtgaataaacaaccaattccttgctagtggcccattaattaaaaatatatatttatagatctttccttagagaactggcattctatccactctccagcattaaagagttcgcgctgtgttttaacttcacaagaactagctatgtggatgtgccgcgttgcccctgcgcctccggaaggggcactcacagctggtcaagcgcgtccttcggaactcggggaggctccgttggggcttacacagagctaagccctgggccagggaggatggatgcaagtaccgtgcatgtgcaaacgtgttcgcagatacccgcagcggtgcacactcgggcccctcgtgtgcacgggccctgcccaccaccccgcccgcgttcgccgccgccccactgtcctcatcccgcgggctgaccccaggattggcagaaatcagtggtctaatctagcatggtgggtaaagggatcgatctccaattgccaaaaaaaaaatagaaaatagccggtgttcccagccgctgcgtggcacttggccgcacaaggcgcagggatatcagaggcgctttgcagcgcttggcggtgctgtgtgccggatgccccagagcccggcgttaggatggcgggcttgtaggaagcggctcaaatcaactcctcagtcactgatgaacgcgctcacggctcgaagctaggtcctcgagtgagttaatctacttggtaagtattttgtgaatatgtattttgggaggaaagaagcacgtcgaacgcgtctgcccgtctgtaagcgctgtcatccccacatcctttagcgtgaattcctccgctttttaggagtcacctccaccccctactccgtatgcttcgcgcctttcctcacggccccgtcagaccccctcacctttagattgacacatgccatataatactcacttttaaaatgccctgccagtctctgctagggtcccttaattaggtaacccttgccaattagtgggccctgcgctactttttcccttctcgatgatttatttccatgatgcgtattagggaaaataccttaaaggaaaaagaatgttagcatcattggaaatcccgctcctaggagaggatatcgcagctgttgctattatgttttcgcatttgctgatgcaaacaggggaacctctctattccctccccattacctgcggctggggactgggaactttccgcggcattgtccccagccagcgcctcgggacctgcggggctgttctcgctctcacactcacactcaccccggccgctcgggcgagagttctgtcccgccccgcccggctgccgcgtgacgtgtctgtttggcggccagtttggccaatcatcggcagctcggtgggtggtgctcctgggcgattggttggcagaatgagggcgctgcgcaaaaacggagaagccgagcgctcggagctcagaaactgccagcccagaccacaggctcagaggctgaagcaggaggaaggaaggactggaaggaaaaagagacaggttagagggaaagaggcttgggaagaaaacagcagaaaagaaactgctcattacacttacagagaggcaagtaacggtggagatgaggacagagggaaccaagactctgaaagacaaaaaatacaaatagagcgaaagaggaaaaaaatgtcaagaagaacatccatccggagaaatgaagagaatgaaagttttaagctgcagagccgttctgtgcttttccggcacaaaattatatcgctgattttaagcccttttgcatttgccagccgttgacattaagaggcatgtttaacggtgccaacagcatctccttttccttctcctcttcctcttcttcttcttcctcctcctcctcctctttttcctcctcctcgttctcctcccatcagcaagaagacaaaccgaggacagtcttgaaatatcgaaatttcctctttgggatttgccagcgccaagactgtcggaataaaggacgctgactattgtattattgttattttattaattagtcagtggaaagattacagatgaggaaaggggacgcctgtcacccttcctgtgctaagatttaaaaaaaaatgaggctggattgcgggaagctctaaaatgaagcaaaaggagtaagatttttaaagacagaaagccacaggagcccccacgtagcgcacttttatttgtattttttcagatttttttttgtttcgtggtggtgggggaggtgattgggtggctgactggctgcgggaagctacttcctttccttttggagatgattgtgctattattgtttgccttgctctggatggtggaaggagtcttttcccagcttcactacacggtacaggaggagcaggaacatggcactttcgtggggaatatcgctgaagatctgggtctggacattacaaaactttcggctcgcgggtttcagacggtgcccaactcaaggaccccttacttagacctcaacctggagacaggggtgctgtacgtgaacgagaaaatagaccgcgaacaaatctgcaaacagagcccctcctgtgtcctgcacctggaggtctttctggagaaccccctggagctgttccaggtggagatcgaggtgctggacattaatgacaaccccccctctttcccggagccagacctgacggtggaaatctctgagagcgccacgccaggcactcgcttccccttggagagcgcattcgacccagacgtgggcaccaactccttgcgcgactacgagatcacccccaacagctacttctccctggacgtgcagacccagggggatggcaaccgattcgctgagctggtgctggagaagccactggaccgagagcagcaagcggtgcaccgctacgtgctgaccgcggtggacggaggaggtgggggaggagtaggagaaggagggggaggtggcgggggagcaggcctgcccccccagcagcagcgcaccggcacggccctactcaccatccgagtgctggactccaatgacaatgtgcccgctttcgaccaacccgtctacactgtgtccctaccagagaactctcccccaggcactctcgtgatccagctcaacgccaccgacccggacgagggccagaacggtgaggtcgtgtactccttcagcagccacatttcgccccgggcgcgggagcttttcggactctcgccgcgcactggcagactggaggtaagcggcgagttggactatgaagagagcccagtgtaccaagtgtacgtgcaagccaaggacctgggccccaacgccgtgcctgcgcactgcaaggtgctagtgcgagtactggatgctaatgacaacgcgccagagatcagcttcagcaccgtgaaggaagcggtgagtgagggcgcggcgcccggcactgtggtggcccttttcagcgtgactgaccgcgactcagaggagaatgggcaggtgcagtgcgagctactgggagacgtgcctttccgcctcaagtcttcctttaagaattactacaccatcgttaccgaagcccccctggaccgagaggcgggggactcctacaccctgactgtagtggctcgggaccggggcgagcctgcgctctccaccagtaagtcgatccaggtacaagtgtcggatgtgaacgacaacgcgccgcgtttcagccagccggtctacgacgtgtatgtgactgaaaacaacgtgcctggcgcctacatctacgcggtgagcgccaccgaccgggatgagggcgccaacgcccagcttgcctactctatcctcgagtgccagatccagggcatgagcgtcttcacctacgtttctatcaactctgagaacggctacttgtacgccctgcgctccttcgactatgagcagctgaaggacttcagttttcaggtggaagcccgggacgctggcagcccccaggcgctggctggtaacgccactgtcaacatcctcatagtggatcaaaatgacaacgcccctgccatcgtggcgcctctaccagggcgcaacgggactccagcgcgtgaggtgctgccccgctcggcggagccgggttacctgctcacccgcgtggccgccgtggacgcggacgacggcgagaacgcccggctcacttacagcatcgtgcgtggcaacgaaatgaacctctttcgcatggactggcgcaccggggagctgcgcacagcacgccgagtcccggccaagcgcgacccccagcggccttatgagctggtgatcgaggtgcgcgaccatgggcagccgcccctttcctccaccgccaccctggtggttcagctggtggatggcgccgtggagccccagggcgggggcgggagcggaggcggagggtcaggagagcaccagcgccccagtcgctctggcggcggggaaacctcgctagacctcaccctcatcctcatcatcgcgttgggctcggtgtccttcatcttcctgctggccatgatcgtgctggccgtgcgttgccaaaaagagaagaagctcaacatctatacttgtctggccagcgattgctgcctctgctgctgctgctgcggtggcggaggttcgacctgctgtggccgccaagcccgggcgcgcaagaagaaactcagcaagtcagacatcatgctggtgcagagctccaatgtacccagtaacccggcccaggtgccgatagaggagtccgggggctttggctcccaccaccacaaccagaattactgctatcaggtatgcctgacccctgagtccgccaagaccgacctgatgtttcttaagccctgcagcccttcgcggagtacggacactgagcacaacccctgcggggccatcgtcaccggttacaccgaccagcagcctgatatcatctccaacggaagcattttgtccaacgaggtaaggctgaagcgaaaggaccaccatctctcatctcctccatcagaaagcctcctctagcccggcccttgtatctctggtgcactgtatctatttttaggatattagcttatgtgtatcgttgtgggagcagagatgggcggtcaccttctcccactccttcgtgtgtaacctaactttcgcgttgttccaccctttcacatttattttcattccgtccccttggtactttgccaccttggagctccctcctttgctcttccatcctgtcagtcctttcccttctcagtaacctgggcatgaagggaaactgcgtgaagggagagggaaatgtggaggagggacttactttctagcactggcaaaggtcttttttctttgcgtctgtcccaggcattaataaagttggctctattttgctttgtttaacgatgcttttagtcgcgtgtacaagtaagctatagattgtttaactttacacagttgtctaacctcgaattcatgttttagtgaacaagttaccagatccttctcctctgaactcgggttgcaaaaaaagccttcagttcggctctggacag

SEQ ID NO: 10214 - DNA, 6000 bp, Homo sapiens
caattagacccatcataataatatctgatatggtttggctgtgtccccacccaaatctaatcttgaattcccaagtgttgtgggagggacacagtgggaggtaattgaatcatgggggcaagtcgttcccatgttgttcttgtgatagtgaataagtctcacgagatctgatggttttaaaaacaggagttctgctgcacaagttctctgtctttgcctgctgtcattcatgtaagacatgacttgctcctccttgccttccaccatgattgtgaggcttccccagatatgtggaactgtaagtccaattaaatctcttcctttgtaaattgcctagtcttgggtatgtctttatcaaacatgcgaaaacggactaatacaatgtccttagaggatatcacagaaaaaaactagagccctcccttccggattccaacaccctagaattaaatgagataaaagaatgacagatgcaaaagaacaagtgtaatgtatgttacaacatgaaataattatgaccaaagggcaaatattctagattattctttttgaaagttaaactaggtgaactttaaaaatgcctgtgatttctggtttaaactgctatgtagattaaaaactttataggtttttaatttatctttaaagaaaaaggttgggttggcactgtggctcacgcctgtaatcccagcacttttggaggccgaggcaggcggatcacaaggtcaagagattgaggccatcctggccaacatggtgaaaccctgtctctactaaaaatacgaaaattagctgggcatggtggcgtatgcctgtagtcccagctacacgggaagctgaggcaggagaattgcttgaacccagaaggcagatgttgcagtgagccgagatcatgccactgccctccagcctggtggcagagtgagactccatcaaaaaaaaaaaagaaagaaagaaaaggttactgaattttaaaaaattaatcctatgtgatccaatttcagttccactcacattctttatgagtaaagtctggatgttaataaaatgaaagtaattctacgtaatctgacttaaaggcaagtcactgtagagggaaaccaggataaaaataagtgtacttaagtcaagtgtgtagtttgtacctacagaggcaaacacaggcagcttggttcttaagagagctgcccacttggagttctcccaattaagaagttggagacaaaaatccatttttttttctatagttgtatgagacttttaggtatgaatcagcttcagttgaactacattgaatttttagcatggtgtgagataagagtatatttataacactgtaggatgactatagttaataatattatgtagtttcaaatagctagaaggaggatgttgagtgttctcaacacaaataaatgataaatgtttgagatgatggatatgctaattaccctgatctgatcactatgcatgatatgtatcaaaacatcactatgtaccccatgatactgtacaattgttactttgaactaaaaaatttttaaacatttgaaaaagtaaatgtaactacaaaagaccagaatggtacactgacctttcagattaactttagatattagacattgtattttcaaaaaacatatcaacaataagtattgctacaaatcattgatgagatagtgtgcctatgtcacttaaaatttctctgcaattgaagatacattattaaaggagccattgattttcaacaccaattgctgccaaactcctgctcaatctcttcttgttttgctatggaattactcctttactgcagtatgaatgacttcttttttccttttaaaacagttattatggatcctattaggttttctaagtactagacagtgattgatcttctttttcttataattactcccctgaaaattgactagcagttaagacactctgaagggcctgagtaatttgatttttgtaggcccggtgctccatgaacccttggaggggtttagagagcatctcattccagtctagcacaggcaggacactatacacatgagggctctgaggcctcaagagggtcagcaatctcacagagcatcagatatgagtatttaaagcaaagcatgacattaaaagttatttgtcttcatgtctctaaaatgtctacctatttaggatttttgaaatataatagcaacattcattgctgctgtggtagttggtagtactgatgcttctcaatgctggtctgtttgatgatagcaatacccaatttctcagtacatttcctatatgaatacagtggcactgcagctttcttctgaatttctgaatacgtagccaaaggctatagtcatatttccttttgttaacaatcctgggtcatccaatattcatatctattattgtctcataataataaattaggatctaaagcaaacaagattaacttataaagtagctgctatatttcttccaagtgactcagaagtaacatgccttgctgtttattgtttctatttaaaagtggaatatgctttatgttttgtgggcatatcaaatgttttactcatttcttgatatcattttatcatttctgaaatagacatttggggtgttttctgctttgtgagaggcatttttgaacaaatgccaggttttagtctttgtttttatgattataaaccacttcattggtgaacagccagaggagctgagctctcagaaagctcccaaatctcctgagtgtgagtctctgtgtgctggctgcatactgactgtgtccattttactcaactccaaaacacttgcctgcttcctgctcacccctgtggctctgtgccagtcctcagaacgtgtttgtgagtaaaggtatgtcctttgtctacactgcattcttggatgactgtgctgtcaaacgagaaatggaaaagcccctctgccttactttgtttctctgaataatacaaatattgcagatgatgcatcacattatgaattttcatagaatactgcaatgtatttgattctgtttaattctcaaaatagccctctggatattatttccattttagaaagacggaattgaggctcagaggtggcaagtgacttgtctgagattattttgttgtaaatggcacttccaggcccttaactcaggatttctgcctttctgcctcctacctctgcatcacagctgcctcaacctgttgttaattttatattaagctgtattaattggggctaggagtcttcataatgctaaatgtaaattctttgttttgttcaatgttcttattttatggttggcaaacaaaaacaacaaaacagcattgacaacaacaacagaaacaaccaactgaagctgcagcttttaatctttctaaagacaataggctaaagtgaggtcctcataataagatgctagtcaccaggaaggaagccagggaaaatctcctcccagggggtaattgatccctattggcctaacactgcatgtagcactgagttaggaggctccatggagaagtgtctgcttcttttcctctgctgtcagaacaaagttcacaaacaactttgttttccccacacctttggagttagctagttagggcccctatttatgtccaggggaccagacctggacatttgtaaaagaactgaatatagatggatagctaagaaaaaaacaaatgttaagattatcattatttatagcccaatgatttagtaatctaaaaaaatccaagaacaacaaaataatccctaagaaggacaagaattttaaaacatgcagtttagaaaaccaaatttctcaggcctagagctcaagtaaaagaaaatctgagataatgaagtctggaacactgggcctgcattctgctcctgactctgtgcccttgggtaagacattgaacttccccaccccagattcatcctacaccctaaggagggtgtaggattttgtagccttcctagtgatggcatactattaatcagaaccttaaccagctctattctcactatcccagtaaaatgatgttaaaaattagacctcgtgacatgagagaagaggggaaattaattacagattacaaagaaattgtgggatctaagtttagggtgaggtgttttattgaacctctagggttggtcatagcacctgccatatagcaggtattcaataaatgatgtgtaatgggtggttagactgatggaaaggcaggccttcccagtgacggtaaaggacctggggcaaaagagacctgtggttgagtcctgatccccacacattagcacactgactagacgaagttataagcttcaatttcttcctgtgtaaaatggagataatacctcatagggttatgaggattaaataagaaaatgcttagttcagtgcctaatacacaggaagcacaccgtaaatattagttattattattactaatactgtgatcatatcttccatccaaagacttctctgaggagcagggggcatccagagataaaaagcctgcaggtgggaaatctgttagccttctagggcgttaggtttctgtggaactctgcacctcttccctgtcctagttcttaagaacagaaactctccagggacctctggtgaggtagccgtgggaagatgaggtgcagaagtaagctgggacctgtgagcctcaatttcggcctcttctgcgctgagacccaagcggatcttgcttggcctgtatgcgttactgggggaaatggacgtgggcctgagcgcggcaggtgcgagggcgctgccccggggccgaccaccctgcggggacactgtagctgtcattccttcttctgcaggcgggtaggggaagcggtggccaaagtgggagtcgaccgctcagcacagtctgtctgagtgttgaccaggaaagtccaggctctttctaaatctcgccgccagacctggtgacgcattcgcatgtatttaaggcgtttgcacgcagaacgttatcacagaatgtagccacctttcttaacggtccgggaaaccagaggtctctccagctactcagggtagaggaatttctcctatctccatgtgacatcttctgatttagaagaactaatgttagatttctcttgggcctttccacctacagctatagtcttccctttgtttagctaaaattgaggcaggtaggaaaatattattgggggcataagcctattagtgtgtaaacgtatttttatgaagtgtgcctccagggagccattaaaaactgacctctcaaccacagaaatagatgagattttgagaacattgagaagctgccttttgcaaagtaaatttgcaatggtccttgacgaaggggggtcgggggcggggagaagtccagccgagagaggagctcattccacgctatatttttgcagttgaaaagctgcctaatcatcgctaaccgcttcccgcataagagttctgggaagacttcagaaacaaggcaaatgaagacttttcactgcctccttcgggctgtcgcttccggaagccgaagtcctagcacgcagagcagcaggagagggttactttcaggcaattccactgagcaaaataaatcacttaatggcataacgttctggcttaaaaaattggaatttatcagaggcaaaaatatccttcaagaaactatggacactccgcgccctattcatttccatggcagcagagtatctgcatcttgagccacctatacagattcatgcctcgtatcgctctcacctcctttctttttgaagtaaagccctttcccaagaaggcggccagaaagtggaccccaccgggggaaaaagaaaaatgaaacgcaaatcagcttggcactgcttgcgtcttccaaaacgcggtgggacaaggctattgagtctatagctaattctttcatgtatataaaatgtatacatatgtatatatttttatatacataaaagaattcatatatatgtatatagctatgtgga

SEQ ID NO: 10215 - DNA, 6000 bp, Homo sapiens
aaaatgtggaggtgaaagatattgatgatcctgaccctgtgtaggcctaactaatgtgtgtgtttgtgtcttaatttttaataaaagagtttaaaaggtaaaaggaaaaaaaattttaaaaagaaagaaacttatagaaaaatgatataaaaaccattttttgtacagctgtacaatgtgtttgtgttttagctaagtgttattacaagagagtcaaaaagtttaaaacatttaaaagcttataaaataaaaacattactgtaagctaagtttaatttactgacgaaaaaatttttttataaattgcgtgtaacctaagcatacagtgtttatgaagtctatagtagtgtaatgtccttgtccttcacattctcactgctcactcagtcactcaccaagaacagcttccagtcctgtaagttctattcatggtaagtaccctgtacagatataccatttttaaatattttatactgtatttttgctgtactttttctgtgtttagatgtgtttagttacatacatactattatagttgcctacagtgttcagtatagtcagtcacatgctatatagctttgtagcctaggagcaatagcctataccctgttgcctaggtgtatcataggctgttcaattagtttgtgtaagtatactctatgatgtttgcaaaagggcaaaattgcctaacgatgcatttctcagaaagcatttctgtcattaagtgacttgtgactgtattttacacaagtaaatatttgctaaatgtataataataaatctcaaagccaagaattagtttatggaaactgaaataaagtatgtactggaacagaacctaagaatataatcatactaatacagtaatatgcttaatataattattgtgcaaaacacagggagaatttccataaataatactctaaagcacagtggatattttttaactgtcatgtgatttatcatgtgattattgggttatattaatcccagaatttttatttctcccaggagtgaacatggaaaggtttgcagaagaagcagatgttgtaatagttggtgcaggccctgcagggctctctgcagctgttcgtctaaaacagttggctgtggcacatgaaaaggacatccgtgtgtgtctagtggagaaagctgcccagataggagctcatactctctcaggggcttgccttgatccaggtgcttttaaagaactcttcccagactggaaagagaagggggtatgaaaaattgttttttatacaaagtctaatcttttgtaattgtatttcagtaattgttcccaaattactggaatataggaaacccttttcatgtaactctatcttttttttttttctttttttgagatggagtttcactcttgttgcccaggctggagtgcaatggcgcgatcttggctcactgcaacctccacctcccaggttcaagtgattctcctgcctcagtctccctagtagctgggtttacaagcacctgccaacactcccagctaattttttgtatttttagtagagacagggtttcactgtattggccagactggtctcgaactcctgacctcaggcgatccacccaccttggcctcccaaagcactgggattacaggcatgagccaccacgcccagcccatgtaactctaagggaataattatatactttttaaattaaaaaaaaatttatatcagaattgtaatttatgatattaacaaatatttttgtgtaatgctttctacatgtatttatgtaatgggtatatgagaagataacttgagaagacctttgaatatttcttgggaggcattttgtattttgagggtatttttaaacttgttctttaagtctttgtatgattgttcttaataaagtaataattcctgggacaatgcaatatctaaagccaaagaggataacctaattttctgaagaaacatattaatatggcttcccataacctaagcagaaaaaccacaggtgtgatatacagaggaccaagtccaagttttattgtcttaaataaaatttgtatgaatttggttaaaatcttagattgtcaattttttcttctctaagatgggttatattatacctgtcctacctcctagattagattattcagtggttgtgaatatacttgcaaagatcaaaaattatataaatatctgtattttttccatatggaataaattgaattccaaaaatttcgtctgtctctcctttctgaaatatcaagctcccttaaactagaaatactttaattaggcccagttgaatttatccttttgatattatatcagaaatggatattattgaattaacactgacataatatcaattctaatagaaaatgtttttcatgttaaagccctttattgctttggcaccttttttttgagacagggtctcactctgtcacccaggctggagtacagtggcacaatcatggctctctgcagcctcaacctccggggctcaagtaatcctcccacctcagcccccttagtagctgggattacaggcgtgcaccaccacacccagctaatttttgtatttttttagtacagacaggatttttgccatgtgggctcaaaaccactagcttcggcctcccaaattgctgggactacaggcctgtgagccaccacacagactttggtgccttttaatatgtatagccagcaggtacagtgtaacaacatgttaattctctttatccaagaggaaaataaaacttctcttacctttcaccaaccaggaagtttcaacttaagagccaagcaacttggctaacctctccacagagacaaaaagacatgagggtcacgtttcaaaggtgtttccaagactcccaagaaatatattcctgggatgcaaaactggcaagaggtttatttagatttttaaaagattcccagctggccgggcgtgtaatcccaacactttgggaggccaaggcggatggatgacttgaggtcaggagttcgagaccagcctggccaacatggtaaaaccccctctctactaaaaatacaaaaattagcccagcatggtggcaggtgcctataagcccagccacttgggaggctgaggcaggagaaacacttgaacccaggaggcagaggctacagtgagctgagattgcaccactgcactccagcctgggtgacagaaagagacactgtctcaaaaaaaaaaaaaaaaaagatttctgtacatctcagacagagaaaggattcacagtgacaagttttataaaggaaatgccaaaagaaaattaggggggagttctttttttgtcatcagagtacattttatagtttttttgtatttatatttacacttgcaaatataaactaaaaacatttctttttcttcttttatttctaggctccacttaacactcctgtaacagaagacagatttggaattttaacagagaaatacagaattcctgtgccaattcttccaggtaaggtatagtgaatatgcatagaactatggaattccacagctggaaggaactacatttcatctgacgaaatttcctccttttacagacaagaactgagacccagatatttgaaggacttactcaaagctatacagctagctggtgggaaagcaggactagaactcagttcttttgtcttccagtctagaagaattgagatagccttgtaagccaagcaggaatttctaacttagtgctttaatgttgtttgtaatgtaataaattagaactctagaccaaaattgtagaaaataagttgaaagtgtgaccatcaatgtagcacttatgtagaaatacatattgattcgaaattttaaagtatttatgtttttgtaatgtcttatcaataaaaagtcagatttataaattaagcatatatttatagggcttccaatgaataatcatggcaattacattgtacgcttgggacatttagtgagctggatgggcgaacaagcagaagcccttggtgttgaagtataccctggttatgcagctgctgaggtttgtatagttttgttttgttttaatatttataggaactctctttttttaataagtggagaattttataaagttgaagaaataaatattttttaaaagccatgggattttagaattataagattagaaggaatctttaaagtatctaatccaaagagtacttgaattcctcatgttgtacccccatcaagtgattatccaacttatgattgatcaccataagggatgaaaaattgtagattgttggtaatctcttccttattttgaacagaacttacctatggttttatactatccagaacaaatctatgccctcttccaaggacaactttctaattataattattccctgctctctcttcctccctatctttactctggaatttttttttatttcccagtataggggtggtataggagttaagggaaaggtttgtctctgccctctgaaggttcaccagaaatgaactgacaatagacagagtaataggagaagaagcatagagatttatttaacatgcataagcacaagagaatgatgacccgataacccagtgaggtccaaatgcttatctacctttcagcagaagggaaggggaaattgggtgtttagcaatcttgaaaggaagtgaatgatttttagggaaaatgaatgcacccaagacacagaaattaacttgtaaatgattctctttggaatttgaatgagcctgagaggcaggcatgatcttatgaaaaagtgtttgtctaggtgtagttgcttttttctgttttcttttctgcaatagatattaacaataagatttcaggaatgggatggaagaccattgtgttctctttggcaggtccagtcttaaggtagagaatggaatatcagagaagagccgcatccagtgctttagaagagataggattgaaagacaggaggaggggaaggtcagagagaccttgaagctgctgctttggtttagcatgccagagtgccatattttagcctatcattttctgagccccaatagcagaaaggtgtgatacccttcctcacccatcataagggtcatagctgacactcctataacaaaagacagggtaacaagaaaaacataccgcatttgtttaatcaaagttttacatgatatgaaatccttcagaaataaaggccccaaagacccaggggaaaccatttttatgcttaggtacaataagaatggacagccatgttgaaatgtgattagacagaagggtatgatctaacggtagtagactgagagaggaagctaagcaaggcctgtctgttcacattctctttggcctttttgtgtagcatttcttcctccgaggtatggctggagcagaactcctctggagtgagagttttcaaggggaaagggagaagtaagaaaataacctttctaggttttatggcctgtattaagggagaggatttcaggtttctatgactcaaccttgaggaagaggaatcctggtttctatgacttgctttaggggagaaagagggatgggagaaggtaagaaagaccttgtttctgaggccttccagtctttcttcagttccaggtactcagcataggggctgagtgccaaggtaagacttccccctcaccctctgaaggttcatagaaaaattggctcacaagaggcaggttagcaggagaaaaggcatacaggtttatcagcgtgcatgaagggaatattacagagtgatgaccctgccacacaatggggtacagttatatgcctttcttggtagggaaaatggagatggagaagtatggatgactttagggggatagtaggtgatttttaggggaattcagtgggcttgaagaacatacagcaacctgggacaaagtctcttgagcctgcagaggaaacaatggtttctgacagaagcctgtccaagtttattgacagacttcagtcattcttcctgcaatatgagt

SEQ ID NO: 10216 - DNA, 6000 bp, Homo sapiens
ttctcttgcctcagcattccaagtagctgggattataggtgcgcaccaccacacctggctaatttttgtatttttagtagagacagggtttcaccatgttggccaggctggtctcgaactctgcctcccaaagtgctgggatcagaggtgtgagccaccacgcccagcctatatcctcatcttaaaatgaagaaactgaagcaagttttctcccagtgaatactgcattccagtttttgtaaactacttgctatactgcaatacaccatgatttgtcatactgcatttgcttttctctttgccctgaataccattcccacctaattaaccactccttcgagatggggcaacacagtgccactctggccctgtccatctgagaaaactaattgctccttctttttgttgccataatcttacatgtgtatacataactcttcaggtttgttcatgtctagagtacatgtactgtgtctaatttcgtatggatttgcaaagattcagaatgtttagtggtatattagtctgttttcacactgctataaagatatacttgagactcggtaatttataaagaaaagaggtttaattggctcacagttctgcaggctgtacaggaagcttggcagcttccgcttctaagaaagctcaggaagcttccaattatagtggaatgcaaagggggagcaaggcgtctcacctggtgggagcaggagcaagagagagaagcaggaaggtgctacacacttttcaccaaccagatgtcacaagaactcagagtcacaaggacagtgtgggcatgggggtggggggtggactggtggtaaatcattcatggaggatccaccccatgaaccagtcaccatccaccaggccccgcctccaacattggggattataattggtcctgaaatttgggtagggacacagatccaaaccatatcaagtggtaatatcgtatgttcttttatcatgctgcttataacagctttttttaaacccatgggcttttgtgacaacaatgcatctaggggcatgttcaccctttgatagttatcttgttgcctagaaaacatttaatctgaacactaggtatttcttttttgaatgtaaaacatgggtcggccacatggctgacaggccaaatccaaccctttttagtaaatcaagttgtattagaagatagccacactcatttgtttgtgtattatctacggttactttctcactacaatagcagagtcaaatagttgccacagagactgtatagcccaaaaagcccaagatacttactatctggccctttatagagaatatttgctgatgcatgatgtacaagattaagggattgagtattattttagttcatttagtgttgctacaacagaacacctgaggctgggtaatttatcaagaaaagaggtttatttattcacgattctggtggtttgaaaattcaggcttgggcagctacatctggtgagggccttatgctgcttcagctcatgatgggaagcagaaggggaatgcacatgtgcaaagagatcatcacatggcgagagaggaagcaagagagagaccaaggaagccagactctttaacaaactactcttgtgggaacgaatccacttctgtgagagcaagaactcaccccctcacctccataggaggccattaatgtattaacaacccaaactcctcccagcaggccctgcctcccagcattgccacattgggcatcacatttcaacatgaatgttggcagagacaaatcacatgcaaattatcactcaagtgtgtaccaatttggtcacatatattcatgcaaccattcattcatcaattaaagctttaaaagctagatatttgtcagctatcacagtgtcagcatattttattgctctatagctgctttttcttaaagtgaaccaactggggtcgggggcaatggctcacgcctataatatcaacactttgggaagccaaggcaggcagattgcttgaggtcaagagttcaagaccagtctggccaacatggtgaaaccccatccctactaaaagtacagaaattagccaggtgtggtggcgggcacctgtaataccagctactcaggaggctgaggcaggagaatcgcttgaacctgggaggcagaggttgcagtgagccgagattgcgtcactgcactccatccttggtgacagagtgagactccatctcaaaaatatatattttttttaaattaaagaaaggaaccaactggggaaaatacccagtccatttggggttatagtaaaatagttctattatagttataacaggatcaataaaatcacctgcaaaaatgtgttttattaaacagagcttttgtttctcatgatggtttctgaaatgatatttttttccctacacttatcaacagaacgattctaatagaaagagattgtaggccaggcacagtggctcacacatgtaattccaacactttgggaggctgaggtgggaggatctcttgaggccaggagtttgagaccagcctgggcaacagaatgagactccatctacacaaaaaaataacaaaaattagccaggtatagtggcatgtacctatagtcctagctactcgggaagctgaggtgagaggatcacttaaacccaggaagttgaagctgcaatgagccaagattgcaccactgcaccctagcctgaatgacagagcaagaccccatcacaaaaaaaaaaaaaaaagaaaagaaaagaaagagattattatagggaaagaagtacagtgtccagccaagctctcataaactctctctgagattcaatttattcttctgttagcagaatagaatacattatctcagcatatatgatcttccagctcagggatatcaggttttgtacaatactttttacttaaatacacatgatattttaatccttggcagatgacatattagagtcattaacttgcatttgttgtttaattaaatgccaggtcctgttgaaatgaatttgttatgtgtaggccattttcatgtgtctaatataggctgtttatgatatgacatttgtatttttataacgatatatatatatatattttttttttacagaattatgttagagttgtggaggtttggtgggatgaatataaagactacttctatgctagtcgtcctgaatcgcaggcattaccatatggggatatatcggagctgaaaaaatttcgagaagatcacaactgcaaaagttttaagtggttcatggaagaaatagcttatgatatcacctcacactaccctttgccacccaaaaatgttgactggggagaagtaagtagtcacatctcaaaatgtatgtgtttgtagactgagtttgggagaaggcagagagaggtggaaatatgtaagagggaagtattcttggggaaaagttggggtaaaaactgtctgataggatctaccacctttccactaaacagctatagctgccagaccagctggccaccatgctgtctcctggcagcctttgctcattggccccctagcctgcaagacatccactcttcactccagctcctggcgcctccatgcctcttactccaactcccttccttaactaatttcaatttatcttactgctctcaacttagagatcaccaatactgaaaagcccttcttactattccccacttcatcaaaaagatgcagttctatgttctttccaggggttctcacaacacccaaaatcacctatctcccaaccagtctgagtgcttcaggaccttgatcacttgtgtccaggtggactgatgcagggacccatatacagtagatactccaacaatgcttttcaaatgaattaaaaataattaaaatcagacaaaagcactttgacaatcagacattgtcatttctttgtttattcaaacttgtcttcagactcacttctgattgctccctgcagccccgctgtatgcctcacaggtacactaaacctgccatgaacgttcaagtctacatccctctgcttaattatgttcagcaaatattggttgagggcctactatgtgccagtcactcttctagacagaaaaccagagaagcaaagtcgtttttctcagggaactggcatgctacctggggagagagaccaaaaaagtctgagaaaacaaaaatgataatgacagatggtgataaatgataatgacacataatactgtcaagaggacttaagggcagggtaaggaaagcctctctgaggaggtgacattcgctctcagatctgaatgataaagagtcagccaatcagagagtggagatgaagggaagctgaccaactgcggaagcatagttcatctgggagtggattccttatgggttggtgtgtgaagggataagggccagaatgacatcgaggttgttttgagtagctgattaggtggctgctgagattgggaagatagtaggggagtgaatggagggggcaaggcttctgttggtgttctgggcatgtgaagtacctgctaggcgtccaggtagagccattaaggcctactgatcatagattgtaggttgtatgatgccaaagtccagaagagaggccactctggagatgtgcatttggggccatcagcaggtaggtcgtttcatgggactgaatgaggtccccgagggagaaaacacagatagagaagagaagactagacccatccgtcagaaacgccagcatttagagttcaggaatagaaggaaaaaccaacagaggacactcatgctgctctctctgtacttcttgctttaatatactttttccctatactcttattttacctgtcctattacagcaaattatgtttaactccaactagaccataagcctttcaacacacagatctctctctgagggcccagacaagtatatccaactgtatgcttaacatcaggacttgaatgtgtaacaggcatttcaaactcgacatagcctaaattgaacttcctatctcctccccccaacccatctttgctgatttcttggtcaaaaactttggagtcttccatgaatcctgtctttgtctcgcacttcatatctagttccagaatctgatcccttgttgcctggtctaagccaccatcatctctcactgagactaacttgttgactctcctacagcctatttcaaatacagcagtcagagtgactgttttaaaataaaggcaaatcatgtccttcttctgctagaaaccctgcaccttcacctatgagtgaagacaaagtcctttctggtagtctccaagatccacaacatctgtccccattcctctctggcctcacctgctactgctctccccactccactccagccccatgtccttactggtcctcagactccctccaggcatgtgcctgcctgtgctgttccctctgccaggaatgcttccttgcagatacacgcatgcatggccagctctcacacctccttcaagtctgctgacctaccacttctcagtgaggtccaccttgttacttcccaacgccctagctcccaccctaacttcctcttcttttcctttttttcaccacacttatcaccttttgccataacagacaaattgtctactatgttttttaacttatattctgtcttttttcccttacattcccagagtgaatggaggcaggggcccacattcactgtggcatgcccattactggggtaggtgtctttattttgttcactagtgtttcagagcctacaacatgcctggcacacatcaggtacttaatatttgatgattgaataaatacatgaatgaataaatggaattttctgtcctccttttactgtctcactcccaagtatatcttcagtttaacctcttcccattctgacatctgcactttatacttcatttctcggcatttccttaacattccagggtaaacccctacctgttttaaaggtgtctcttggggcagtctttggagctcctcca

SEQ ID NO: 10217 - DNA, 6000 bp, Homo sapiens
agcagaatcatgagacagactttgccttgtatctacttttgggggggccttttgccctttgggatgctgtgtgcatcctccaccaccaagtgcactgttagccatgaagttgctgactgcagccacctgaagttgactcaggtacccgatgatctacccacaaacataacagtgttgaaccttacccataatcaactcagaagattaccagccgccaacttcacaaggtatagccagctaactagcttggatgtaggatttaacaccatctcaaaactggagccagaattgtgccagaaacttcccatgttaaaagttttgaacctccagcacaatgagctatctcaactttctgataaaacctttgccttctgcacgaatttgactgaactccatctcatgtccaactcaatccagaaaattaaaaataatccctttgtcaagcagaaggtaagttgaaaatgtctattgttactaatgtttttaagtcagttacccatccttagacttactatctaaatatcaaggaaataaagaggaagaaatttgatctaatccaatttgccacaaatattgccattataatagaaaatgcttccaaaagagaaaatatactcttaaatcagtttcatccttaattttcaatgtttgcctctctcgctttctcccattagaaatagaacttagacgcaagagatagaagtaatgaacagagaagaatcagaatatcccctaagaacatggaaactaaactttcaatgctgctgatttagcatgtgaagtcgtgacaaaagtcttgagtccaaattctgacttaaataaaattaacaaattgatacaatgatcaagtgaattgttcaactaaaaattacctactcctggtttcagaaatctcctcagtggctatttcaatgactttttcaatagtggtgtcactttttcaatgattcctttttcttttcaaaactttgctcgaattttagttttttttcttttctttttagttgatgtttaataattgcacatatttatgagatagagaatgatttttcagtatgtgtatataatgtgtaatgattaaatcagggtaattatcatatccatcatctcaaatgtttctcatttgtgttgtgaacattcaaaatacgctcttctagcttttaaaaaatacacaataaatcgtagttaaccatattcaccctacaatgctttagagcaccagaaaaaaaaaaacgcatgttattgtttctaaatctgaggcaattattaagtgcttttctttaaccaaagcgattttcaagttacttcattttatggccttataaaaaattgaacattgctcttcctcagatgccaagaataatgtacaaatgtaaatatgctgtgaaacataaagtgatttgctccctagctattttaaatcttttcttgggtcttcttagagtctaatgtggatgaaatatctttgaatacaaaggcctcaaaatctggctagagaaatcattgcaaaatgttatttttgtaaagacttaaattaaaaaacctgcttctcgttaacagcgattacattagactttgccttaactggtatcgctttcccttaccttttgcctgaatttgaagcatacatattcaaaaatagcaaagggtgataaaaacatcccacagtactgataaagcaaacaaaacttaatattctgtactagtcatgactcaaaatttatataatatgaccctttctcagtataaaaatctatttaaaatttcatagatggcaaaattctcatgctttttaagaaaacattctgttcttttttctgatacttattttcaaggttaaagcatgacactgtgtgtttgataagccatgtgaaaatttcttgcatcataagtaaaaggttatgataaataagttcataaattagcaatgttccttatatcataaataagcttaagtcttttttattttggtaagagaaataaaatgattcttgaagtaagaaataaaatccttcctacaatggttgcaagggtgaccatcacaaagattataacgtaacaaagattaatcagatcaaagattttttattatgcttactgttagtattctacagaataatagagaggtgttgattttgctgttgaagtatttttcagatgtacttacatttaaaagaactgtttttgacagcaagactctaacatatgcatattattttttcccttcagaatttaatcacattagatctgtctcataatggcttgtcatctacaaaattaggaactcaggttcagctggaaaatctccaagagcttctattatcaaacaataaaattcaagcgctaaaaagtgaagaactggatatctttgccaattcatctttaaaaaaattagagttgtcatcgaatcaaattaaagaggtaagaagtaaggtaaaattattttgcattctgcctttaaggtggatagtccctatctgtgtcacatacacaggaatgtaatgctctctagcctctgcctgtcttccagcaatccttcccacctactgcttgggggcattggtgtcatcctcctgagagctcaggcagccccaggagaggtcgggagacgggactctgccgccctgcagcactgggtggaacccctgtgccgtgaccttgcgaacatccttaacatctctgagtctgtgtcctcacttataaagtggaaatagtgctctctcacacaaactctctgacagagttattaattaaagagtacgatggtcaagagccccaggttcacagtcgggttagctggcttggtctctgggctttgtcttttaacaatcatgttatcaggcaagttattcaagttctccctctctagcctcccagctttcaaatgggcgtgataatgactctgcttcataggactgtgtggtaaagaatttaggaccgtgtctggcgtaggcagtgctcaggaaatgatcagcagcagtatgtggttataaaaaccttcctataatgaagtcagcttaaataactgacaggactgtctctttttggaatcatgatcttcaagctaatcattttctgtcacgggagagcaacaactatctggaccggtggcacaggggtaaaagaatttaccaagacagttgcaggtggagaaaggcacatttattcgtgaaagtaggaaactacattgcgagaaggcaacgggcatatcagcaagagaagctgactgcaaagaaacaaaggcttgctggggattttacagggtcttgtttatgctgtgtgctgaagagggctttgagctgcactgacagcgcccaggttgcagtgggctaactcgcaggggcctggtgatagctgggcacaggaagattgtcagttatttgcacaggagggctacgtgtcctggatcatgaagacagactaataatttacctgctcttttgctttctctcggtcccgccaactgactacttttccctaaataggactctgcattttcacatacaggtttgtctgtattttacactcattttgttccaggctataagactactggaaatccttaattacaactctattttttttttcagacataaaaataaatggcgtacaaatttatcctaagatattaagatgttttgtgcaagctcttcattttattttttaaactgcatttttctatgattaagacatttattgtagtaatcttattaaatatatgaataaatgagaaaataataataaggggtgattttaaaaaatcactcaaatgtccatagtcagaaacaaccactgttagcatttgggtatatttatccctggcttttctccaaataattataaggaaaaacgatagcttaaattcttactgtactgaaattcacactgttaaggcacttaactgtgtgtcaagtgctgtgataaatttttaaaaatattttatgtatatagtatttttaatcaatattttattttattttattttattttattttttgagactgagtttcactctttgttgcccaggctggagtgcagtggcacaatctggactcactgcaacctccgactcccgggttcaagcgattctcctgtctcagcctcccgagtagctgggattacaagtgcctgccaccacccctggctaatttttggatttttagtagagacaggatttcaccgtgttggccaggctggtctcgaactcctgacttcatgatccacctccacctcggcctcccaaagtgctgggattacaggcgtgagccaccgcgcccagcctggagggggctctgatttgtaatgtgtcacttgggggacagtagggctaatgcaaaaaaagagagaagtatagaagaaagggtgctttatcataaacaaatgagttaaaatgcaaagcagaaaattatgaaattaagtatgataaatctgcatgatagcattattttacaggcattaaaattaagctttggaatgcttcttaattgtatgggagatgttcataatatgatattaaatctaaagagcaggagacatcaatcttagctactcaggaggctgaggcaagagaatcgcttgaacccaggaggcaagggttgcagggagctgagatcgcaccactgcactccaccctgggggacagagcgaaactctgtctcaaaaaaaaaaaaaaagaaaaagaaatcagagccctttactcctctggcggtttcgactgcctgccggaactggcctccattctctctggattcctcctctcccacctgctgttctcttgtccccgaagtgagtcccagaacagccaaggctctggtaagggtgtaggacggagcagaagggagctggaaaaacacgatagtaaaagaaagtcaggagaaaatccgggtggaaagacgagagggagagctagagctcagagttccagaaaggaaagtgtgccgtcaccgcctcatcataaaagccatccacaacttccttccatgaggctcactgagaacagcggcaccaagacacaaccaggaactgccccaggagtgacttcacgagcagtttattcattgcaattgttctcatggtgataaagaaaaagtaccaggagatggatcctggactggaaggtcagagaagcctccctgaaaaggtggcatctaagctgaggctgtgaatgctgagcagaagttagcccgtggccaggggaggtcagaggctggagtaagaggtgggcgctgcaggaaccgagtaaggaaggactcgtgcattacaggaagggggagaaatgctctgcccatgggatgtggtgaagggtgagcggagatggagtaaagaactgcatctggccgggtgcagcggctcaggcctataatcccagcactttgggaggctgaggcgggcggatcatgaggtcaggagttcaagaccagcctggcctacacggtgaaaccccgactctactaaaaatacaaaacttagctggacgtggtggcgcatgcctgtaatcccagctactcgggaggctgaggcaggagaattgcttgaactgaggaggtggagtttgcagtgagctgagattgcactgctgtactccagcctgggcgacagagcgagactccgtctcaaaaaaaaaaaaaaaaaaaaaaaaaaaggctttcaacagcattacagagtctgtgttcttttgattgttaacctctttttttttcctacctttagttttctccagggtgttttcacgcaattggaagattatttggcctctttctgaacaatgtccagctgggtcccagccttacagagaagctatgtttggaattagcaaacacaagcattcggaatctgtctctgagtaacagccagctgtccaccaccagcaatacaactttcttgggactaaagtggacaaatctcactatgctcgatctttcctacaacaacttaaatgtggttggtaacgattcctttgcttggcttccacaactagaatatttcttcctagagtataat

SEQ ID NO: 10218 - DNA, 6000 bp, Homo sapiens
ctgaaaggaagttattctagtaggagaggtgatctatcaacacataattacaacatgtgatatgagctgtgaacacttatgaacaaacagggtgctgtgtaaaagaataaaggaacaaagatctatgtataggagttttctggaaaatgtttggattcggcagtcattttcaaaggcagagggcattgatagcagtatcttaacatggaaaacattaaaactaactagatattagtattctatttccaattcaaaaataaccagaagatagtgatgttgttttgaatataggatgtcaatctttgtgttaataatgtgttttgaaaaagcaagacttaattgaaaatatacatcaaattataatttcagtgtattaaaaaactgcctgtttaaatatgtcctttctttgctgtaaattttggttaaaatctattggagttatgtccttgtggtgaagtacaccctacccccaagagagcaaatgatgaataaatcagtagatgttccatgaatgcaatgttggctgagctggccacagtggagtgtgatcacctggttataggagaatagccagcaggttatatttcataattatatttttccttaaattttgtgcattaatatttaatagcaataattaaatgaattccagactgaatagacaattttattcattgaataaacattgagaattgcctactgaggcctgggctctaggaattccaccaagaataaaaaaagacatggtgttttgccctcaaattgcttagaatctattcaggccacttagtagcaggtttggtcaattacctggtaggaaaagaaggttgaaatgtacaaccaaattaagtgtattggccttcattcttttatccatccaagaaatatctagtgagtatttgttaaatgccaagcagtgctctagaggttggaaatgtatcaatgaacaaagacatgcacaagcatggcagtgtttgagttgtaagagaaagatgctaaataataagtataacgtaagtataatatcacattataataataagtatgacagaagtatcacataatgtcaggtggcaagggaaatggagaaaaagcattgttaggaggcgtcgcagtgctagggacaggggtagcagggatgagggaggtctctctgatcgtgtgacaatgagcagagatctggaagaagggagggggcagccgtgcaggcctctgaggaaagcatttcaggcagcagaaatcgcaagcatagagggtgaattcactaatctgcttgctgtttcttttctcctctacaacatgtaattaagtctataattagactgttgtataatgattgcattcactctaccacttaaactttttctcattagcgcaatccaatctctagggtactatctagtagactatgattctattcttgtgttggaaagactgcaaaaatagcacttgaaaattaggaatttgcgtgacattaaatttgtttttaaaagtttcaccagataatccccaaaatattaatgaggctttactgtattttcacaagagcctatgttgtcgaaatgttgaaataggcttagaaaaataaatgaaagaaactagcatattttataagaaaatgtgttaactagggtgcatccaagtccaaacagaagcatgtgattatcattcaaatcatacaggtcatcgctgaacgggccaatgaaatgaacgccaatgaagactgtagaggtgatggcaggggctctgccccctccaaaaataaacgcagggcctttcttgacttgcttttaagtgtgactgatgacgaagggaacaggctaagtcatgaagatattcgagaagaagttgacaccttcatgtttgaggtattgtatattgttaggttcagatatcattaaacaaatttcagttattgttagaatctttagcattattttttaaaacaatcaaattttaaagtagtttaactaaagaagattcattatattttaattagaaattacaaaatttaagaaactgattaagtaccagctcaacttcttcagaaaacgattttgactagtgctgggcacagcagtagacacatttgtttttcctcaagaaaacctaagatttgtcagagttttcccaagcagaagagcagccagagattgctctcagttctccatgtggcttcaggcttccttctaacctcccagacatgcaagtccacttcctcaccacctgctttctgaggttccagcagatgagcacttagctgctgccatgagctactctacctagaggacagttaagagccctccaacagagaatcagccagttcatgattctaaaaagatctctgatctcaaatttatacatacatatgtgaagtacattttagcaagatagcctaaatattaaatcctacaaagagggactttctctatatgtggattgcaaaataaataaaacatggtttttagaagccatgtagtaatatcgtccacatggggcagagtgaaaggcacctgagtttttaatggctctgcctgccacccacgtgtgagctgctctgcggcagcctctggcggcagtgccagtgtcctgcactctggtgtgaggctccacgacacggtagaagaaggttgtgtgatgggtctttcgatccgagttccagttcaggctctgtgctgattagccaaataagatagttctgatcattccagagttctgtcacaattttcctatgtgtaaagcgagagatggactacgttggtggttttaaacttttttaagcagaaaactttactgaaaataaatcttaagcagaaaatggacatctaaattagctgaaaagtagagaggtgttaagtgtgtgggctctaagatcaaatcccagctaacatgctgggaccatgacctcaagcacctcacctagccgttctgggcctgaatattcttattttaatagcacaagcctcatggaatagttatgatgattagatttgtaaaggtgctctgagaatcgtgattggcccataagtatgcggcacataccgggtgttattattgcatgtcggagtagagagatctcacatcttcaccttgcccatgtactacacacacacacgcatacactcatgtaaacccatgcacacacatgcacacacttacacacacacatatgctcatgcacatacacatgcacagacacatgtatataccaacatacacacattcacatatacacacatacacaaacacatgcacacacctacatacactcatgcacatacatgcacacacaaacatatgtatatccacatgcgcacacacgtgcatacactcacacacaaatatacacacacacccagatactcatgcacatacacacacatgcacacatatacccacatgcacacatgcatgcatacacatgcatgcacacatatacccacatgcacacatgcatgcatacacatacatgcacacaccaccccccacagaggcacacattcatgtacatttatgcaatcatacaaaaacacatgtacacacctacatacacacatgcgcatatacacatacatagatgcacatatatacacacatgcacacataaatgcacacagctatgtacactcgtgtacataagcacaaaggcacacacaaatacatgtacatatccacgtacacacattcatatatgtgcacaaccccatacacatatgtacacacatgtgcacacacacatccatctcctaccaggaacctctcaatctcacgtaaacaatcagaaccagactaatgatttttcttccaactctaacattccttgacattctaattgttttcttctttgcattgaaagggaggcagcataccaggtgtgagtgtgatactgtggcctcctccacaggtcggtgcaggctgtgagtgacactgtggcctcctccacaggccggtgcaggctgtgagtgtgatactgtggcctcctccacaggctggtgcaggctgcaactgcccaggttccagctgtgagctaaaagtgggcgtcctcccctgctccaccagtgtgcctcggtgctttacgtttgccttatcatgctttctgcagttggcagatgaaatgaaatcggaagttcagcagactcctcttatgcatttggatcaggcttccgctcataaattcaaggaaagctattaaaattgtttagccagaatacttccttccgtacttagacaactgagcacaacgggccggagctcatctggagttccgagtaggttttgtaactgcaagtgctaggaaaatgcagaggcgccgacctcaggacctgtaggctgtgtcttttaagaattgcagaataagccccgagcaattcattttaggagctgttttataaaacaagtactttgaagatttctgcacagagaatgaaatattacaaaaatcacttgtgccacataggaaaaatggaaaagtgagatcttttatagaggaaataatttgttttttctttttgtcctcaaagtttcagagaggtagattactgttattgactttccagatacattttttttttttctgaagaactcaccacttttgcatatggaaatgtgctagggagatgaggaggtagataagaagccaggtcctgaaatatcaaatgggtgggaaagaaggttgcccgagacattacactagcttaagaggtggaggcggagacgttacgctaccgctaagaggtggaggtggagacgttacgctggcgtaagaggtggcggtggagacgctacgctggcgtaagacgcggcggtggagacgctacgctggcgtaagaggcggcggtggagacgctacgctggcgtaagaggcggcggtggaggcgctacgctggcgtaagaggcggcggtggaggcgctacgctggcgtaagaggtggcggtggagacgtttcgctggcgtaagaggtggaggtggagacgttacgctggcgtaagaggtggaggtggagcgtccttactgcacagggtgtggagggaatggcgtgggctcagctggctttgtcatcggacacgccgcaggctcagtttctgcctctgtttcccactaagctgtttagcacagaagaagttatttaaccacatctttggcctcagtttttaatctctgaattgtaaagaacagtaatgagtctttcatggagtttttgtgcagattaattcagtttctgcaaagtgcttagtattttgcctaaaactcagcaagtatgaaatgaggttgttgtcaatttttactgcagaggatatgacttagaaccacacctctaccccctggtgcccgtcatcaacaggtgaggcccacctgacagatgggggaaggcagagaagtacagccctgacaagcaggctcgtgaaaatcagactttgttctgttcacaaaggcgcagctcacctcgtgcccatggaacgccgcctttattaacacagcacaggcacgtcccaccagcgtgcaacaccgtgcggcgtggaactgccatctctaggcatgaacctccgctttgcaggcttgtttccttgtttgtcaccgaggcaaggtgctgcacagaattcatttcttatgtttgcagtcacagtgcagtcatcaaatccagagacaattcaaaagaggtttctggtcactcctaatcatcgcagcataactctgctttttaagctattgttttctgcatttgtaggggcacgatacaactgcagctgcaataaactggtccttatacctgttgggttctaacccagaagtccagaaaaaagtggatcatgaattggatgacgtgtttggtatgtttggccccttcactggttatattgtggtactaagtctgctgcagagatgtcactgtgttgtaaacacagtgtaatgagcaggaaggctcccccacgggatcctttccagtaccatcccctttgcaaggcctcgtccattcactcacaggcctctgccagtcgcctg

SEQ ID NO: 10219 - DNA, 6000 bp, Homo sapiens
accataacccaccctggaaccaaactgtctggatttgagtcccgcttagtagctgtgcacttttggacaagtgttttagcctttccatactttttaaatctctagaatacctatgttttagggttctcttgagggttaaatataaagtgcttggagcagagctgacgcaggataagggctgggtaaacattcgcggtggtggtggttgagtggtggttgctggtattaaaaggcgttgagcgcagaggagggaatgttgtttcctccttaggaggagcattcgtcctcctcgtgggcacaccagggtcactgcggagggaagctccagccaggcattcatgtgtaggccttttgatagcggagagtcaactgcattgtcacagatccaatttcagcacaccccaacactgtcaccagaagtatcttcccagcaggctgggctggcatctcccgactgtcttcccactgctcgggaatgagctttaaattcctttatccacaggacaaggaaggaagcctctgaggctcaggctccaccccagctaagaccccccaccctaccccgcacctttccctgcgtgctctgtgttggtttgtggagtgagagggtctcagggggcttcctgtgggaggcgatggatgaataggccttcgaggaatgaataggagcttcccaagtggaggaggaaggaaggactgtccactggatacaaaggcagaacaggatgtttagggtgctgtctgtagttcatgatggctgggggtggggagttaggagtgggctgggtagtaagtaaactgaaagaggggttcagcgggccggattgaaaagaattccatttgccagggctgcagagttgggcacagtccctgcgtgcagtgggctgtgcgtgttgggctcttggaagccttgctaagtttcttggtgtctgccttttcggtattgcctttttcaaggctgaaatgcatcctcttccttttatatcccccctgcttttttttttttttaaaggactatagacatctgacaaattccttgtccaatcactcagggaactaaaggcttctgttcggtttttagcttgttgtgaaatggggacttggaaggggaccactctcttcacgctctttgtggtaaatcctttctgggcatgcagatttaacatcctagggggttttccttgcaatggttttgatgtgaaaatgaccgaattattaaagtagttcaatggcctaaaataggagcaactctccccagtgcagcctctctgcacgtccagtgatttgcttgtttcttcagcctccgcctgtgtccagctccgctctgtcttccctcctgcgagggtcagtgtctccctgagtgcagggtttatcagctctgcaggacacaagcctgtgccttctcaccataggcagcaggatgcagtcagccaggcatggtctgggggctgcagagatggccttgaactctcactctggttcagcagccagtatttagtaaacatctgccgcatacaagacctgggcagactctgtgacaagtaagaggcaggatccagactttcccagccaaaaggggcctcagggagcgggtagctggttccgcatttctcagtgagagtgctcaccagtgttgcgatgtgagattttaggtgacagtagccaaacataatttattttaataatactttagtgtgcattagggaaaatataactgtatcttatagttataaaatatagcacctgaagcctatgatttgggggatatttttgcttagaataaggctgaagtagtgtacaggtttttcaaaagtcagtagtgttaaagaaaagtactaagcacataaaggtaaggtgccgaggggcacacgggaacatgatggccttccacaaaacgttctctctccagattgtcagggctgtctgaggtgcaccctcttacagcgcaaattacacctccggaaagctaattttaagaaaagaagaaccatgcattttatgcagaagtcacagcggcggcaactgatgactgaggtttgggaaacaccgttggctccagtgctcatttttcaaaacatgaaattgaagcctagagagggccagggtcacaaggctgtggagagaagaaggggcttcaaatcccagggctcctgatgctcagcgtggctcctcttctcacccagatctgcctgtgaccaaggcctgtgtgaaggaggccaggctcggggaagacccctggagctgaggctgagaggcagggacgttggggcctctgagtaggaatcagggtgctgtcgaatggtgagcaggtgttggcctctggtgagctggatgccaggagagtctggtagagcttgattttgaagccttggctggcaagtgtgaatctgcctgtgtagtcttcaggcaggtaggggagggggatgtgcatgggtggggctggtcacagaaaaacagactgagctcaggttaacaggaaggtgatgtgggtttcctagaattggggctaagggatgcccacttctttttgtttttttgagacggagtctcactcttgttgcccagggtgaagtgcaatggcgtgatcttggctcactgcaacctccgcctcctgggttcaagtgattctcctgcctcagcctcctgagtacctggcactataggagcccaccaccatgcccagctatatatatatatgtatatatatatatatatatatttgtatttttagtagagacagagtttcgccatgttggccaggctggtctcgaactcctgacctcaggtgatccaaccacctcagcctcccaaagtgctgggattacaggcatgaggcaccacactcggccaggatgcccacttctgtgagaatattgcaaagatctgctgcaagagtgaagtgttgagtattgggatcaaagaactagtgtttaaatataggggttaaagggtcacataaatattccccggcatcaggatcagaggtcgggttttctcttagagactgcctgccttttattcgtgcggacacaaactcttccaatgccaggccttatctctgatcataggatgcagagcagcaggcagctccccagccagttggtggtggggctgggtgagggcggttctaggagctggggctacaggcttaggtaatgcagcctccaccaaagaggaagaaaggaaggcttggatgagtgagtgaggactcttgatcagagtcccagtgggaggtcatggcctcaagtggaagaaatttcacctttttactcccatttagagcagcgtttgctggttagatagttttattccgagttgatttgacttcctccctccctgctctctctcactctctctctgtctcctcttttcccaccctccctctcttccttcctctctcccttcttccttcccctgtctctttcttcttccctcccttccttcctccttcgcctgcttcctttctcctttccaaccctgagacctttattaagtggtaacagtgtatcaggcatagtggcgagccccgtagtggttaccaagtaaaagtcatcataacaacagcagctaatgttcagggaaggtcaatgtcatgtacctggcactgtgctcactgcttttacttatattgtcttgtttaattctcataacaacactatgagtttggtatggttattggataatctcattttacaggtaaagaaacagatctagacaagtggaaggactcactggcctaaggtctcactccatacccttagccactttgccgtccagcttcaatggctattgagatccaccttcaactctaagtttcaaagaacttgaacagcagacaggagaacaggtggttccagccaggaggactggaggactctgagcttaaatgcggctgtgaaggtcacagtgctgtgagtgcaactaggtggggcatgggaagctctaggaagacttaggggaggtgacattgaggctagagttggccaggtctggggtggtgagaatggtgggtaagcaagcagagggccttctgggcagagagaacagcttgggcagaggcatggaggcacctcagagagggcgctgagcatttggggatttggaggcagtattttgtggtgcagtgaggaagaacatgggagtctgatctcatctttcatcttggccctgctattgctgggcttgagatcttgagaaagttgcagacacttcttaagccttagtttttccgtagggaaagtgggaataattacagaagtaacttcatagggttgtggagaggattaaatgaggtcctgtatggaacatagacatggtggccattgttttcatttttggcatgtagggtgctatggccgtgtcacagttgggagggcagcaggagacaagctcaggagcttgaatgccagaccagagtacttgggccacagcctggagacagtgggagactggggaaggtatggcgggggcgctgcacaaggtcacatagaagccaaagcttggggagaaagagctgccatccccagcagccttcaccaggtgttttgcttttggtggatgacagggacccactggtggggttgtaaatgtgtgtcacctgggcacactcaacgctgactgcttcaggtgttgcactgggtgtcttccggtggcagacattattactgtcttgctcaagtggaggagcttgaagctgggatgcggaaatttcttgcctgttttcttcttcccgccatggtctaggaagctgattttagaggcctgccttttaacgtgcttttaaaagatttttcttcctacctgtagcatcagggcagttttctggggcccagatggagtctgttgggttttgaagaggaagccagacagacgctgatgcaggtgctgccggccccgtggtctgttcatgaaggtcaggagtccgttgagcgccgtgggagctgcctccgaggcagggattaagaagcgggtgtctattcctggatgcggaaaccactcagttcagcaaacagggctgtgtacctgctgtgtcaggccccggacagggccctggggacgtagaggtggatgaaccgtggacactgtccttgagaagcccgctgcacagtaaggcttttagttagaagctgacaccgggggccaacctcagcccctggtctccgcagtctgcttgctttctctgaggtgtttctccttctctgtactgggaggttgggtgggagggaagctggcacctccttcaaagaattatgaagattactgagctaatatacataagcccaaagcatggggcctgtgccagcactttcttctctctctctctctctctgatggaggagaatgttctgtgctgtggggaagtagccgaagggggcactacctgtatcattcactttcttccccagagcttggcatatggcaggcgctccacaaacttgtaggcgtgtttcttggaagaatgagtgtgtaattgaccttggaggatgtgagatttaggcaaggggagatttggaattggcgggtgacgttcctggtaagcaggggcagtggaaggtgcagagcagaggcaggaggagaagcccagctggagggtgggccatgggtggggagagctgggagttggaagggagaggtcactggggcagccttctaggatcttgaccatcagcctgatgcagttgctgagatgctttcgagcctgggcgagaagcgttaggcctcatcttccccagcccggtagcaaaggagggctgctctgtgctggtggggggtcaagaggtgcagggccctggccagatcagaagaaaaaaaccctgcagggagaaagggaacttgatatactttggactttatgagccaatataaatattgaatgttaaattaggaactttttgccctatttctttaatcttcagaagagagatgaaatggacatcctttctatcttgaccacgtgtgtagcaaactgggatttcgagtgcgagttggtttcaggtccca

SEQ ID NO: 10220 - DNA, 6000 bp, Homo sapiens
tgcaaggcagggctgcctcccacccagctcacaaacgtggtctcagatgttgggtatcccccatgcccccgccaaaagcactccagatgacaaaaatccactacaaagctcttctttaaaaagaaagattctgagaagttccatcaaaagaagaaaagaagaaatgaaggtgattgatcaccatatttgctttttcatttttaatttttttttttgagatggagtctctgtcacccaggctggagtgcagtggcatgatctcaggtcactgcaacctccgcctcccgggttcaagtgattctcctgcctcagcctcccgagtagctgggactacaggtgtgcaccaccacacctggctaattttttttgtatttttagtagagacagggtttcaccatgttagccaggatggtctcgatctcctgacctcgtgatccgcccgcctcggcctcccaaaatgctgggattacaggcttgagccaccacgcccgggccatatttgcttttaaaccagtattgaaatgcagttctctggactccaggctcaaaatcatgtaaggtcgcccaggctggagtgcagtggtatgattatggctcactacaggctcagcttcctggactcaagtaatcctcctgcttcagacttccgagtagctgggactacagttgtgcaccactacgtttgctaatttaaattttttttttttttttttttttttttgtagagacagggcctctctatgttgcccaggctggtagcaattcttcattgagtaccaactgtgttccaggctctggggatacagaaataagccagggacctgcacagcagctggggtagatcaattcaaagcaatatgaaaagggcatttggggagctttcaccttacatgtgttattttccaatgtgtttgggaagcctgaagtgtccttggaaagtgacatgaattgactaggcgggtactccaggatcagagtactccaggaacagaactgttctcaaactttgtttgaaggatcagtccccaggaaagcttgttaaaaatgcagattaatgggtttcatcccagaaattaggtccattaatagtctgcatttcaactaaacaccccattttatcccgagacagatgctactctcagtggctctcggacctagtggggtttagctggtaaatactcagagcttctgtttttggcacaacctattaaacccgagataaaaaactcttcctctttgacttgactttaatcagtttctagtatttcatagttagtgagatattaatactttcttaaaatgtactttaaaacttcagagggacctacattttggagcaagatgtaaagaaatctggaagtgcaactgcagttgctgtctatctcaagtcattgtctcccatctttgctgcggtgagcagttatgtttcacttcactgggaatttcccttcccctgctttgtcactgagggagttggagagcctgtttgttcatagttcttcccttggcagtttctctctgtcctgggctgaggtttggtggaattaccagaaagtgggccttctcagcatctgagcctttaatccttccagctgctgtgctggaggcttagctctctgcctgtcctttagcaaaaaaaaaaaccaagataaagtgtacatgtggtgtgttgtgcttgcagtagatgtttgaagggagccctttggaaacaccagggtcaaggtgtctattgtggatgtgacggtgggcgtaacctgaagcgtgggcctgaggttagtactggcagccacttgggatctgagcagcccatgatttgacaaaggaagaatttggggcccttgtattggtagctttgtgcaggagtaattggagtgggacaggacttagaagatgaggcaatggagggattagatatgaattaacatctttgttcaaatagctcaagaaatcccatctgttgtccaaagctttctttgacttggaatattggtagtgggtcctctggcttcttgcaaagtatgtcaccttcttcatcatcccccttccctttcttacagtatgtgtttcaggagcaccctgtacttatcttgaaagttagtaagtatgtatctagctcacaaagtgacagcagcttgctcttgctccaggacacttaatacagagaggaagagtggtacacttgggatccttccaggttctgtgctgatttgcctagtctcatgaaaccgcacaaggaaataacatattttggcttctacgccagcacttgccctgtagctctggagcaggctgtgtttggtttccacccacctacctggattaggctgaaggccctgctctaaagctttgcagcctcctgtctggggcacttcttgctgcaggcaggttacatgcattggtgactctgctgctatttctttccctgccagggatggtgccatgagtgaaacaagctgctcagcaggcacttactaaacaccgactacgtgccatgcccagtgttaaggtctggggattgaaagaagagtaggacagagtccatcttggaggcactttctgtcccattcccttcccagatgctggagccacagctgcttttaggattcttgtgtctttctccgtctcccaaggggtaggtaagagtctccctctgccctggctttcatctctgagacccctagttgtagaggtggtgacttagggtgaagatttccatcaggattacttggtaagcttattagaaagacaggttccagtgttgcacatgtgtccagcctcaaacggtgtggtccctagacttgaggccatgcccttctactttggattcggggtgaggtggagagggggatgtttgaaatgagattagtgagtaaataagtagaatataaggcagagtaagatatatctccagcggcaaagagaacaacacacacttggagaagaaataagcatataagcatgtactggattgctggggccccagtggctcgtactagagcctgagagggagggcactgaagggacagtgtcttgatgtcatagttagatcttggactttgaaggcaaactagtgggtttgactcttggccgcatggttaattgaaggggtgggttgcccctccacacctgtgggtgtttctcgttaggtggaacgagagacttggaaaagaaaaagacacagagacaaagtatagagaaagaaataagggggcccaggggaccagcgttcagcgtacggaggatccatcctggcctctgagttcccttagtatttattgatcattcttgggtgtttctcagagagggggatgtggcagggtcacaggataatagtggagagaaggtcagcagataaacacgtgaacaaaggtttctgcatcatagacaaggtaaagaattaagtgctgtgctttagatatgcatacccataaacatctcaatgccttacagagcagcattgttgcccgcatgtcccacctccagccctaaggcggttttcccctatctcagtagatggaacatacaatcgggttttataccgagacattccattgcccagggacgggcaggagacagatgccttcctcttgtctcaactgcaagaggcatgccttcctcttatactaatgctcctcagcacagaccctttacgggtgtcgggctgggggacagtcaggtctttcccttcccacgaggccatatttcagactatcacatggggagaaaccttggacaatacctggctttcctaggcagaggtccctgcggtcttccggccttccgcaatgtttgtgtccctgggtagttgagattagggagtggtgatgactcttaacgagcatgctgccttcaagcatctgtttaacaaagcacatcttgcacagcccttaatccatttaaccgtgagtggacacagcacatgtttcagagagcacggggttgggggtaaggttatagattaacagcatctcaagctgaagaatttctcttagtacagaacaaaatggagtctcctatgtctacttctttctacacagacacagtaacaatctgatctctctttcttttccccacattagggagggcactgaagggacagtgtcttgatgtcatagttagatcttggactttgaaggcaaactagtgggtttgactcttggccacatggttaatcacctgtgaccttgggcaagtcaccagaatcctctctgtgtcagtttcctcatctgcaaaatggaataatgccttaaacaaggaggaccttgtttctatctatgaagcatggagaacagtgcctggaagatagtaagtgctcaataaatgttagtttccaagatctcaagctttctctacaatatttagtatttcccgaacccataaagggtctgtgttctgagtctggccctcctgagaagggaccttctgtgagtcatggctttgatgccagcacctgccctgtggctctggagcaggttgtgtgcttggtttccacccacccatccggattaggctggaggccttgctctaaagctttgcagcgtcctctccgggcagctccaggtgcaggcagtttacacgcattgatgactctgctgctgtttctctccctgccagggatggtgccttgagtgaatgacccccttggagaacattcttccgcatccctcgcctcaagccagcctcagacagaaaactgaagattcagcagatccagtgcttcctgctcctcttctgcccaggaacacgcttgccttccccaaggcttccagaagctctgaggcaggaggcaccaagttctacctcatgtttggaggatcttgctagctatggccctcgtactcggctccctgttgctgctggggctgtgcgggaactccttttcaggagggcagccttcatccacagatgctcctaaggcttggaattatgaattgcctgcaacaaattatgagacccaagactcccataaagctggacccattggcattctctttgaactagtgcatatctttctctatgtggtacagccgcgtgatttcccagaaggtaagtgctgatggcagggaaagataggatttatctccaaacgcacccacaatattgttttttaatgtcaatgcaatcaatatataatatattcagtattttagcgattgctttgcacagaagcagaaagcatttagacagaagttaagaagacttgtaccaggttacataggttgcgaggaatgttattataagaaatggaagcaaacgatgttgctatgttggttttccacttctttaccttttgttttgcttggttttgctttgtttgggttagagcaatgaattattctaaggcacttaccaaaggtaaaagttagagtaaagttagggtaaaaatgcaaattgtgtgtcatcaaaggagaaacgaataactagcaactgatggccacctcatcgcttaaaaatttaactctcttctgcccaccacaatatgcaaattttgacattgcttagggtaaggacaaacatgtttacttgatcagctgttttcttcatttctaagagcttgggtgtgaggaagaggattggcactttccagaactgtcatgccatagtgctgttattcatcacacacagtgctgtttgtcattttcgccttcttaatgtttgttgttttccatactcttctgaattcagggtatgtgttcatagaaaagggattatgaaagtaaaaatagcctgtgggaaatatctgctactagggtttggcacctaaatttttgattggcttaacagtaagtccatcctaagcctgttcttttagttacaaagatttgattacaatcattgattatagaattcgctgtaatctttcttatcattttccttagctgttcagctactgtttgtaagagtcctactggtgtgtgtacatgcctgtgtgtgagagagagggaggaagagagacaggatgtatttagtgaatatcatcacatgtttatattatgggga

SEQ ID NO: 10221 - DNA, 6000 bp, Homo sapiens
tcggctgtgtaaaatacagtttatttaggaaacactcagagtttataatttaccgagactgtgctgggccctttacaattaatatagactgtaaaattagtgggctgaggacagtatctttgacaaacacagaagaaaaggatgaaaaaaatacttttttttttttttgagatggagtttcattcttgttgcccacgctggagtgtaatggtgcaatctcggcttacagcaacctctgcctcctgggttcaagtgattctcctgcctcagcctcctgagtagctgggagtacaggcatgcaccatcacacccagcttattttgtatttttagtagagatggggtttctccatgttagtggggctggtctcgaactcccaacctcaggtgatccacccacctcagcctcccaaagtgctgggattgcagacatgagccactgcacccggcctgaaaaaaataccttttaaaatgtcattaaatatggcttgaaaggagctattacagataacaagccatgaatgaggagaaagactctatgtccagatgaaagactatctgggcctgaaaccatcaagaggtcaggctgtaaacagctccaggactagcaggacattgaaaaggttctgtaggaattcattacaaagataagaagcaaactggctgggcatggtggctcacacctgtaatcccagcactttgggaggtcgaggcaggcaaatcacttgaggccaggagttcaagaccacccagacaaacatggtggaaccccgtctctactaaaaatacaaaattagccggatgtggtggcacatgcctgtaatcccagctacttgggaggctgaggcaggagaatcgcgtgaatctgggaggtggaggtttcagtgagccgagatcgcaccattgcactctaacctgggcaacgagtgaaactccgcctcaaaaaatcaaaacaaaacaaaaaaagaggcaaacaagaactaatgtccccagaaaccaaggtcatagagttctagaactgctaagataaaatgaccttagaaatcatctagctcaatggttctgaaggaaaaaaggtagacttccttctgaacactggagccagcctttcttgggatgccctcagttcctacatttttgtgtctatcagaattacagactgctaggccccatcttcagtttctaattgagtaggtctaggatcgagcttgaaaagatgcatttctagtatggtagttgatgctaattttgttggtccagggaccgcactttgagaatcactgatttagtctctcattctactgattaggcaaattaggccctaggagataagacaacattctcaataacatgttacaagttagagaatgaaaattacattctgattctcctccagattcttctgaggaactgattgtaatctcataggtgcaaaaagaataaaccaattttaaactgatataaagtgtatttttaaacatttatttatatattggtcctactgtttcaaaatattttcacccttctggtccatgaataaaaatccttatttgaatgcaaaatattaatgtattcttgctgagaagccatcatgggaagttacagaagtgacaaataaattaattgagcatgatagaattctaatgaagtaaataattcttgaaagtgctctatgaagtagacagttgtgtgtttttggtattcaacccaaaataattcatattttgctatttttaatgcatttctgatttccatgcatttttaattcatttttatttctttgtagagaaaataaccagaacattacaaataatactggaagttgtaccagaagaagataagttatgaactaatggacttgagatcttggcaatctgcccaaggggagacacaaaatagggatttttacttcattttctgaaagtctagagaattacaactttggtgataaacaaaaggagtcagttatttttattcatatattttagcatattcgaactaatttctaagaaatttagttataactctatgtagttatagaaagtgaatatgcagttattctatgagtcgcacaattcttgagtctctgatacctacctattggggttaggagaaaagactagacaattactatgtggtcattctctacaacatatgttagcacggcaaagaaccttcaaattgaagactgagatttttctgtatatatgggttttgtaaagatggttttacacactatagatgtctatactgtgaaaagtgttttcaattctgaaaaaaagcatacatcatgattatggcaaagaggagagaaagaaatttattttacattgacattgcattgcttccccttagataccaatttagataacaaacactcatgctttaatggattatacccagagcactttgaacaaaggtcagtggggattgttgaatacattaaagaagagtttctaggggctactgtttatgagacacatccaggagttatgtttaagtaaaaatccttgagaatttattatgtcagatgttttttcattcattatcaggaagttttagttatctgtcatttttttttttcacatcagtttgatcaggaaagtgtataacacatcttagagcaagagttagtttggtattaaatcctcattagaacaaccacctgtttcactaataacttacccctgatgagtctatctaaacatatgcattttaagccttcaaattacattatcaacatgagagaaatcaccaacaaagaagatgttcaaaataatagtcccatatctgtaatcatatctacatgcaatgttagtaattctgaagttttttaaatttatggctatttttacacgatgatgaattttgacagtttgtgcattttctttatacattttatattcttctgttaaaatatctcttcagatgaaactgtccagattaattaggaaaaggcatatattaacataaaaattgcaaaagaaatgtcgctgtaaataagatttacaactgatgtttctagaaaatttccacttctatatctaggctttgtcagtaatttccacaccttaattatcattcaacttgcaaaagagacaactgataagaagaaaattgaaatgagaatctgtggataagtgtttgtgttcagaagatgttgttttgccagtattagaaaatactgtgagccgggcatggtggcttacatctgtaatcccagcactttgggaggctgagggggtggatcacctgaggtcgggagttctagaccagcctgaccaacatggagaaaccccatctctactaaaaatacaaaattagctgggcatggtggcacatgctggtaatctcagctattgaggaggctgaggcaggagaattgcttgaacccgggaggcggaggttgcagtgagccaagattgcaccactgtactccagcctgggtgacaaagtcagactccatctccaaaaaaaaaagattatatatatatatatatgtgtgtgtatgtgtgtgtgtgtgtgtgtgtgtatatatatatatatatatatacacacacacacacacactttttatatatatatatatatatatatagtggaacttacaaatgagagtaatataatgatgaaattttgaactgttatttataaacatctaaggtaaaatggttagtcatggccagagtatgtttcatcctttaatttttgtccatttgaaaataaggatttttgaaagaattataccaattaaaattattaaaggcaaacatagaattcataaaaaattgtccaaagtagaaatgatgacctataatttggagcatttccaattcagtaatttcaattttgctcttgaaaacatttaatatatatccaagactgacatttctttagctgaacctaacgtttgggtctctgagtgaatttataataactccttccttccttagcatagggttttcaaaatttgatttataattcctatttccagtaaatattgttcatttgtccacatctctccctatgatatgttgctggaggtaagaatttctttcatattcctattttttttttccccatagactaggctcatagaatttaaacaagcaaattttcctgagctttttcttgccaaatgaaagaagactggtaaattctcatagagaggtttgtgtagttcttggctcttcctggggttaatgtgcttatattcacagtggcaaattggtctcagactttaatttatttatttttgatttgaatttctctttaaaagtatcaatttaaaaggtaactagaattattctttctcattttcaaaagtgatttttgcattattaaatttccctgccattgtaatgccatttcacgcagaaaaaaagtcagccagtaattaagaaaaaaagtgatggagattaagtagtattttggcttatttttaggactcatcatgagaagacacagttcctttaatcaggaaattaatatccataattttcactcaaaattgcagtatgtaaagcagattctcaaaaactctcctgaacacttatttatatatatgtttttatataagtaaaatttttctcatatttttatacgatatgcacacacacacatacatgcacatactacttactacatgttctgtacttgtactttgtaccatgcatattcaaatgtttatatacataagtttattataacataaacagtaaaagtaatgaatactgtttaaaataactaatatagtattttttaatttttgtggggatggattctcaaatacttgtgattttaaaagattctaaagctaaaacacaacttgattttaaaaagaatgattctccttacacaattataaatatttgcagtaaatattttccttataatactgttttgaccccatttaaaaagtattagattatattcctttgatccaatgaaaactgaaccttataaatggttagctgaaagtagaccttattcttgtccttctttagaagagtaaagatttgtcctagggaagatggctgacttcggttcccaacatgcgtatgcatttagactgtagctcctcagccctgtggacacaaaatttggacagcttattaggttacgttagcaatgcatgacggtttctccaacactaagatattcacgttgaaacagatttcctgttcgtcttatgtgtctggtaaaattgtttccccaattacaatttgacatatcaatagagggttaacaagagtataattacataacagaattcctcatgaactgtaatcagtctacaggaaaatcattattttatcttgatttgcagatgaatatactgctaagaaagggagcaactctgacctttgttaaagttgatcttttgtaattgaggtataaggtatgaaaagataaaaaaccgaaggccagagaatcaggaaatgaaagatagtatggactgaaggtaacaatattttaatgttatgcaatatagtcagagaaatattaaaaattagttgtttgctgtgcataggtggatctcgcaggaagctaatgaaacctaagcttcagtgcctctcacttagacatgttccattcgaggtcctgaacctaactttgtattaggaattctgtactaattttgttgaagaagaccagcaaagttgtgtacacttctacccccacaaaatctgcattgtccatgtgagtaaagtaaaataattcctgttatttttttctgttagaaataagtatggaggatatgtttttaaaaatttatgagttaattgaaatatccatatataacaagtgactttctcacaatatatatgatgtgatatatagggagatagtttcactttcatcatattttatacgttgattctgaactatagaaaaataataaatgggattttaattatagctcttagttgggaaagaaatatagagagatgtgggatttgaatgcccatgaaagacattttattttacttgaatatat

SEQ ID NO: 10222 - DNA, 6000 bp, Homo sapiens
cctagaaaattacagtcgacttcatgagcttcatttggatttctcatcatgcaatagcaaagtcacagttattcctactgagatcacaatgatgctgccagagcctcccctgagcttgagagccctcctcttctaagcagcatttggaggtgagtggcgcagcctccctgtcaagcctggggacaaaggattcacctggtgggccacattcttggagaatatgttggcttctttgcgtgtttgttttcccatatgttgactgctgatgtttgtttccttgcttatttgtttccctgggtcacccaactccagcatcctccattgtatagtgggaaagtggatatctggctttccttccttcctgaggaaattatgaacaagaagaacaaactccaagctaaatacaagtcacgacttttccagaatccaaaagtaaagtaactgtgaagtcaaattctttacaaaggggtcccctctagagctcagccatccccatacttggagtctccagggctctgtttcatacttctctcaccaagacattccttttctaaccttcctctgcaaatatccacccacctttcaagaaatgccacccctacacacaggaggcaaagttccagatgcatcctttctcctgccaataatccatggccctacatctgagttactgactaaaatgaaaccctggtggggtgggaggctcagctgtgatggtcattagtgtcccaagctggcaagctgcaaactctccaggagggaagggctttggtgtggtctcagagggaggtctaggaaggatgcgacccttcacgctgggtcttctgccgctgtgagttgcagccatgccatttgatctcctgattcttccagctggataaccacttaacccacacacatgcacacccctccaagggaccgatgtcaatgctgagtccaaacccagaatgaggaaggggaatattttcctaatactgtattgactcagccttttcaagaggccttgctctcctcaaccagcaaatcacaagactagagagaagtactgggtttctttcattcttcccctaaccctccttctaattgtgctgtttcaaactcccaggaataagggatagcctaatgtaggtagcatcatacacctcttattgtcctcttccaggaagagtgtgaggtcaaaacctccaatgctccactcactctctgttggaggggttagaatatagaaaggagaaactggagagtaccattgggcctgcatcgattacaaagcaaaatctctatgttgttcaacaagtgcaaaaacaagcagctactttactgggttactctcctatgttctccagaccctctaatataagccaaggctatgtaagaagcacagatattaacaacacttttattaatgggcagatacctctcccacccacatagatctctctgccaaagaaaacccaatacaggggctacttgaagtttttgaccaagagttattatttttccttttatccatgtgacttagaactgtttctcacatagagtgtgcagagtcaccaggaggacttgttaaaaatcactgcctcttggactactctatccagaggtctggaatggaaacttcatccaccaggtgatcctgaagctggtgatcagttcgcccatagttagtaccaggtgcccccagcagacattatgagctgatagaactgtaaaaaattatgctaattccaaaaaggctagtctgccctcctggggtgccatgctttcaacagaaaaaaataaactaaatctattctaaggagtaaccacataattagaaggttattaccacgttgtggaaagaaataaatacagtgataaagaacaatggaatttgtgggttaattagtaatacagtgctgggcttcatgcagttacagaccaataaaacaaggacatcagactggttcacaaaatacttcctgatttctgaagctgaagaaaattcattgggcttaaggaggtcaaatctgagagctcaattatcttagtctcctaacttattgttaggagcataaccattcagcaggttgcatatgatgtgactgttctggcattttttctttgcaatctgtttataattctcagcaacattttttttaaattaataaactttaaacattatatcagtccatatgttaagtatttatttattaagtaaaattctattgaagactaagaacgaagacacaaagatggctgagacacagcccttgcgatcaggttgcctacagtgtagcggaggagatgaaagaaaaatcaatcaaggttaggtgtcaaatgaaaacaggtgaagtactcaagaggcattcaccttgggaagatcagaggacatcctgcctgaactggatctccaaggctcaacagtttgtcaggtgaagaaaggagaaagagagacaaaagaactaacagatatatggaggtgtgaattcacacggcaggtaatttggactggtgaggatatgggatattaggggacacaggctggagactaatctggaaaggaaggcagcagccagttcatgcttaaagtttggaccttatcctgaaggcattatgaattcacttaaggatctttagcagacatattgtaatacaattggcttaaaaagaaaagtctgaggagctatggaggatggattggaggggacacagagagaggatccatctaggagtctgttgctctgtggttgatcaggaagatgatggggactggagtaagacaggcaatgaggcaaggaagggaggtgttcagaaatgaataaggacaggatagataatgccaggagaccagctggatgacacgggaaaggcagatgaatgaatctagggtaacgcccagattcatcatgtaagtgactgagaagatacgggtacccgctaaccaagctagtaaatacaagcagaagagcaattgcaggtcatcctgtttcttctcatcctcctcctccagattctcatcctttgcaccgccccattgtaggtgttctgtggtctcttcttcctgagagctgtcatcctctctgatgattgccgctgtcaaaggggtgttagctggtatgttctcacatggccatgcgaggtgttcatttctggaatcctttctggttgatcaggcagttgttctgataggtcagcgtcttccctttatccatactatttgtgtgtgtgtgtgtgtatatatatatatttattatttttgagatggagtctgactctgttgctcaggctgaagtgcagtggcgcaatctctgctcactacaacgtctgcctcccagattcaagcgcttctcttgcctcagcctcccaagtagctgggactacaggcacacaccactatgcctggctaattgttttgtatttttagtagagactaaaaatctctgtgaaagatttttgaaagattaatgtcatgacagactcaggaacagaaagcttcagatggatggaagtggcagtacagactgttgaaaagacatcttgtccacctttgtaaggctagactatttgtggtgtggatgtcaaggggtacctgggcaagttcaagggcactgctcagggcataccagcaacaatggattctcaaagcacaggaggaggatgaaggggacactccagcacaagctaggattccatggtggaagcagctaagtaaatgtattcttccaggagtgaccttccatagagatagtgtctctgaccacgctgaagctgaactggagctgggcaaggcagagaggttcaaatgaagggtgactcccactatcacaccaagccccactgggcagctgacctgcctgcccatcctcctcctccttagacagaaaacagcgaattccattcgcctttctgctctcaatgaaaggctctctttgggttctttactaatctacaatctgtaaaagtactttccctgtgacttttctccatttcagtactgtcttctctaaatgagaattaaaagcaagttccccacaccgacctcaagtggtttctaagatagcaagagtgcattttgcaggttgtctgagaatttaaaagagatgggggaggggaggaaatagagtcagagtgaatgcagaaatgctggagaagaaaacgggatataatactgcggaatattttaatagtggggacacaaatgtcataattaataaagcaggtggaaagttcgcgctgtggtgcaattgtaaagaatgcttattaaatacttaaaaacaaagaaaatttacgtttctcaaaaggacagctgaaaaattccttgagctaaaatgtgttgctattcaagatgccataaaactaatgttaaaatatgatatctcatttcaatctttttgggggaaaaaatcaggctttgactcactcatacgacagatcccacgcacccacccaccaacatggcccttggcatgggcgacctgcccacgtgtcgatgcaatcgtgcctctctagagccctgcttccatccgtttcccgagcttcgatgtcgtgacgagagaccgcggctacatcaaccttgggcaaccagatgcagccgcgtgcggcagcctggcactgcccggagcatgctcagtcgggtcctgacccacttctgcaggtccgacctcggggcgtggggtcagaggcactactttgccagtttgccaggaacagagaggagcagagagactgagagttgctaaagctcctctcttggcacagcaatgcctgacccggcggcggaacatgcccagtctggctgccggagccgccgggagcgtcaatgtggaaagtccacctttccgggttttcgcagcaacccaccgggaagagggcggtacgggagtaaaaaggccggagtggggtgtggccaagagggcgggcactaaaaagccgggggaaggagcctggtcccgccccagaaattgagagtctctgttctcttttaaaattaaaaaaaaaaaaaaaaaaagggagataaggaggagaagaagccactaacattgcaggatcgtgtagcgaaacttctgtaggtacttaataattttagagtactctactttttaattaaaaaatcaacttatggttcattagaaaaaacgtggaaattacaaataatatttttaaagaaaatgaaaaaaaaattcctggaaccccaccactcagaaagtcaccagggaacggcccgctgggtttttttccagactcttccatctgtggactttgctttaagagacgtttaagacttacagcgcagtcgcccgggaaggcctgagaagctttcggaagcaaggtggtttgctcgtgattgcatttgattgcaaggagacagggtaggcttgggggtgggttgactggttcccatttagcgccccaggatgggaccctaagaagccttttcctgggtgtccttgaacacgcgtgcgatgcgacgcccacagaagttgcggtggaagccccgggcgggagagagagcggagtgagagtcccgcgctgccgcggaggccctgggcctgcgggtgtggggctctgggggccgccgaggcccggcccagaggctgagcggactgaatgcgggactccccggcaactacagcctccggtggctcctccgcggggccgctccgcagcaccgactggctcgcgccgcaccgcccgccccgctgcccccgcccgcggctgccgcgaaaacccggcggctacacccgcgcctccgcgccgcccggcgagccgcactgggcatgctcggccccggccggcccaggctcctgtaggtgggaagctccgcgctcccggcagccggcggcgcagctcgcaacgctgtgaggcgccggcggaggcggctcgcccgcagtaggcgctaccgggcgtccggcgcagagtgcggcgcagcggccgctgtcgggctggccatggcgaggggtgcacggcggccacctgagtggcgcggcggtgtcaggttagcgggggcccccggcgggc

SEQ ID NO: 10223 - DNA, 6000 bp, Homo sapiens
gtgcaatcagagtcagctggcttcttttcatcaatgctgctgacttccaaggtgttatttttacctctactggtgcacatctgctgaagttgccacagaaagtctagacctcaacagggtgtgattttcttagacattaagtctaagttcataggagttcagatgaaaaaccaattacattttacaagttattttcaagttaaatacactgcaatctcaatggctacataatcaagaagcaatatgtcacctttttctaaagaacatgaaaccttgcctcttgtagttctgtttcaatttctctaccagatttctaaaagtgattagaatatccagattgacatcaaaacaataattacatgtggttttatttaatttcaagtgataaagaaataattcgtaacaattttgttgaatcaaatgctaacatgtggtaggatctcaagaaatttatactgagtaaaaacaaaaatcaagcaggaaatatagtaggaggatgcttgttttgccagacatttgcatgttctgatgaaatgctactaaaatgattatgggataatggaatatgtcagctattaattaaatatatagcacccaatctttatcattttataccaattttactatcaaagatcaatgaattaactaattcaaattaaggaagttttactgaatttttttttgtgggtcaagaggatttagtcagcattttactatatgtgagtgatcctaaataatgaccaaaatgagaaaggccaatgaggccactttatttatgtaatttctacagaacttatcttcccttcctagaattactataaattaaaattcagtgtctgttcaaagcaataaataccaaatgggacagaaatagtttccttatgtccatacctaccctttgaaagtacaaagtaatacatttttattaaatcagactatctcctctctttgagttactgcttacatttcctgctaagtgactttatatagaaccttccccttgtttacatcatagccctatgagaaaattatcataatttccagctcgcaaattacaaaagtgactatgagggattaagtgatatgtcaaactagtgactaggtcatctgatttcaagttcagtagtacttttatcattttttttcatttttccaccatgtttcccaaacagatattatgaagatgaatttcagaaagagttgaatcaaaaaacagaaattaataaaggcacacatatacaaaaatggtttttaaaatcagaaaaatttttcacattctcagagtttattctaacaaaagtaagagcagcttattaatttatttaacattcagatgacaaaatatatatatccatgatatgcttcaaaatgtgaagttagaaataaatttataattatgcaatattttatttattacataaaaagattttctacgtaggattacgcataatcaatttgaataattcttcaattttagtaatcatcagattctgaaatagaacataaaatggaaagatcaaattatattttagcttccttaaatactttagtgaatattttagtgaactgctacaccctgaaatgccactagtttacattcaaaattagaaaataaagacttttgcatttttctagaacaaaacttatgcattaatagtaatgaaaatattttctcaccgcactgatttactctatatcatccagctttgttaatttgctgtaacatagctcagagtagaaagaagatgtaaggcagtcctgtggtttcagaagttagacctttcattgccttgtaaagtagcagtaacaacacacttcaaagtgttccaagctactttgaatctaaacctattgaattataagtcccattctacagtgaacaacatcttcaaaagaagctttagaaagatccctaagggtagaacaaatgaaaaataagatagaaaggatgcaaccaaaaggatgctgattactcttccatggattttagagttgcttttagtcctccaaagcaatgtgcttcaggctgccatatcatgtttattgttctagagactatacattagccttgagatctacaattgcaaataatgaaaatgttaataaaaaagattttttcccccaaaggtgttcttttaagaagatttcttcactttcagggtggtttccaagaatttctggaggctttcttctagagagagagctcattttgaataactttccctgactcaagaactcatcattcttttaatttatccaaacatgaaatgaaatctaattcctttattctataagactatatagaattacataattacatagtatgtacaaaatatatgtagcaagagtagtaatcacattgatattttcaatgataaaaatagctaatatttttgtcagagcttcttatgtaacaagtttcaatgctaaatgcttttcatgcattatctcatctcaggctcacttaagcatgtgaagccagtttagagttatttccattttacagaaacagaaacggaagtataaagagcagactacactcaagccagctgaaaagcctgtgcctttcatcagtatgcctgaagacccccttttattgctaaatgcacgtgatatttagtttaggatcacagtaagtggtatgccagtgattgttaaataaacggagagataggtttctacctcttgcatattagaatccaatggcaaaagatggaaaatgacctgcattatgtcatagggcttattagtgttagaggtgaatgggtattgccgcttggagtatacttatccacgttcagaggcttagctgaccattgtcacttagcctgggtgcctaagcaatgatgtgatagggtagggaaggctttgagaggggagaaattctgagctgacccctccactgttctgtgagcttcacctattgatgtgcttcattccacgttccagaaagaaaggataaagaccacttaaaaatattaatattatcctttcactctggggaagatgagtaaaatgtttaccatatacagtcaagtgtgtctaaagaccaaatattctctaaatttccacctgggctattttattcttttaatcagtaaaataagggggaagtgttattgccttacgtgactgaaatcctgccataaatctttatgcatattttgcctcataagtgtttgttcagcaagactaaaataattctaaaaggaatgtaaactttgatattattttaaaaaagaataccttttttatgatagttactctccttccttcggtgatttaaataaattaatattcagcaaattttatttgctaatattcttaaggcagggtttgtttcatcttagatgtataaagtataaatatgtctgccaaatcttagtttaaggacgttgttgagacagatgttgaccccaactattagcatttcatagtagagacaaaaaggaagtaagagttgagatgagataaaacaatattattagaaaacatgtgtttgagaatgctctggggttctgaagtactggggcatttagtaactgctatttaataaaaaggtttgatctcctgcctctctttatatttgtcatataaattccttgctatccttaatcccaataaactctatgttaatcgcaatataactttaatatacgtgcataagttctatcatgggattgattcccattttactattttgcaaaagtgctaattttagtatatattatgagggttattgaataagtttgacttgtttgagatttcacctaaatcgtggggtaaaatctagctaataactcatcacaaaagggatgaatagggttgaataagaggtctagtttcattcagtatatttattatatgctgtactgctattttgaaaatgtgactacttgaggtgttagaagtttagccagaatgcactagtgaatctattccagtctttgatcaaagtgtacttctgaaattcagaagaaccaaatatctatagaaatgtagattttggcatccaggggctatatttcagacagttttctgtctaatgtctatcatccatccactaattcatacatctacatgtccttttatccagcatttaccatgtgtgaactaaagcttcatgtaaatccatgcttaaactaagtattttattcaattctatctaggatacatgaacaccttgtatacactttataaatattaaaaattgtttctgaaatgtatttttaaagcttgggtattttcaaaattaaaataatattttaccatatataagtgtatatactatatataaaatatgtatattaacatgcataaaacaaaacagacttaagtttataaaaatgttagaagagtacacactaatattatatactaatgtgatttgagaattgccatatttgttaatggtaaacatgattaaatagcttaaatatttgcgacatgacatgatgacagtttagtcctatggaaatttattgacagacttttaattctcctgaattccttttgcaaagtgaatactttctaaatacccaggaatattttctaaagtttaaaaaaaatctgtggtgagatttgaaagttaaatacatggatgaagaggcatgataatgcagatggattatttttttctttgtacatcagaacttctgccaagatatgattttccagcaggtttattcacttaacccattatgcgcactatttctcaaccttctgtgctgcaaatcaacagtgttgtgatactgacttatgtactgtatcccataaacttcctataatggagctttgcagattaaacacaaaattcttcttttttggtagattacattttctctctccatttctttctcttttgcagttcattatgctgacatatcttttcatgttggcctggctgggagtcacggctttcacctcactgccagtttacatgtacttcaatctgtggaccatctgccggaacaccacattagtggagggagcaaatctctgcttggaccttcgtcagtttggtaagtggatattggatctctaaactgtaaaacaccatcccatattgtgttacctacatagctgcctctaaaatattatagatcactttggaattatcagtaccttttctaccacagagataaatttatcagagtattactgctaaggctattccctttaaatttaaagtagaaagtcaagggtgaatggatgttaatatcacaacatatacacatgtatattgaccaggatgtcagatcacattacctgatattgacaggttagaagtgtggtttccttttcttgattcctttgctcttttccaaactcaacgtgatgtctgcattctacttttatcctcccatgataaactgcacaaaatgtcaagtctacaataaagatcacctaagaagggcacagttcattgtcttctgaaatgggagggcagcatcttaattagcatttaataataataaaaacaaaaaaaaaaacgctaaataaattaggagtctgctttggttattttcatttagggctaaaatctcatgtagtaataatactcatatgtatatggatttaccacatatagaccctattttaagtatttcacatgtgtcacattgtttacttctcatgactctatatagtaggccatactgttttcttcttttgtagatgacaaaactgaggcacagtggggttgttcagtgacttatccaagtttatacagctagcaactgacagagataggattcaaacacgggcaacgcaggttgaatcagaggctgtgttcttgctcataagtcaactgcctttcatattaaaacttagtactgagctggaagtggaaaggtagagtataatctcagcctatttgagattctatgttatcatgtgtaacattatgggagctacagaatttataaaagacatgcaaatccatatttgcaaatggattattttttctctgaacagacattaaaagccaccctactaaca

SEQ ID NO: 10224 - DNA, 6000 bp, Homo sapiens
gaaggattgcgtcagcctaaaaagcggatctttttgtctccatccgctgccacaaagctgttgacggaggctatctgcccaagttggctgccttctctagctcttatcagtaaacttatctgcctcattgtgacatatctacaacagttgcttagccttattcaatcagtattggaagacaagtggaatcatctttcttctcataggaaattttttgaatggaaacttgccctcttaaatatgtaccgccaaaatttagccctgctgtcccacgcaaaggctgtacatgacctggatatcgtcatggggcatgtcctaactataatcatcattttctcaagtggatgtacatgacagatctttgcagctgtgtgtgaagagagaagggaggagagctatatgttttgttttgttttgttttgtttgctctggagaatgttgggcatatcctgttgtcagcattccgtacatctcaggtggccgcccactagctctgtgtttctgggagcattctcctcactagagccctcgcgtgggactctggatcttgtgcttgagtcttgtctgtttccctggtttggaagattctcttttctgtcatagaaaactcacagaagttggagtccagccctggtatggggctctgggctcaagcctttctgatatttgctgttttacttaagaaaagtacttatttgatctcttcccttcccccggggcagccttgatttgttttaaatgaatcatcagtcgtctgtccaaatctcactgtatctcagcgtcttctaaagacagtagcccttagagttgatggcagtcttgggctgacattctacataagtgaaacaatttgagaaatataaaacatgatcaaaataagagcaagagaatatttttatgtcccctttacatcagtggctcgcacccttttctttttcccccagtcagccaggagatgttctctactcctttctggtgtgcggtgtaggagtctggtggcgggtagaaggagactactgaagttggaaaatgcttaataccccctttctttttggagaatcactgttctatgaatatatcctcaagggacttgctgcagagacacagtcagaatcacagagggtctgacacggtcagaatcacagagggtcattcatgactcagtagatgtttgttaagcacctgtccttggctcgggactgtgttaagaaccaagggcatataaagacagatgggaggagaccctggccggggagaggaagaagcatctacataggtactaagtaccattcgctgtaagtgtaagacaggaggtgctaagtaccacacaggggttacaaataaagaagtcctggagttcagaggaaggactgattgcttctcatagaggggattgtgtaggatttctgggtagttgtggaaccgccgcctcctcccacatgaaggagggccctgaggaccctggaaggttgggccggttgctcacaaatcaccctcctgtctcctcctcccagtgtctcttcagtgttttgccattcattctcaggctcaaaattacttctcttttgtccatttgtatccacttaagcaatttttaaaaataattaaactttttttattgtggtaaaatatatataacataaaatttgtcatgctaatcatttttaagtatacagttacacagtggtttgaagtacattcatagggttgtataaccattaccaccatctagttccagaatgtttcgtcatcccgaattgaaactctgtgcccgttcagcaataacgctcattcctcctccccctgcccagcccccagtaacctctctgctgctttctgtctctgtgaatttgctgattctaggtacctcctagaagtgagatcatgtagtatttgtcctttgcttcatccatgtcatggcatgtatccaaatttccttctttttaaaggttggataatgttccattgtatagactacattttgatccgttcatctgttgttggaaatctgggtttgaatcctgggctcttaaagcattgtgcagctgggcgcggtggctcacacctgtaatcccagcactttgggaggccaaggcgggcagatcacaaagtcgggagatcgagaccatcctggccaacacggtgaaaccccgtctctactaaaaatacaaaaaaaaaattagccaggcgtggtggcgggtgcctgaagttccagctactccggaggctgaggtgggagaatggcgtgaacccagaaggcggagcttgcagtgagccgagatcacaccactgcactccagcctgggcgacaaagtgagactctgtctcaaaaaacaaaacaaaaaaaaagcattgtgcatcgtggcttgtcattgtcagtgtcacctatgccctctgtttagacttgaacacccacgcacgactgggctgatgtgctcagctcttgaggtctgtgggctttggcttcagacccaggcactcatcctgttctcatgtggaactagggcaggacatttgactcctgtacagtttcctgatctttgagctgaaggcagtaacaaccccgtgcagtaaggactgtgacgaggacgcatttagccctgtgcgcagtcccgtagcacagcacctgacacacggcaagtgcttaagcacagtggctcctaacaaactcataactaagcccatttccccaaacatcttccttcccctttcctatcctatcctatcctatccgcttgagccctatcgtttgttccagattaatgtgcgaaagtgcgagccctgaggtcaggaggcacttctagtagccttgtctctgtccctggggcatgaaggatagctcattttcccagatgattctcatttgtcaaggaccagctcagctgtgccttctccatgcaaccctccctaagagcaaatgctccctgtcagaattcattttgcacttactgctactctgttatccactattttgtgtatacatttatgttatgtcttttaattccaagcccaatataagattcctgtcccaatataagatgaaagtgtcccaaaattctccttcagccttcctagttaagtcttaccaaggctgtcatagtatgaggtgctctcagcccctgtatttggaacagcctcggggagagagggcaccttgtcctgaaaccgtctctaccagtcctagtcatgggtccttgtacaggtcaactagctgaattagactttttctacagcaaatgtaatgctagctgggtaattatttcttagggtttcagcttacaaaggcaaatgttggttgttactgtaaaaagtgcatttaaaaatcagtttaaaaagctataaatagagtatgaggtttagttagataaatgtggacccataggacaaaatttctcctgttctaatatcattcaaatgtgttcttgtgacttgggagaattttttcactagtagcacatacatgacttcaaaaactgcttcaatttcaacaacttcagtggaagaggaaaatgtgaatgtatgccacagaaaaccattcgatgcctcaaaaagtggctgtagagatgccccaaaccctgtttgaagatgcatattcaaagaactcaaataacatattaatgaaatgtggtttatttgtttattttatttttattttttttgagacagagtctcgctctgtcgcccaggctggagtgcagtggcgcgatctcagcttactgcaagctccgcttcccaggttcacaccattctcctgcctcagcctcccaagtagctgggactacaggcgcctgccaccacgcctggctaattttttttttgtatttttagtagagatggagtttcaccgtgttagccaggatggtcttgatctcctgacctcgtgatctgcccgcctcggcctcccaaagtgctgggattacaggtgtgagccaccgcgcccggcctaatgaaatgtgaatttaaaacagtatttctaaagtaatttagttcttcatgtgatttaactggagatgtagtttaatgaatacagaaactgctataagatatttgaccctgcatcctaaaaatttatctgttcaaattcgacatattgtgtttgagatctctttattttggggggcatatatgatatttgtgaccaatgtgaatggttgaggtatggtcctcattttactggttaacagttcaaagctttgtgtctcactctttctctgataactttataaggggatgggcagggagtggtttaagtgtagaagtattcagctggacttgaatatttcaataagtcagattaataaaatcagggcatctgctttgtttcttctttttacatccttaggaaattcaattggtgatctataagatcactttaatgaaaattaagtgggtttaagatttattatacttaattgggaagaaaaagccacaaggcagtgggtgggaataactgactccctgtggaaccacttgcatgtttgttatgggatcccaaagttaccccaaatctttctcctgatgctcagagtgaggagatgggcccagagcagtgaccacagtcagggagatcagtgggatagggtttggacagcaacctctgctttcctctccagctgggagactggcatctcttttgagctgccgtacctccctctctctagggagagcctgactgctcttttggttcaaaagggaatggcttaagcaaatctaactttagggaatttgccaagccagggttaaggagcacgaatccaacaggtttggagtggtgctttgaaagagcagcaaatggcctggctgctgctctcttgttcctccctgaagcctgagctctgcccagctagtgaatgacaaagggggcgctttcagcctctgtaaatagcctattgtacaaggggaggaggcggggcacggaatggcagcatcttgccagcttgggttgctgcgttaaggaaagatgtcaggctttcttaatttgccactgcaggggcaagggtgtcatttatgtgggtttgtttgagggctgcattcctagtgaagtattccatcaaactgccattattcatcttgatgaaagcttgaggaactttagaaggagagaaacatccagaccacccggtttttggtttctaaatgacatgaagagaatacaatgttaatgtaagtaaaagtttgcagagttgcaggggcagtgtgtgtgtgtgtgtgtgtatgtttgtgtatgtgtatcttcaagagaatgatgtccttgtgagtcacctctggccctgagccactattttcatggtacaaataaaatggtgaagaggtgaacctttgtgtatagtgggccttgaactcaccacgtgttcagaggccagggtgatacaataaatgctaacgtttttgtaagacattgagcatttaggtggacctcaggagggagctgtcataatacctgggagtgtgagtactggaaggactttagaaacctgacctcatggttcctaacctgggttgggctaaaggagacttgtgatagttatgtgtgttctcaggggagagggtcagtggcttagcatagttaagaattattagcataggttggatttagagtcacattggttggtgtcccgttcttgactaacatcctggggaaggcttataagtctctggccttggtttcttcctcatcagtttgcttttgtgatgttcagataagacactggatatgaaagcctttccaaaacactaagtaaatgctaattgcatttttagttctatccaaagtttgggtagacgggtaccaggattttggtttctgacagtccgtgcagttcagtttccatcaccctgcctcgctatgcctgtctctgcccaggtctatttaaaggaatctcctgtgctggatctttacactgggcttgtgcccagatttccttggccattgttaccttccccatccttctgtggttttagactccaggtttacagaaaacccagctgagcaaacccact

SEQ ID NO: 10225 - DNA, 6000 bp, Homo sapiens; identical to SEQ ID NO: 3817

SEQ ID NO: 10226 - DNA, 6000 bp, Homo sapiens
ttttcatccccagaagtacgatttgaggcttttttccccgtctttacttaacatattgtctttcctttcctccagcatcttgaacatatggaacatggtcacagcataagcatgtgtgtgctgtcctctacttgccctgtcacctccagcatcttgaacatatggaacatggtcacagcataagcatgtgtgtgctgtcctctacttgccctgtcacctccagcatcttgaacatatggaacatggtcacagcataagcatgtgtgtgctgtcctctacttgccctgtcacctccagcatcttgaacatatggaacatggtcacagcataagcatgtgtgtgctctcctctacttgccctgtcacctttgtcatttccaggtcagttactacaacctccacctcccggattcaagtgattctcctgcctcagccttctgagtaactggggctacaggttgcctgccaccacgcctggctagtttttttatttttagtagagatggggtttcaccatgttgtccaggctggttgtgaacttctggtctgaagtgattcgccctcctcggcctcccagagtgctgggattacaggcgtgagccactgtgcccggccccaggtcaattttgattgatttttcccatctctccatatgggtcataatgtcctgcctcttttcatgcctgtttttttgttttttgtttttcccggatattcaatattttgtattctaccttgtttggtgctggatatttttgtaaacctatacatatctttgcatttgtttctcgaatgtgatcaagttacttggaaactgtgtggtccttttttttcaggcagggtctcactgtgtcgcacgggctggagtgtagtggtgtgatcttggctctctgcagtctcggccccctgggctcaagtgattctcccacctcagcctccccaatagctggggccacaggcacgcatcaccacattggcgactttttggatttttgtagagatggggtttcaccgtgttgctcaggctagtctcgacctcctgggctcaactggtctgcctgccttggcttcccaaagttctgggattacaggtgtgagcccccacatctggctctgggtcttcttattcagtggtgtttggtgggacctgaactgtatttagtctcgtgttgatgcttccctactacggggtgagaacttcttcctgctctaacgatgcttccccactctggctgctgagcacaggcactattcccagccctgcatgggctctgatcctgggtgggtctttccctggccttgagtgttttcttcacgctcctgcactgatctgtgcttagctgaagcctccaggcagaccctctgtgggtgtctgggcttctcggtgcagccccctcctctccagcactctggagcacctgtgaactccagcccctgcctggccacctctgtcttcccagttgagggagacgccggtggctgcctgggttttctctgcaccggcctgggcagtgggcgggactgtcctcgctgccgggtcgcttcccctctctccagcaccacggtcctcggtttcgtgagcccagtgccttacgtgctgttttcacacctatttttttggttgctgcagctgagagtgtgtaagtcactgttactgcatctccattctctgccaagcctcctccacccgcctgtccttgtcagtccctacacctgctgttcctgagatgccgcctctgtgaggcctgcccggctctcccccagtcctgcctcttctgccccggggcaggtgctgtcgcgggcaagcgaggatccgtgctagcgaacctgcgcgcctggggctcaccggggctgggtaggtggctacaagaacctgtcttcccgcggtcaccccatggggttggctgaggatggggcctgagaccccgagggtggctgaccgccccgtttcagttttaaggggcaggacgtgcttgcgccggcccctcggctccgcgctgcctgacccgaagggccgtgggagcggggagggcccagtccctgttccgggggtgggcgaggggcggggggctgcctgaggacggggcctgggccggccgcgggctgggacgtggcgggcggggcggggcggggcggggcggggcggggcgaggagacgaggaaaaacgcctcgggagctgccgcgccggcgccgccgccaccgccagagggcagcgcgtgccggcgcgggaggcccgggccccgcccccgcccggccaggccccgccccctccccgtccccgcccctgtccgcctcgggccccgccccgtctgccgctccgcccctggccccgccccccgtcccggccccgcccgccaggggccgcgacgctgcccgtgcccctcccactgcccgctcattcgggggccggcacctgccggcctgtccgctccctgcttatactttgcacgctcgcagccacgtttccgcacacctgtcccctttccacgcacctgtgtccggcagcccgcacatctgtgggagcgctgcctcctcgccagctgtccgggaagttcagcgccgctctcccacgggcgtgagaccgccccacccacctgtccgtgactgcagctccggccgggagggcggcaggtgggccccggcgctgctggctccttgtgggacagggccgcggcggcggcgcaggacgttctcccgccgggaggaccacgcggcggtccctggacccttccccgggtgcacagcggcggctgcgccagcgggggcaggatgggccgtccgagcgcacctccatccgccctcgcgacgcccacgctggcccagacgcgggatttggggtggaggacgctgggctgggaaccagcaccttgggacggccgggtagttcgggccttgaggagtcccacaccctgacagctggcgccccccacgccccgcctagctctcctcggcctggggacaccggctgccaggcctctccagtttcagcctttcctgggaggacttcctggaagagggggcttcaggccccagaaagagaggctgctctgggggatggaggaggtgctgggatggtgactccgcggagtcgagggtgtgaggcgggatgtgggcaggccgtgaggtttgtgttgcaagactgggaggcaggatgaggggaggccatggggcggctggaggtgcggcctgggagccctgcgtgctgggccctgggcagggacggcaggcgaggcgtgtggaggaagagccgcgaagagctgggcgctgtcttctccacgcctccgtttcttcatctgctcctggggccgcctgcccggtagcggagattgaatcgcatgttgacgtctattacgatgattaatgttcttgtcattcccgtcactagcaggtgagaggctgggaggcctcaggtgggaacatacctttggccaaaggcaccaggtaacccgaacgccccggggaggacccctgcctgcatcgccgcggccgtccccccctaccccgtccccagcagctccggctgggcgaggccctgcttctcccttctgctcccgaagaccccccggggcgcagacctggaagcctcgaagctcccgcggccgtccagtccgcccccttctgagcaaccagagagcggtctgggcccggcccggggctgcgcagaggtcagactgccgcgggcagggccggagcctgctctgggggtcgcggaggtgtctcgagagttgaggacccgacccgggcgcgcgcgggcgcaggtatggggagggcgcggcggctcctggccggtcctaggagcctgcggggaccaagggcgcgcgggcggggccgggggcgcggcgaggctcgggttggggcggggcgggggcgggggcggggccggacccggggaagccgcccgcccgcggggacgtccgcaccgcgagggttaaggccgggagcccggcggggcgggggcggtgtgcgcgcgcggattggggaaaagtttggcggcggggcggggcacgggggagggctgacgcgcgcggattggccggaagttgtgccgggggcgggtcgggggtccgggctcggcgctcgctccgggagagttgacaaagccccgcagggaaggacgcctcgcggcgcggcgccccgggcccctcgccccgccgccccgggatcccggccccggcccccggccccgcggactcgcccccgccgcctgcccggtccgggaccccgcgccccgagcgcccgagcccggaccccgacccggcccgagccgcccgcgcccaggtagcgccgccccgccccgagaccgggcccgggggcgcggggcggcgggatgcggcgcccggggcggcgatgaccgcggagcgcacgccgcgggcccggccctgaccccgccgcccgcccgctgagccccccgccgaggtgagccccccgcgcgcgcggccgcgaccccaggtgggcacacgggggagggcgggggtccggggcgggggcggggaggggcgggttcggggccccagctgggcacgggtcatgcgcgccgccgccgctcctgcgggcccccggcctgccccgcccccgcccccgcgccccacgtgggccccccccagcgcaaatttgtccgctaatggcgcaggcgattatctgcggggcgctgagtgttgtgtgtcctgcgggcagggccggagttacaagcgccaggaatccagacggtgtttggagagggggggcggcgggggagcccggtaattagtgtaaaccctttgtctgcctttgatacccacagcttctccccgctgcggcttcctccgcctggagcgcgggcggggagggcctgtggggagggcggccagacccctgatccccgcggcccgggaccggggagggcggtatctcccagttccacgtgttagtgacggcgcccccaatgtccccaggtccggacaggccgagatgacgccgagccccctgttgctgctcctgctgccgccgctgctgctgggggccttcccgccggccgccgccgcccgaggtgagttctggcgcccagcccggccagcctggcctccgccagcgccgcccccttcccgcccggccctgaaccctgccacagtgcccgcctggcacgcgccatgccccgcccctgccgccccgctcgccaggcccccttccttccagggccccctcacccatgggctgtccacagcacccaccggggctcccctagctggctggaggggttcccctcatgcgtgcttgctggccaggtgggctttagtcctggctccccaggacatgctcctggtcttgcaaacactttcatactcgtacctgcagtccagggcagctaatcacctgtggattcttggggagtgggcggtttgtggccacagtggacccgataaggactctgggaacctgcagagacccccacggaaggcaggatgggctatgggagatattggtaatatacttggtgtctgggactgaaactgacccccagacccccagtcccccagccgacctagccgtgtgccctgggcctgcccagctctaggcaggcagtgccgggcggttgtgtggacaagtccccagagccgtgacgcaccccaggactgcgtgcctctgggcacacgctgtgctggcctggtacgtgctcatggcaccgacatctaagtggcagccatgccctgggacccagccccagcaaggacatccggagccgatgggtgacgtgtgcccgcagactcatgcccgccatgttccaggatccgggcacagcgctggctgcccccatggctaggcgggacctgtggccaggccggccctttgggcgtgttgaccactcaggattgtccgcgctgtgtccaccagtcctgaggcttcgcacccctcccctgccgcccagcaagcgcgccgcatccaacctggccttatatgggcacgttcgggtgctgggtggcgggcggtgaccaggtgggccttatgccacagcaccccccccta

SEQ ID NO: 10227 - DNA, 6000 bp, Homo sapiens; identical to SEQ ID NO: 1089

SEQ ID NO: 10228 - DNA, 6000 bp, Homo sapiens
cgagaggagagagtgtcagcccctagagagggggcggaagaggactgggagctccagccgccgcaagggcgccccgagggctcctctcacctcccccgtacccctaccccgcccatttcctttgcttgcccagaacggcgctgcagggcaaagccgccgccacttctttgctgctctggcagaaaggtcggagcctgggactgatgggggtgggagcaaagccagcaggcttcttggcccccgcagtctgtcctcgctgttctccatgcagcacacgtcggacccatttcccacgctggcttggctccgccgcgaagttggtaggaatgagagtgaggagggcgggctggagacttcctcccgctcgcaaagaggaaaccactccactgtgaaggacgcgctgcaactccctagtcatccgggaagaaatgtgcagcgcgctgaggaaaagccgcccactccttcgcgccccgctcaagtgtgcgcctggagagtgcgcgccagagccgcgagcaaatgctttgaagatgcggagaggcttattcaagtttatggtctggagagggaagagggagtgcacaacgtttctgcccaagcggctgcctgaagtttgcaaaatcttagtaaggcgatgaggggagtgagtgcactgcaccatattgccgcgcatcggaatgcacggcgcaaggccgcggagtggagacggcttctcccatttgcctccaacctgggaaaaaggggaaccagggtcggaggtttggagagaggcaggcgttccgataaacccgggttcttgccaaatgtaagagggatttggctttactgccacttagccggccgcgaaggcgctgcggagcccacccccgcccccggctcgagactgcggcggtgcgcactgagcctgcgcgcggggcttttctcgctgatgctgcagatacagagctgagaggttcgggtgccagcagcgggagggttagcgggaaggccgggttccctgccctggcctcggaggaggagccaccacccctggggtgatgctactttcacagactggaaaatactcgccagctccctgacacacacttagacacacttccatccaacgggcatctacgatcccctgtagggagagcttggaaatctctgccgcctctccctcctcattcctgttcctgcgcccgcccaaacaaccgcgcgctacatctgctcgttgactttattggtgtttgtcttgtttaaatcattctgcctcgtcacccaggtctcgtaaagaatacccacactggacagattttattttttcggctttaaatttttctttgaggggaggcccttaaatgtgtatggatacgtcaggcgagctgaagactaagcaaatcccagcagcggccctttctctctttcgagatggtaaaaattctccccaaatacctacagtccgtctcagtcgtcttaatcctagccgggcctcttcgtttacagccactgaaataaatgagtaaatggctcagttcaaaaacacaaccagacctgagatctgatgaggccggctgcggtggtcgtgaatgaaaattggagaagccttgcttcaggaaatagggacagtcaagggacacaaagtcaaaaggagagatgggaaagctggggacactttggtacacaaagttgccattaaagtttatttcccttttatccagataggtgacgctacactttgccagttactaaaggctgcaggtttctgctcagaaaataatatcgaggtttccaacatgtgtttattccccaggcgcgcacacacggtctacccccgcaagcaagcacgacgacaggaatgtcaagcatttaaacaaagacagacatccttcaccctccacccaccgccgcccctgccccccgcaaccatccaaagtctgagctcccaaaaaaggatctttctccagctctctggagtttgatgttctctcttcactactgcagcccgtcatggtttttcagaacagagtggctttctgggcgctcgtaggttccccaggaccccgataaccatgtcctaaccaagatcctaaatcgcgaaccggagacactttccggggggaggaggacgtcgtctgagagggagggagaaggagaaacctatcctgacaccagctccgaaagctctcacgcgtgaactgggcattagtcaagggaggaggaaatttaccagcccgagggagggaaaacaagtcccccagagaagacggcggtactcgctagggagggggactgggctttggcttaaagaggactggctgggattgggcacactttgagcggcccctggagctgaggctgggctttcccgagcgcggcggctggctgacgctccctcccgcctccttatcccgggccctcctccctcgctctctcctagtgtgtagtttcggcggctcggctgctactgccgccgccgctgcagcagcagcgtcagggacaagcctgatccgtgagcgagcgagcacccagcagcaaccaccactttgggcaacttgcgggtttcctgctcgcgggtagcgaacgggagattcccactagcggttcagtgtctccgagccgctgcagcccgaggggcggcgggagcgcccgcaccagactctcccagacgcgaaaagggacgagacaactgcggaattcaccagccgtgccagggcacttccgaggccacaaccgactgacactttttctccccttggcaaactggatttttttttttaagctacttggcagctgtctctgactccacctccccctccacccccgcccgaaagcctttggcttttcttcggaaatccagacagaattgggcatctttgttaattgccgttggggacgcccggccgtgcgctttcgccggctaacgtcgcctgtgctccgagcctggtttgctcacctttgaactgcaaagggatcaagttcagcttgagttccctgcattgggaaggagagagagcgtgcaagagagcgagtgggagagggggaaaggggaaaggagaggagggaggagagagaggagggaggagagagaaagggagggagggaggggagggatcgagagagagcggggagagagaggctgcaatctcctccctgaatcgcgcacagcgctgcagatcccactgctccgacatgcgggccgaatgcaggtgagaaaaggcacggactctgcggctgcgaacccaaacttgggcaccgcacggtgcgcactgctcagccttcgcccccgtgggcgaaaggctgctgcggtttcaggcggctgcttcgtgactaatgaccttgcgcagagttgttaagaaaaaagagaaacccgcgctctccggggtgagaagggactgactctgggcgtctctgaagatggctcgggcttctctttggcgcgccggggggaccctgacactgaccgctctgtgacgcgagtagtctcccctgcaccgtgcccgaagcgacgtgccgggggatttttcattctcgatctgttgactggctcccccgctgcatgagcagagtcggagttgagactggcttgttgctggccccagcgcctggtgcaggaagcgactcacgtttgtctgggtggccggagccggagcagagcctgggtttggagtgagtgcctggaacgtgaattggactcaactcgagtagcagcaaagaccagcgggctggcaggcgggggaggctgcaggctcattccccacctcttcccagccccactgcccgtctgccggagcggttctggccccttccgacagagcggggactagagccggggattctccgcccgctgaggggatgactctgggttgggggagcgccgaacccgcggcgcgcagtgtcccgtgaactgtgagtactgcgactgaacggcggcaggcgagcgggcgattagcacccattgcatgaattatgaaacaataactttcggaagaagcaggaggaaaaaaagaagcatctatcgctgccctcccacccccattcccggccaactctccacgccgcttttgccccctccctcccctccctctcgctccttcctttccgggagaggggagaggactcgggggagggcaggcggccggccccggaggaggggggcgccgagggggctgtggttagaaggagcagtagcagcagcagcaggagaagatgctgaggatgcggaccgcgggatgggcgcgcggctggtgcttgggctgctgcctcctcctgccgctctcgctcagcctggcggccgccaagcagctcctccggtaccggctggccgaggagggccccgccgacgtccgcatcggcaacgtggcttcagacctgggcatcgtgaccggatcgggtgaggtgactttcagcctggagtccggttccgagtacctgaagatcgacaacctcactggcgagctgagcacgagcgagcggcgcatcgaccgcgagaagctgccccagtgtcagatgatcttcgacgagaacgagtgcttcctggacttcgaggtgtcggtgatcgggccctcgcagagctgggtggacctgtttgagggtcaggtcatcgtgcttgacatcaacgacaacacgcccaccttcccgtcgcccgtgctcacgctcacggtggaggagaatcggccggtgggcacactttacctgctgcccacagccaccgaccgcgacttcggccgcaacggcatcgagcgctacgagctgctccaggagcccggaggcggcggcagcggcggcgagagccggcgcgccggggcggccgacagcgccccctaccccgggggcggcgggaacggcgcgagcggcggcggctcgggaggctccaagcggcggctggacgcatcagagggcggcggcggcaccaaccccggcggccgcagcagcgtgttcgagctgcaggtggcggacaccccggacggcgagaagcagccgcagctgatcgtgaagggggcgctggaccgcgagcagcgcgactcctacgagctgaccctgcgagtgcgcgacggcggcgacccgcctcgctcctcgcaggccatcctacgggtcctcatcaccgacgtgaacgacaacagcccccgcttcgagaagagcgtgtacgaggccgacttggctgagaacagcgccccggggacccccatcctgcaactgcgcgcagccgacttggacgtgggggtcaacgggcagatcgaatacgtgttcggggcggccaccgagtcggtgaggcggctgctgcgccttgacgagacgtccggctggctcagcgtcctgcaccggatcgaccgcgaggaggtgaaccagctgcgcttcacggtcatggcccgcgaccgcgggcagccccccaagaccgacaaggccaccgtggtccttaacatcaaagacgagaacgacaacgtgccgtccattgaaatccgcaagattgggcgcatccccctcaaggacggggtggccaacgtggccgaggacgttctggtcgacacccccatcgctctggtgcaggtgtccgaccgagaccaaggcgagaacggggtggtcacctgcaccgtggtgggcgacgtgcccttccagctcaagccagccagcgacaccgagggcgaccagaacaagaaaaagtacttcttgcacacctcgacccctctggactatgaggccacccgggagttcaacgtggtcatcgtggcggtggactcaggcagccccagcctctcgagcaacaactccctgattgtcaaggtgggagacaccaacgacaacccgcccatgttcggccagtcggtggtggaggtttacttccctgagaacaacatcccgggcgagagggtggccacggtgctggcgacagacgcagacagcggtaagaacgccgagatcgcctactcgctggactcctctgtgatggggatctttgccatcgatcccgattctggggacatcctggtcaataccgtgctggaccgcgagcagactgacaggtat

SEQ ID NO: 10229 - DNA, 6000 bp, Homo sapiens
gcactccagcctgggtgacagagtgagtctccgtctcaataaataagtaaatacatacatacatatgtacataaataaaagtcatgaagctggaggaaatgacttgggagacagggtggacagaaaaggtaggagagcccaggcaaaagtcatttcttgctttcagatgttatggtggagtaaaatgaattcctattaaaatgacctgcttaagaccgtcatgtttattttattaaaatgtgatttgtatttctctgctcaaaatagtcagctattgtttctcttctgtccaaaatccaacatatctctcttcacctcatttctaggtcatccataggcatgatcagttcttagcttaagaactttccatgtacttgatgttgtaagagaggacctggcaaatacagaaataaaacgattttgttctcacctttaaaaagagtatgcgaagtttactgacagcacagacatgaataggaaataatacaattttccagaaacaactagcaatagaaaatttattttttcttttttgatgagctaaacttaggactaggtaaagtttattgttaaaagatgtcaggatgtagaggaagatggctaattggggtttaatttatcatggaagtacataaagaggaaggaaagctctacacacgtacaattactttgcttgttcaaagaagaaaagtcctaaacaacatgttacctgcttgtcaataacttgtcaaatgctttgacttttttttttttttgagacggagtcttgctctgtcgcccaggctggagtgcaatgatgggatcttggctcactgcaacctcctcctcctgggttcaagcgattcttctgcctcagcctcctgagtagttggaatcacaggtgcgtgccacaatgcccagctaatttttgtgtttttagtagaaacaatgtttcactatgttgagcaggctggtcttgaactcctgacctcaggtgatccgcctgcctcggcctcccaaagtgctgggattacaggcgtgagccaccgtgcctggctagatgctttgacatttgaaacctcaatttagctttgttattcttccccaatattggtacaaatgtcattttaatgtatcaatttactgctgaggaaacttaagaacattgagaatttaagaacattgaaatttatgtgacagcaaagagcacagttgggcataaacatcatatgcatgccaaacacatttatgtgtacttgctatatatactggatagtgagcaaggcatttttatttgatctccaattcttgtcatcatttaactcatcatcatctactaaacactctcagtacttctcagagataagtatattaaaacttatcttttaattttttttgccagaaaccaacagaccacaaaacaacaataaaatggaaaacaaatagaatatatggagcactgtagtttgataaggtcataatataagaaatggaaggaggaatatataatatcttcaaactacctacctttgatgtctcccctggtgagcagggagagaaagatacctttaactaagaaagcatattcaggcaagaaactcagcttagaagcaaggaggaagaggtcttttcagagtagttattagtgatttatgtgcttctttgcttgtggaaatcttcattttcaaagcttagctcaaatgctacctccaccacaaaagctattctagtattgttcatcatttcttcagttatgtttaagcaatgccttgaaaggcagctgaaaacagaaaaagatcccttaacaaaaggcaattggttttctcatgaaaccaattaaataaatagaacgatcaatagacaggactgtgagtgattgccttacgatactcataaacagtctataagacttcattctattactttcaacagtgaccaagaagatttactcagcgttaagcactatactaggaattgaagtgatggctatgggatgccctgtttggaggtggacttggtctagcgaagagcctgaggcaaacagaaatatagtcaaataattactatacagtgtgataggcacatggcatagaagcagcatggtgtctagaaggagtgagttgctctgtcccactcaccccccaaatacatctgacctcatctgcattctctctcactcactatactttagctacattttgagtttcttgaacatgccaagtatgcttctacctcagggcctttgcacttcttattcctctgtttgatagtctgtcaccccgaaatccacggggctcacctcctgtctccattcaagtctcttgtatcacttcatcagagtagctttccctgaccactccatataaaattgcaccccatcacttcattttatattgcttactcttttcacaattcttgtcatcatgacatatcatacgttcatatgtttattatctgactctcttattagaatcaaagctccacaaaagaaagaactttgttttattcactgttgaatctacatagctggaagagttcctggcaaaacaaatgggaagagataaaatgggattcaggaaagatttcacaaaggtgattatacccccagagagtttagaaggatgcaagagattatcataaaaagataagggagctgggaatagctggcagaagtgtgttcaaaggtaagaaagattaaaaccacatggtttgtttaaataatgtgagatattggttgggcgtaaacccttcatttgtgcttctattacaacacattcacctcttctcttgtaggagagttgtttactgcccctctgtctttctcaataacttcagagttctttaaggggtgggactgtttcactcatgtcttcattttccaagttcttaaacagagcagatattctgtaattgctaaataaataaatgataaaacaatatttattcatcaaggagcaagaaaactcatttagttgttcaatcaaaatggatttctctctgttgacaagcgaatgccctgtttgtaaactttataaatgaaagagacctcagagatcatctaacttggcctttccattttatagatgagaaaactgaagcatagaaaggttgattgcctgactatacaacctgctaggtataatgaagaactgaggccaggcctggtggctcatacatgtaatcccagcactttaggaggcctaggtggaaggattgctagagaccacgagttccagaccagcctaggcaacatggtgagacattgtctctacaaaaaataaaaaattagccaggtgtggtggcacctgcttgtctgtagtcccaggtactcaggaggctgaagtgggaggactgtttgagtctgggaggtagagactgcagtgaacagtgaccctgccactgcatttcagcctgggttacagagtaagactgttttttaaacaaaacaaaacaaaacaaaacaaaacaaaacaaaacaaaaaaacaggccgggcgtggtggctcatgcctgtaagcccagcactttgggacaccaaggtgggcagatcacctgaggtcaggagttcaaaaccagcctggccaaaatggtgaaaccccctctctactataaatacaaaaattggctgggcatggtggtgcgtgcctgtaatcccagctacttgggaggctgaggcagaagaatcgcttgagcccaggaggtggaggttgcagtgagcagagatcgcaccactgtactccagctgggcaacagagtgagactccgcctcaaataaataaacaaacaaacaaaaaacctagacaaacctagagctccagtttgaaccatggtatgtcatcttttcactggaagatgtgctttcagaagcggcctgaacatttggtttacctattaaaataaaaactgtacatactttatgatctatctttgagaaacagacaaatctgcaaggagccgtgtggatcttcattgtcattttttgttgtagttaaaagtgtaaagtcaaaagcaatctgggtgtacatcaatggagaaatagccatattcactctgtgatagccatactatgcaattttatgaagcacttaaaatagatatagtttgattcatactaaaatgaaaaagagctccaagacacggatgctaaaaaaaaagaaaaaaaaggaagtcgaaggatgatactatactgtactgtactatttaagacttgtcaatctcaggttctcccaccaaaacagcacaacacatgaagtaagtgtataggaaatttcggaatgatgaactccaaacaggatatgcatctgtagcaagggctacctccggagagaagggtaggggaatgaggcggtctttgaccttgacagtaatttatggtttttaacaaggagagtgcattcttcatctattagttttgcttttgttggctgtgaaaattaattttttgagaaatagtactgattgtgatttcttctctattcagtgaggaaagggagtgacaggtaatgattctgtatcaaggctgattaaagaataaaagaaggcctttctgaagattaaaaaacaaataaaaagttgagaagaaagagcacgaagagtagaagggaacaatggtgtactcgccagcaatggcaatacgggttattaaaaagaagggtgggggcggggaaccctggccgactcaggacgccacgggaggaagccacgcaaaatagcaaaccgggatcctagaggggcggggcccacctcagcgcgcaggcgcaaccaggcccaggtggccgccgcggaagcgaagccacctatacgcgccgcgccgcttgggtctcctgcgcatgcgcagacggacctgcgctggaggcttcatctttgccgccgctgccgtcgccttcctgggattggagtctcgagctttcttcgttcgttcgtcggcgggttcgcgcccttctcgcgcctcggggctgcgaggctggggaaggggttggagggggctgttgatcgccgcgtttaagttgcgctcggggcggccatgtcggccggcgaggtcgagcgcctagtgtcggagctgagcggcgggaccggaggggatgaggaggaagagtggctctatggcggtacgaaacttcctgtctctgtctctcgggttctctcaggcctcccctcttggccctcaaacggccggcgtccctggcctctcgcgccgccgcttcgggcctctggttgggagtcctgtccggcctgacttaggccgagcgcggcgtgcgcgtgcccccagtccccgcggcggtctcccgcctggcccacgcccaccatgcgcatccacccctgtggcggccgggccgggctggggggctgtgaccggtcctggcccccggcttcgctgtgctttccccgaggcgtctcgatcgcctagctgctgcgctctttacccttgtttttttctgtcgattctgaggtggtggtttttggtgtctgtttttgccctgtggccttagggtgcccttcctgtcccttctttcagaaacagtcattctgtaataatagctaaataaagttaatgctgtacaactaacgtcttgtttcttgatggtcagtttgtatggaatgcacctgcaagggtacctccttgtctgaaagtcgtgctttaaaaataattaattaagagagagagagagaaagatggcccataaagaaaactctgaatgtctcctgtattaaggtgaagttattcttttttaagagactaccgtttaacctacatcatggaggtatctcatgacccttcggcttatagttttcagtgtcatctcatgtatttgtttttctcaaaataaatttaatgcatcatgtacttctctctagaagggtacttgtttgacatctggtttttaactttaagtcacaatcccttcttgcttgttaacaccagatttgaaagttaatgtttgttccttgcctaaaacatatattcttgattgtctttagaatagaatagtaaaagtgcactttgggcaccatgcaggtccttg

SEQ ID NO: 10230 - DNA, 6000 bp, Homo sapiens
ccaaagtgctgggattacaggcatgagccactgagcccagccgacatttagttattttgtctctttattacaaatgatagcattacatttatacatatttgtaatccgaaaaggtcaattccttgagtgtttctgtcttgaacttttttctgtaataggcctcccatactcattgcccacagtttgcattcagttttattgtagtgggtcaggatcattaagagctggagttgctgggataggcctttctcaagaggttctacttgagttggaccttgaggaatctggatgaagagggggataacgaaaaggaggtgggaagggaaaaaggactgtgtggctgaaggcttgtggttagcaaaagcctgtcatgctttcgagctgcactgcccagcactgtaaccatgagccatgagtatgtgtggctgtgagcacttgatatgtggctaatccagagttgaggtgtgcggtgagtaaatacctaccagggtctgaagatttaatatgaaaaaaagaatgttaaaatatctcagtagttttaaaaatattgcttataatttaaatagtagcattttggatatattgggttaagtaaaatgttattaaaatttttacctggttttacttttaaatatatggctaccagaaaatgtaaaattgtattatgtggcctacctttgtggctgcatgattttttgttagactctgctctggctcatccttcaggatggagaagcaggttcatttggggaacctggtatgtgcttcagtgagaactgttggatagttaccagaatcaagtatttggtatgaaaagaccattacgtttcttaaaacagtgaagtaacatgaaattagtttcaggaagattcaactgttcatattttgtggcactacaaaaactaattgagcacttactgtgtactgagcactgtcctaaagggctttattcatttaatcctcacagcaaccctttgagacataggtagcccttatgttacagatgaacttgagtcacaggggggtgtacctattggcccaaggtcacgccgtaactgataatgccttggctatgaactggcagtctgattccagagcctatacacttaaccactacactgtgtccctgtgaaggtgaattagacaaagaagatgatccttgcacatagcagtgaaggaatggtaatggatcactttttaatcctgttaatattttaattaaaaaagatcttctatcttcacggtaccccgatacttttcgttttaagttcttgtcaccatgattggttgtatgattttggccacccaggaccagcttagtatgtaacaagctttatgtttatttttcttgtgttttgtgtgtaggaaggttttaagaatatgtagcatcgcttaatgatggggatgtgttctgagaaactcattatcaggcaatttcattgtgcagacgtcctagagtgtactcaacacaaacctagatgtataacctgctatacacctaggctaaatggtatagcctatggcttttaggctacaaatctgtacagcgtgttactatattaaatactgtaggcagttgtaacattttatatatataaaaaaacatagaaaaggtaaagtaaaaaatttggtactgtaatcttatgggactactgctgcatattcggcccatcattgatcaaattgtcatcatgtggtgcatgtctgtactcttaaagcaaattttattttatccctacattttacagaggaacagagattaaataatgtggctgaagtttcatggctgggaattataaaaccatgagactgtgtagctttgatcactattgtgtttgatttaaaaagtaaacattttgtgtttgagcttagagctaagtgatcataaatggtgtatatttattcctaaaatttttctgggatttcagatcctgaaattttatacaaacctttaaaaagcattttcaggaggaaaatgtgtcagagccaagttgaaatttgaaatgcccttttttttttttttaatataaggattcttaatattggaagagaaaggaagttgttgttttgagaagggggcttgctccatcacccaggctggagtgcaatggtgccattacagctcactgcaggaagctcgtttttaaaggaccgtcaacgtaggtggaaccaaaataatggagagaaagcaagaagcccttaaaatgatacttgcttaattaattaaactcaattcattgagagccagctgtcaaggcaacaaatactttccattttgttaaatttctccagtatttagctcagaggtctagtcttaatggtaatgcctaaatttttctgatctttactgtggaattttataatctttatgttatgtgttaaggaatgacatgcacactaagaatttatgattttattcttacctgtgactagggcctttgtaataaatctgtttttacgctgtccaaaattactatgttcttgggtttctttttctttatctcttgggtttctagagattcataagcttaaaaaattaaaaataagttattaggattggaagagacctttggaagtggtttatctagcccagggcgtctcagtctgggaactgttgacattttggatatataattcttggttgtggaagggctgtcctgtgcattgtaggatgtttagcagcgtttctggcctctacccactagatgccagtagttcccctttgattgtaactaaaaatgtccgcaagcattgtcagatgtcccctgggagacaaaatcgccctggttgagaaccgcttgtctagcccatttcctgggagtggtggttcccttctctggaactcagacgttgagaagagaagggtatttaccacctcctctagcagtctgttccaactttgggtgcgtctttggagacagaaatctctcctctctgttaagctaaaacctgccatctctaactttttagttctgcctcttaggaccgtatggattggatagattcacttaaaaactttcccaattattggaacatgataccccgtccttcctggtccctcacgggattgttttagagccaagtcagcaaacttcttgtagttgccatgtatttgcaggctaccaatctctgatgcataatcttcctttccttccctccctcctccttgcctcccaccagccttccctccttttctctttcttcttatttcttgtaacttcttaaaaatgtaaaaaacctttttttgctcttataggctgggttttggttcagtaacttgccatccctggttttagagtctgacatctgctaatcttcagagggcagtgcagtgctttagaactgtatatagaactttggggaaggtctgagcagcatagaataacgttggacttgtcattaactccttcatgcgaagagcttactgcttttttgaagctttgtcacatttacagcgtaatgacagccaagacactggtttgtctttttcattaggccactttaccttctttttttttgagacagagtttcactcattgcccattgtgcaatgggcgcagtctcagctcactgcaacctccgcctcccaggttgaagcaattctcccgtctcagcctcccaagtaactgggattataggcttccgccaccatgccactttaccttctaagatatttttagacttcagcgtaggacgatctgtgttaacagctgtattaaacttgtcttagctggaaccaactctctataccctgctgaggtttgtgggtcttactctgtccttcagagtgttaatgaaatttttcttagcttcccgtcgttcaaatgttttttaaacatacctgggtctttcatgcaagttactaatacaaatttgaatgagatgtagctaagaactaaatctgaaatcacaaatgcctaacaaataaggtaattttggccaagcgtggtggctcacgcctgtaatctcagcactttgggaggctgaggtgggtggatcacttgaggtcaggagtttgagaccagcctggccaacatgatgagaaaccctgtcttgactaaaaatacaaaaattagctgggcttggtggtgcatacctataatcccagctacttgtgaggctgaggcaggagaatcgcttgaacctgggaggtggaggttgcagtgagccaagatcacaccactgcactccagcctgagtgacagagtgagattttgtctcaaaaaaaaaaaaaaaaagggaattttaatgcatggatatagcaggtctgtactctgttcttaaaattgttttggagaattatatgtaaatctgcattatacatgtttagtatcctcaatctaaaatccacagtgctccaaaatctgaaacttgagcactgacatacatgaaatgctcaatggaacattttggatttctggattaggggtactcagctatgatataaatattccaaaatctaaaaaaatccaaaattccaactacttctggtcccatacatttcaggtaagggatactcaaattgtagcaaccatcgtcagaggttaccgtcgttactgatggctttcagagtgattagacagtaaataagtgtaatgaccatgacaagaaaattttcaaaaaaactaaatcttatttacgtgcaaaataaaataattttgaataatgattttaagaagtaactgattttttttttccagaaaatatttacaccagcagctccagttcataccaataaagaagatcctgctacccaaactaatttgggatttatccatgcatttgtcgctgccatatcagttattattgtatctgaattgggtgataagacattttttatagcagccatcatggcaatgcgctataaccgcctgaccgtgctggctggtgcaatgcttgccttgggactaatgacatgcttgtcaggtgagtgtgcttttccctctcatgagttcgctgaattaaagggaaagcgtgttgtgtgacatggagtcactgagtcattaacctagtcttatgggaatttggcttacaccttatttgtggtcttccaaccttttccttgtgtatcctttccttgtgtatcctctaaaataattttgtaccccctctcgcatagttgtctgaaatttttcatcttcaatttaaggaattgcaaagatctaatttctgttatattgtgtaaagtaagacagttagggctgggcacagtcactcacgcctgtaatcccagcactttgggaggccgaagtggacagatcacgaggtcaggagttccgagatcagcctgaccaatgtggtgaaaccgcatctctactgaaaatacaaaaattagctgggcatggtaatgtgcacctgtaatcccagcaactcaggaggctgaggcaggagaatcgcttgaacccaggaggcagaggttgcagtgagctgagatcgcgccactacactccagcctgggtgatagagtgagactccatctcaaaaaaaaaaaaaaaaaaaaaaaagggagactgttagggtgtttttaaaatctacccagtgactctaaataccattagtaatttgatacccactatcaccatcattcctttaaaacaaatgtgaatatacttttttaacagttggaaatttacatttttttcttcctataatttatattttcatttacttcccttaattttactctaatgattataaatttttgcttcaaaatttattacaaagctggtccaagtgcaatggtgtatacaactaatcgatgacaaaccagttacagatttctttcttccttgtccacccccactgcttcactttatgagcctaaagaaatatatatatggatcaccccatcatatctacctgcaataaaaatatgcatttaatatcattgaattttcaaagatattgtaaatttctcctagtaaatctcttaagtgttaactctatgaattgagttgttatagttattagtactcaaagaaaatatattataaatttaaa

SEQ ID NO: 10231 - DNA, 6000 bp, Homo sapiens
gtggattttatactgactggtgtgacccttatccccgtgatgctggtgagaagcttccaaatctattctgaactttgcctcatgctggtgatgtgagcaacccagggagctttttagaaacatgttcttccctttctttgttttcagcgaatgcaggttgtgtgaaaggaacttttaagaatgggtttgagggcctgattaaggactggatgagttaatttcttcctattgatagaaggaggaactagttgggtcagatggttattttaaaagatatctctgtcttactaataatagcaagcaactgctgagaggatttgcggtggggagggacacgaacccaaataattgacatttgtggtgtaaagatgaagaaaaggtgctgaattcctgtattttgtgcagaagcctaggtgcaccaggctggacttacttctaaggaggagtgagggctgctctggagaaaggctgctgtgggtgtacaggttttatattttccatttgcctcactcacctctttttgcttcctacagggaagaggctgctttgagatgctctgcattgtctgtcagaaagaacgaagtttctaattacttgctatgtatagtcttggagggaatgtgaaatatgcatcaaagagccaaggaatgcaccaatcattattctctctctctaattcagatggaacatagtgacagtgcctcagttaggctggatggttttctcagcctaggaagagggtttttctgaacttttctactatcccctccagtttttgctggtttttattttctctttgtttctgtttttcttttttcttttagagatgagaattcactgtgttacccagactggaatgcagtggcctaatcatagctcactgaagtcttgaacttctgggatcaagcagtcctcctatctcagcctcccacgtagctgggacaacaggtgcacaccactgcacatagctaatttggaaaaaaaaatttcagagatgggtcttgctatgttgcccaggctggtctggaactcctggcctcaagcaatcctcccactcggcctcccaaagcattgagattacaggctgagccactgtgtcagcttttcttcttttacttctttggttgttacatgcaattttgggaatggcttaggcacaaggctaaacattttagttaggaaatttgaaaaaaaggcaacaaaagactttaggaccagttcgattaatagtggggtgcagaaatgatgttccacatgaaattgtgttggactctataggttggaaagggttagttctgataggactggaaagggttaatgtgagctaaaccactcttttttctaaaggggagctggcactattaatgtacgtgcagtagcacagggcttcaggattttgttgtgcttctgaggtcttttaagaaaatttcctcattaaactgtcatccttatctatgtctacaaatgtgtaatggatgggttcttgtcttttgaacttatttgcctggattgctaagggtaatctttgagaaggtggatgtgattgcattaggcaccttgtctgtcttgctcactgtaactctagtgccttggcttgtgcctgcaacatagtagtagcatccagtaaatatttactgaatgaatgaatgcaggaaagagaaaagagaactactgaatgcctcctctgtgtctgctactgtgtgtggtatgtaaaaattatatttggcaattagaagacattggtgatcatgaccaaagtgctttttacatctctttccatctttctcagccactcggtagcagtactctccttttgtcacttccttgacatcactcttgcctggattcttacctcattgactgtttttgttcctctgctctgcttgtaaatgttggcatgcctcagcacttggtcttaggtccactccttgatttttacattttcttcctggatgatctcatccagtaatagcttcaggtaccagctttattcattggtttcctaatttttatctctaatcctgagcctctgagctccagactcagacatctacttgtatgtccgatggctcatttttcatgtgtaataagcatcttattcttaaagtggctaaatagaactcttgatttgttccccaacaacttgtttctcccatagccttcccctggctccttcaatattttcttaatttctcttgtccccttactgtccatttttcacatagcagccagggtaatcttttaaaaatgaaaaacagttcaagtcactctccattttagaactcttcattggctcccgtaacacctaaaattctgactccttaccctggttttgtggcccaatcaatatcatctcctaaagttgaccttctagccctgtccagctgtactaactttgtttctgttcctgcaacatcctaaacttgtcttcaccttagagcctttgtacttgctgttccctttgcttggaacacattacctgcaaatattcacagtactgattccttcctgtcatttttgtctctgctcagttgtcatccagaagcctcatgtgaaccaccctgtgccaagcagtccctgcctcattttattttccacaaagtgcttaatgctatctgagattaccttgttcatctattcagtattaattcttgcgaactttgtttctctgattcacagatatatttccctctctctgaagagtatgaggaacatagcaggcactaaataaatatttgctgaaccagtgaatatactttatcatttaatcctcatgggaaccaggggcttagagaagttggtaaatgacttgacttcttaagtcttttcttttttttgagacggagtctcactctttcgcccaggctggagtgcagtggcgctatctcggctcactgcaacctctgcttcctgggttcaagttatcctcctgcctcagcctcccgaggagctgggattacaggcgtgtgccaccgtgcctgctaatttttgtatttttagtggagacggggtttcactgtgttagtcaggcttgtctccaactcctgacctcaagtgatctgcctgccttggcctgccgagggattacaggtgccgggattacaggtgtgagccaccacggccggcctcaaatcttcaaggaattttcttttccaccagaatcttgatggccaacccatatcctgcttgcattcagttttctatttttagtttgagtatagagaaggaaaatgatgtatatcaggatgggctattatatacaaggccgatattattgaaagaagaaatcttgcaagtgtccagaggtaatgagtttcttaatgctattgtccaccattgactggtcagggtgaaaaggaaggaagcagaaaggaaggaaatttacagtaattaaacatgtagtatgtgctgagtcctgcactgtgtgcttttaggtatgttacctaatttgaatctcaaagccatcaatgcatggttgatattattgtgttgagtcaatgcaaggttgatattattaccccagttttatagatggaaaaactgagacttaaaaaagctaaaaactttgctccaggtagcacacttgttcagtggtagagctagatttcttaaaccgggggctacctgacaccaaatttctcactttttatgttatgatggttgctttgtgagatggatatgcttctaaaatagtaaggacaaaaatatgaattcaatgcacatccgcatagattataacaaatatctgaagcacaagaataagttatacagacaatatggaaaacagacctacaatattcaatgcctgagcatataattggatgaatagaatacagaatgaacatttggttctctggcagggctcatgtacggtatgacatagagcagctgtccccagagaaagttctttgtttctagactggtactacacaagcagcatttgagcaattcaggatttctttctgctttcactataaatagacctcatggaattctgtatatcaaagttaatgcaatgaaaaggagctgcagaatatggaaataaaccttaactcattctataaactagaagcgtgtttggcatcgggaggccctaaaaacgctgtcattccttggatggattctgaggtcttatttagcatatgaaattgcagagtagatcctattatgtaaggagacaggaggacagcataatgtggttacaaaatgaagaactttgtgcccttcagggaagagttaacagggcagatatacatagagaaagatgtgtgataagaatgtggaaaatgaatgaatgggtggcatgtatctgtgtgtattgtcgaagccgggttgctggataatcctcagatgtcagatttccgtaaggccagcatgtgactcaaagcttgccactcaacagagaatactgggctgtgctgatattaagaggctggctggaagctaggctcccactgtgcactagcctacctccctgtcgctctctgcgtgtgggtgggtgtgcatgtgtgtgtgtgtgagggtatacattttatgcagtgggtgtttaaagagctaagcactgaagctggatttccacaaacgatcatcacgagcactccagacacaccaaacttcctctcttggtattttttttttttttttgctttcatcctttttaaaaagaattttaaaaccctaaaggggagagcccccaacatcctgcctacaggattgggattattttctcttacctgtctatgtgggtgccctctcaaggttagaactgaagctatgtgggaccggcatattctcgagcaccagatgagaggagctgcgtgaagcagtagcagacaccagaagaagagtgactctgccctgctaacatgaacaacagcttgcaggttaacctgcccagaagctgggctgctccaagtggctcgctccaggagaagtctgagcattctttttttcttttttattactataggatggaggatgaagctgtcctggacagaggggcttccttcctcaagcatgtgtgtgatgaagaagaagtagaaggtgagctttatgggtctgggaaagtgtctgttgacatacatatgtctctatagataataacattcatgcatttcatatatcttacatttttaaaatgaaacaccaaaccttttctatagagtttcatcaatctctacatttgcttcaacacagaaagtaattttaagaacttcactggaccatcaaaatctgattcaatatgggtcttgcctggtttaaaaaaagtcttattttaaagtaagtgcctatgttagctgtgcctcttcatcaaaaataaacattttaccagataatactaaccaccttccaatgactaattcaagaaagctgctcgatttatataaatatattcagcagcatctttaatattctttcttgtagcttgtagtgtaaagatatagatactacagaaggataatgataccattgttgcaggagaaatgggtttaagctgaagatgttaagagtgataatcatggatgactgtcagttaggaaaagatggacaagcattttttatttaaaaaacttcagtctcttttgctgatgtttcctagtgcctgttaaaaactaaagaagagttatgttttacctggtgctataatactttcagcgggcattcccttttcctgtctcctgacttatcaataatgtgggaataatgctatttatttgatagaaggcaaagctgaattaatatttattaaaataattatatgaaggcatcacagatatatgttattattcatatttataatgagatttttaaaaatcagggttataggcaatactcaaagttaaatgaaacttgcaggtgaatcatgtgatcaattccaccatttaaagtcacctgagagacaattcatttgtgttttggagattctgacctgaccggtgccatgtggtaagcatttagtgccagccccaaacttgaaccagaaggtggtgggcttgggaa

SEQ ID NO: 10232 - DNA, 6000 bp, Homo sapiens
cacatttgctatgtggcaggccttttatattcattaccttatttaatcctcctaacaaccataaagcaattttttttaaagtttctccattttatagatgaagaaacagggggttaaaaacttattcaaggacatacatttattgaccaaactcacattttatgggaataaaaatatatgatagagataaaaattctgtgagaagttcaattaccatacaaggtgaagcaggagtaccctatcaataaaggagcatgtttattgagtatattttgccaggcttgtagcagtaagttatgctgaaatttaggcagagctccagggctttagttaccggattttaacttgttcattctacagcttccatttctcaaccatcctgttaaaggatttgattggaactggaggtttcacatttggggagagtgttggccatagacagcccatgacctttgtttaccaaagctacctcccttatttctatagatcaaagaagcagtggtgtttctgggtttctatttatggtctctttcattcccatacccacagaaataaatgtgagcctttagggaaagcaaactgtggaacatcttcaggttttcaggtacatagattaggtcagctgaatcagccttcaggacataaatcagaattttgaaggctaagagtttgaaacgagcacagcaaaggtctagttctttgcaaaaaaaaaaaaaattgtctttttgcaaatacctggcagatgtaaataagcttcaaaattgcaatagcaattattttagcaacagatataagtataccaaatgctttttgcacctttgaattgtgttttcattttgtttaattttcacatctagctgagataaaaattagtgggagtggtcattttttgtactgtatctagcatacatgatttccagtagcaaggtataataattcatatgctagcatgagccttagaggtaacaaatgctcattttgtgatgctcttctaatcctgccattagttttagtcttaaaatgaccatattcctttccagggagctcccgtcttatgaacagatcagttttggggggatctctggatttattttttccaatcactgtttctttcataaacacgtattgaggacttactgtgtgtcagatattcttctgggtgctggagttggagctaagaataaacacagcaggcaaataatccatacctgcatggaggttacagtctagttctggaagagaagcaataacaagtaaattatatagtatgttagaaggtgaggagtactatgagaaatattaagctgggagtctggggtgggggttgaaaacttaaattgaattgtgttttagtccattttcacacttctgataaacatacccgagactgagcaatttacaaaagaaagaggtttaattggacttaacagttccatgtggctggggaagcctcaaaatcatggcggaaggcaaggaggcacaagtcacatcttatgtggatggcagcaggcaataaaaaagaaagcttgttcagggaaactcccccttacagaaccatcagatctcatgagactcattcactatcatgagaacagcacaggaaagacccgcccccataatttgatcaccttccacagggttcctcccacaacatgtgggaactgtgggagttgcaattcaagatgagatttgggtggggacacagccaaaccatatcaagttgttaaggaaggcctcactgagaaggtgacatttgagcgaagacttgaaggaaatgagagaatgagctgtgtggagacctggaggacaattgttccaagccaaggaaacagtcagtgcaaaggccctgaggcaaaggtgtgtcaggcatgagagtaaagagaaggagaccagtatggttatagcagagggagcaagggtcctataataggggctggtatgcttagaaaagtagctggggccagaccccatagggctttgcaaggcattttaatgatttggcttttactctgagatgaggatccattcaaaggttttgaacagaggagtgataacaatctgatttcatttcttatagatatattattaattatgcaagagggtctcacaattaattatccaccaaattctgcttaacccatattgccattcaactaaggtgctaatgagactctgagaacttgtgctctaagtgctggatttagataatggagatggggatttggctgacagctcagttggatgactttgggcacttcaattaacatctctgagccccattttccttgtcagagaaacaagtttaaactatacctgccccatggccttattttgaggatcaagtaaaaactaaatatagaagcactttataaattataagacaatataaatgtcaggagaggtggtgatagcaacagtggttgtggttgtgtcaccattatttcagggaaaattaagcccagaacctaagtcagaatgttaggaatgcaagcttccctttcccatctcttcttattaaattactatggaaatggggcctcctcttccttccccagcacttgggatccagaagacaacaaggactcagatgatgccaacagaacatgccagtcaggatcctagcaggaagagttgtcattgacagggtgtttggtagaccggggcctccacggtgggtgggtctgctgtcctagtgagagcgtcacaactttccctctccctggccccataagcatccccagttcagtgcagggcattacgctgtcctcagatgggcaacttttccaagtaatcacaaccctcttctgtttctccaccaggcattcctcctatggaagacttttggacgaccatgactacgggtcctggggaaactacaacaaccctctgtacgatgactcctaacaatggaatatggcctgggatgaggattaactgttctttatttataagtgcttatccagtagaattaataagtacctgatgcgcattgaacgacaatcttaagccctgttttgttggtatggttgtttttgttttcctccctctcctctggctgctacaacttcccctttctggtacaagaagaaccattctttaaaggtgagtggaggctgatttgcagctgaagtgggccagccttgcaccagccaggccagaccaccatggtgaaggcttctttccccactgcaggacccactttgagaaggaccgaggaggaggatttgggttgttttgttaggggttactttcaggggaacatttcatttgtgttatttcttaaacttctatttaggaaattacattaagtattaatgaggggaaaggaaatgagctctacgaggatttcaccctgcatgggagagagcagggttttctcagattcctttttaatctctatttatctggttgtttctgacaggatgctgcctgcttggctctacaagctggaaagcagcttcttagctgcctaattaatgaaagatgaaaataggaagtgccctggagggggccagcaggtcacggggcagaatctctcaggttgctgtgggatctcagtgtgcccctacctgttctcccctccaggccacctgtctctgtaaaggatgtctgctctgttcaaaaggcagctgggatcccagcccacaagtgatcagcagagttgcatttccaaagaaaaaggctatgagatgagctgagttatagagagaaagggagaggcatgtacggtgtggggaagtggaagagaagctggcgggggagaaggaggctaacctgcactgagtacttcattaggacaagtgagaatcagctattgataatggccagagatatccacagcttggaggagcccagagaccgtttgctttatacccacacagcaactggtccactgctttactgtctgttggataatggctgtaaaatgtttaaaaacaaaacaaaacaaaaaagaggcactagtctatctgcaattactcaacgaggcattttcataggaaacagactatgattaatccatttattcttcccacacacttaccttactaagtctttgctttaataaatgagcaaccctgggtatagtcttaaaattctgcacaataaattttgagaaagaattgttcctctttgtaggtatctgtgtattgcaatcattctcaaccaggaggtgattttgccccctgactccaccccagggacattcaaaaatgtctggtgacagttttcattgtcatgacttgggggtgctactagaagccaggaatgctgccaaacattctaccatgcacagcacaacctacaacagcaaagaatcatccaccccaaaatatcagtagtgccgagattgagaaaccctgatttatcacaatgcccactgtgacagaacaagacactcacagattagtgatacgttttatttttaacaaaatgaaatgatgtgttaagtttttatttccaaagtgtttagtttattggctgatgggttgttcttggtatgcatggtgacctttttatttctgtgtgcttcctagagagctttatttcatggcgacaactctgtcttcttgtaacagctgatattagcaagcagcatcttatgtcctgatttcatatagtagaaaacaaacattgggtccgacttcaaaatgtgttgtattgtcctacagtgtcataaagaacctgaaaatgaacttttgtttctaaagttggaccttgctgccatgactgtttagtttacagaaacttgaccccggctcatcctgtctctggctgtggcccggcaaagcactgaaaacccctctggtctcagagacagtaggggcagtgccactttctacaacctgccaacccacacactggagtaattctgaaaaaaattattcctaaactctctaagtgtggacggagaatgagcaagccccagaagtattttacaaccagagtgggtaatgaggagggggcttactggaatcgtcatatctctgaatattgaaaacaacaactaaaaaagtggaccttctcagaaaaaaagggcagcaaatgaccaagggcgccccttctggccgtgcttggcttgagtaactgtctctctttccccacccccatcacagggctttcagtttggcaaaggaaaagcagataaaaacagaacattccatatgtttctttctccatcggccaaaaacattttgacacaatgtttgtgaaacacctttggagaggtgcacttctgaatgctgcctctgccgtaaatcctggggcaagggatcagcctcttcccaggaaccatcgccttctataaaccgtgaactcaagcaggcattttttttttcttaccgaaaggctgctattgtgcaagggcacataatgggtctgttgctcttattggcttccaaatgtgcatggcaaagagagagatgtgggcctagagcagatatattcagcaaggtgacagcttcccataacaattctaacacttcttatcttatgtgagaataaaatatttaagggttgaaccttattttgccaaatgtatcttttctgcttttgaattgggcagaagattttagcaactatattctacaaatgttacttataacacacacacacacatctgaaatatatgccgaaaattgacgtctttgacctcagggagagcacctgtccaggtctgcctaaaggaaatggctccagtgggtctaaacaaccacatcctatccatggataggtctagtcataacactttagagagaatgtcagagcaggagggaggcaagccgcctcttctcggccatcgactgcagatgatgaaagagcgggattcaactttgttttcttttcctgtggccccagtgaaacctcctgccctccctgcacgtctgtgtcttcatttctaaaatgggggtgatgctttcatattgacctcaccccatactacctcacagatgtgttgtgaggattaataaaattatgtctatggtattttcagtttctgga

SEQ ID NO: 10233 - DNA, 6000 bp, Homo sapiens
aacacaaatatcttcccccagtttggctctatctggtaactgtttatggcacccttcattgaccagatagcatcattttaatgaagtcaaaatgtttttggcctcctatgttaggcaatgtcacattgccagtttcctggattttgttctattcatagttttaccatttacatttaggactttatttcatctggagttcagcatttatgtggtacaaagtagtaatccagctttatttttctgtagatagtgagctagttgtctaacacagatctcccttttctaaagttttaatgacttagcatgactgatgtcagccttgagtctattctggaactaagatgagtcagaggtttgcaaacagtttcagttagaaaatgtctctgtgaaacctgaaactgggcagctccaatgtgactgctttgcagagaggttgtacttgtggttaatgttatgtggctccccaggagccagaggtctgacagcaatggacaggtgctgagggtgataagtgcattcccctaatggagagaggggttgcagagttattacagatcaagaacaagtctgagagtcaccacaaacactgaaacacaaccataagggttctctagtataacacatccaaatttgcacactcacttctaaaatctatgctttgaaatttgaacatagtttaagaatcatcagacttcagtgtagctagggtttcagagcaggtcctggggatcagaacaccgggttcaaatcctagctcagtcactcattaactgtatgaccttgaccagattacttccctccaagcattccatttataaggatgagataatctttataaagcacttagcctggtgcctgcatattttagttattcaataaacaaaaacaataaaaagaaggcctattagatgatagccttgacattccagggaatagaaagatgtccaagctgtgaccagcaagggatttatgatctaaactagggatgagacaaacctcaaagatactgataccataagagaaaacctggtgtgatcgaaaggatcccattaggaataacaaatcccaagggttctacgctctctgtgccagcaacaaaaggacaagaccaaatctctttcttattataccccactgtggagaggcaacaggactatgcagagacacctcttctactggccatgtcttctcccagtggtcattatctactttctctgcttttcttaaaactccagccagattttctttctcccactcagctgataacctcattgactacttcctttgtggcacaaaatgtctcttattttcattcttttctttttttcatgcccttctaatctctttccttcattgaaggccaattcttccactggcattcctgacccatctccctcttgtgccttatgaaagtccaatgaaaaaatatttcctctgcttctcatgtcttcaagctcagtctccactggctctttcctgctcccaatcgtgcttaaatctctcttggtttataggaactgccctgagtcctggtctatttcttttctttttctttttggggggggggggttggtggaaggtggggggggggggtctccctgtgttgcccaggttggtctcgaactcctgtcctcaagagatcctcccacctcggcctcccaaagtgctgggtatcctgttctattcttaagcaacccttcaatttctctccaacctattgcctccacgtttctcaagagagagataactcaatgctggacttcttatcctttcacaacatttatatcttagcattctgaaatccaacttccacccccacaaacactccagagctactgatggcctcttatgtgccaattgcaaccattttcccttcagttctctatcaacttcagttctgcaaagcaatgcctccattccctctcctggccaccttcttgaactgcttttcttatctgattttggttctccttcttctctggctcttccttcccacagtctttagtctctctgactttgcaaacagagttgcttttcattgttctgtcctcatccctctaagccaggattgagcaatcttttcttgcataagtttaaaggaaaaaatatataataaaataaactttaaaatatccatctatatctattcatactttattaaatagaataatatcaattagaaaacgggttctacattatggcccataaaatataatctcaagacagaattgcaatataaatagcaacatggaggcaacttcccaatctttcttcttgcaattgtgtcaagggctcatccatccttcatttctctttataacattaatctttactatggatttaattaccacatctctatgcagaatttccaacatctccagccttgatcctcttaaactaaagaaaccgagttccaacttcctgctcgtgcctccaatttaacacgtcccagcagaactcatcatcttcctcctttgtccgcacaaccgttcttgccttttttgctccctgacaacactatcttcctaggcactcacagttttctatatggaggcaaacatgattgttttgcaagtgtatagcgataagcatgggtatcatcagtgcggcaagaatgtttttaggatatgtggctatgaacctttaatataaacatatgactatgattggagcattttttaaaagagcagcaacacagaaattaatgagccagcacttaagtttggaaaagccaaaaggaaggccaaataatgttctttaaaaatgttgcattagcttcttgggattcccaaagaaaaaagtaaattaaaaaaaatgttgcatgatcaatatgatacaatgtaaaaataattctgatgggttgagaaaataatttttggtattattttaaataaatgaatggacatttatgacagcaataaatattaagagccttttaggtattataagtgaatagtggggcttacatctgaaggattttacagattctctgggatttttatcccttagacaggagtccccagaccttggtctgaggcctgttaggaagcaggctgcacagtaaggaggtgagtggttggcaagtgaacattacagcctgagctgcacctcctatcagatcagtagcggcattagactctcataggagcacaaaccctatgtgaaccgcacatgcaagggatcttatatttttatcagattttttgagacagtctccctctgtcacccaggctggagtgcagtggcatgatcatggctcactgcagccttcacctcccaggcttaagtgatcctcagcctcctgagtagctgggactataggcgccactgccttgcccagctcatttttgtatttttccatagagacagggttttgctatgctgcccaggctgaaagaatcttattttatacagtgacattcattctcttaaaaatatagctttacggttactttttattatacataaaatgaatttcaaggaacggtaatatccacatgggctaaaaatgcatatggaatctacgtaagaaaaatgccaataatgctctagggtgaaattacctggggcttttaattcattcattcaacctgtacttctaagcgctcactccggagaggttacaggtgctaagaattcagcagagaacaaaggacaaccatccccgctgtcatttacactctgaagggaggaaagagaaattaaaccacagacacacagattatagagtgtattagaaatgacgccctaagtgctaatgagaacaatggagcaggggaaggatatagggagtaggattgtaattaaaactgggattgtcaaggaagggctgggcaggggagggggtagtggggatgcagatgacacttgtgccaagacctaaaggggatgagagagagaggatgtctgcaggaaggatgactctaggcaaggaagccagtgtggttgaaggtggcaagatggagatgagtgcacagtggtcatggggaacagatcctgtagggtcttaaaggttcttccgtgtgatctggagcaactggagggtcttgagcagagaactggggtgttttaacaggatcacgctgactggtggtttgaaagtggcctgtgggagcttgctgtgttttgttttgcagcaatgggaaggatgtggttgccacttcctgagatggggaaggtggggagagtagtaggtttggggagttaggtggggagttcaggtctggatgagttgggtttgagatgtctattagacatccacgaggagatgcccagtaggcagtcttcgccctcacctctcctctacctcctctcttatgattacagaagttgtggcctgcatcaaggcgtgcatcagccttccagtaaccccactggcagaaccttgcaccccgttaagggctactgtccattcggagcaaggggcacattagataatttgccctaccagagagagcaattatagcaattactccaaggcaggtgtttggtatctgtggcctttagcagttgaatgtcggagtccaagggaaaggtgtgagctgcagacatagacgtggggatcatcagcttgaagctgttgtgcaaagtcatcagatcagcagaggaaaggatttacaaagaaatatatataacaccgcacagggttgttgtcttgtgaggattaaattaaatacacacttaaaacatccggaatacagacagtgcttaataaagagctgctgtttttattaacaaacttatctgtaggagctcgtccatggacaacatccagttcatacagatgcgtgcgcatttcgcagcagccatacacgcccaaagaggacgagactggatgtgattgagctgactggcatctttagatggatggtcctcagtccagtccttccattttacaggcgaggaggcggaagcttggggaggctaagcgcgctgagctggcggcggagcggagcttccactagggctcccagtttccccgcaccgcgcccgccgtcctccgggccacccatcccacccgaacgcgccaccgctctagcccgcgctccagcccgcgcgtcaccgacgcccgcggcctctcccacctctaagttccaggaagctctcggcctctagctgaccgcgttgctgctgagcttccctggggagaaggcgccgaggtgcccggtgcgggccgaggcagggctgggcctcgcgggcagcaggcggaagaaggaagggcggtggggcaggtcccggctgcgcggggcagttgtgcgcacttgggttcttcacgcgggacacacgtggaacgccgacccctgcgcccctggccgctggcaactggcaaggccgggaacagaaagtgtagggacagaagagcgctggagtcttccccgggagggagcccggggctgcagcccaggggcggggagcggggcggggctgggaaagttgagtactggtcgctcagggccgggctccgccggagtgcccggcgcagaaaccgtaaaaggctggagcgggcggggtaggtgtggctctgtgtgcgtgacctgagccccggtcccagtccctgtagtctcctgcggccgcggcctctcagccatgggcgccgtctggtccgccctgctggttggagggggtctggccggagcacttttcgtttggctgctgcggggcggccctggcgacaccgggaaggacggggatgcggagcaggagaaagacgcccctcttgggggagctgcgattccgggaggccatcagagtggcagcagcggactgagccctggaccttccgggcaggagctggtcaccaaaccaggtattcttccccccgtgactccagggcacatctgccagagctttgaggttcatcgaggaagggagcaaagagacaaacccacctggagctttcctaggggcccattcctgcggacgggctctcctaaggggactgggccatccccacgcccctcggtttcccaggctggttggtacgcgcaggcaggtttcttg

SEQ ID NO: 10234 - DNA, 6000 bp, Homo sapiens
ttttttttttcacatcagtttgatcaggaaagtgtataacacatcttagagcaagagttagtttggtattaaatcctcattagaacaaccacctgtttcactaataacttacccctgatgagtctatctaaacatatgcattttaagccttcaaattacattatcaacatgagagaaatcaccaacaaagaagatgttcaaaataatagtcccatatctgtaatcatatctacatgcaatgttagtaattctgaagttttttaaatttatggctatttttacacgatgatgaattttgacagtttgtgcattttctttatacattttatattcttctgttaaaatatctcttcagatgaaactgtccagattaattaggaaaaggcatatattaacataaaaattgcaaaagaaatgtcgctgtaaataagatttacaactgatgtttctagaaaatttccacttctatatctaggctttgtcagtaatttccacaccttaattatcattcaacttgcaaaagagacaactgataagaagaaaattgaaatgagaatctgtggataagtgtttgtgttcagaagatgttgttttgccagtattagaaaatactgtgagccgggcatggtggcttacatctgtaatcccagcactttgggaggctgagggggtggatcacctgaggtcgggagttctagaccagcctgaccaacatggagaaaccccatctctactaaaaatacaaaattagctgggcatggtggcacatgctggtaatctcagctattgaggaggctgaggcaggagaattgcttgaacccgggaggcggaggttgcagtgagccaagattgcaccactgtactccagcctgggtgacaaagtcagactccatctccaaaaaaaaaagattatatatatatatatatgtgtgtgtatgtgtgtgtgtgtgtgtgtgtgtatatatatatatatatatatacacacacacacacacactttttatatatatatatatatatatatagtggaacttacaaatgagagtaatataatgatgaaattttgaactgttatttataaacatctaaggtaaaatggttagtcatggccagagtatgtttcatcctttaatttttgtccatttgaaaataaggatttttgaaagaattataccaattaaaattattaaaggcaaacatagaattcataaaaaattgtccaaagtagaaatgatgacctataatttggagcatttccaattcagtaatttcaattttgctcttgaaaacatttaatatatatccaagactgacatttctttagctgaacctaacgtttgggtctctgagtgaatttataataactccttccttccttagcatagggttttcaaaatttgatttataattcctatttccagtaaatattgttcatttgtccacatctctccctatgatatgttgctggaggtaagaatttctttcatattcctattttttttttccccatagactaggctcatagaatttaaacaagcaaattttcctgagctttttcttgccaaatgaaagaagactggtaaattctcatagagaggtttgtgtagttcttggctcttcctggggttaatgtgcttatattcacagtggcaaattggtctcagactttaatttatttatttttgatttgaatttctctttaaaagtatcaatttaaaaggtaactagaattattctttctcattttcaaaagtgatttttgcattattaaatttccctgccattgtaatgccatttcacgcagaaaaaaagtcagccagtaattaagaaaaaaagtgatggagattaagtagtattttggcttatttttaggactcatcatgagaagacacagttcctttaatcaggaaattaatatccataattttcactcaaaattgcagtatgtaaagcagattctcaaaaactctcctgaacacttatttatatatatgtttttatataagtaaaatttttctcatatttttatacgatatgcacacacacacatacatgcacatactacttactacatgttctgtacttgtactttgtaccatgcatattcaaatgtttatatacataagtttattataacataaacagtaaaagtaatgaatactgtttaaaataactaatatagtattttttaatttttgtggggatggattctcaaatacttgtgattttaaaagattctaaagctaaaacacaacttgattttaaaaagaatgattctccttacacaattataaatatttgcagtaaatattttccttataatactgttttgaccccatttaaaaagtattagattatattcctttgatccaatgaaaactgaaccttataaatggttagctgaaagtagaccttattcttgtccttctttagaagagtaaagatttgtcctagggaagatggctgacttcggttcccaacatgcgtatgcatttagactgtagctcctcagccctgtggacacaaaatttggacagcttattaggttacgttagcaatgcatgacggtttctccaacactaagatattcacgttgaaacagatttcctgttcgtcttatgtgtctggtaaaattgtttccccaattacaatttgacatatcaatagagggttaacaagagtataattacataacagaattcctcatgaactgtaatcagtctacaggaaaatcattattttatcttgatttgcagatgaatatactgctaagaaagggagcaactctgacctttgttaaagttgatcttttgtaattgaggtataaggtatgaaaagataaaaaaccgaaggccagagaatcaggaaatgaaagatagtatggactgaaggtaacaatattttaatgttatgcaatatagtcagagaaatattaaaaattagttgtttgctgtgcataggtggatctcgcaggaagctaatgaaacctaagcttcagtgcctctcacttagacatgttccattcgaggtcctgaacctaactttgtattaggaattctgtactaattttgttgaagaagaccagcaaagttgtgtacacttctacccccacaaaatctgcattgtccatgtgagtaaagtaaaataattcctgttatttttttctgttagaaataagtatggaggatatgtttttaaaaatttatgagttaattgaaatatccatatataacaagtgactttctcacaatatatatgatgtgatatatagggagatagtttcactttcatcatattttatacgttgattctgaactatagaaaaataataaatgggattttaattatagctcttagttgggaaagaaatatagagagatgtgggatttgaatgcccatgaaagacattttattttacttgaatatattcttgcttcactttaccctccataatatgttgtacattagtgctgatcaagtttacagagttacattttgctttcctaaccattcagtcaggaattaaaatatggcattgtataacaactgggaagaagctcatagtggatataaattagagtagataatgggtcaccttgatagcctctgtttacattacttgtatatgggcaaaataattattacctatacgtgtatttaagcttaattttcatataaacagtatttttaatctatgttaaaatagataatatctaaaagtgtgatctctaggtagtccttagtttattagtactgtacttcaaaaagatttttaaataggtccggcacggtggctcatgcctgtaatcccagcactttgggaggctgaggcgggcgaatcacctgaggtcaggagttcgagatcagcctggccaacatggtgaaaccctgtctcaactaaaaatataaaaattagccgggcgtggtggcaggcgcctgtaatcccagctactcgggaggctgaggcaggagaatcacttgaacccaaggggcagaagctgcagttagccaagatcgcatcattgcactccagcctaggggacaagagcgcgagacttcatctcaaaaaaaaaaaaaaaaaaaaaaaaagatttttaaataatagctaaaggtatgctctctaggtcatccttagtttattagtactgtacttaaaaattattttttaatagtcaattttgggagataattatttctttccttatattttccaattagttggtgtctaaaaataaatgttttgtctaattttagatcaggtatacattcacaaaagcataaatcatagtctcacaggaaattcaccaattttccatatgtcgtgagataactgtcctttctacaacctcataacaatgaatttatataattacctagattttcttagtgtgaatctacccattagttttattttcttggtagttatttttttccctcctctctgttactattggccttaaaatacacagaggacggttacagtgtcctaatagctgttacatgtgtgtgtttcagcgtacttgaatcaagtgtacatttatagtaccaataaccgcctttacagctttacagttaacaattctctcacaaaactgtagagcattaggcatctgagagccatagagggccaactttgttccagagtgaacatgctttttttcctcaacatatacactactgattttttttaaaagtatgactttcaagtgaattaatgtattggttaggagaactgcttgctaagtccttattacctcttgttaaagcctcagaaggccgtgctgaaagccagaggggaaaaaaagagtaatgcacaggtatctcttttgcagtggtgactgtattttgagtaccttgtgtgacagggtattattacagcatcttgtgggaaaacctattaggcctttgcatgttaaagctgtataatttgttgggttgtgagtggtctgacttaaatgtgtattataaaatttagacatcaaattttcctactaactaactttattagatgcatacttggaagcacagtcatatcacactgggaggcaatgcaatgtggttacctggtcctaggtttgaactgtcttatttcaaaagatttctgaattaatttttccctagaatttctccttcattccaaagtacaaacatactttgaagaatgaaacagattgttcccatgaatgtatgctcatactcgactagaaacgatctatgttaaatgactgtgtatatgaattatttcaagtactaccccaaataactttcttattgctctgaaagaagaaaagcaatgtaaatcactatgattattgcacaaacaaccagaattctccaacaattttaagtaatctgatcctcttcttggagaaaattgttacctaatagtttttccttatgaatgttattactactggtataaatcaaatttctataaatttcctacttaagtcttaagaactgggttcttcctttgatgttattcatgttcagaaaggaaacaacactttactcttttaggacaattcctagaatctatagtagtatcaggatatattttgctttaaaatatattttggttattttgaatacagacattggctccaaattttcatctttgcacaatagtatgacttttcactagaacttctcaacatttgggaactttgcaaatatgagcatcatatgtgttaaggctgtatcatttaatgctatgagatacattgttttctccctatgccaaacaggtgaacaaacgtagttgttttttactgatactaaatgttggctacctgtgattttatagtatgcacatgtcagaaaaaggcaagacaaatggcctcttgtactgaatacttcggcaaacttattgggtcttcattttctgacagacaggatttgactcaatatttgtagagcttgcgtagaatggattacatggtagtgatgcactggtagaaatggtttttagttattgactcagaattcatctcaggatga

SEQ ID NO: 10235 - DNA, 6000 bp, Homo sapiens
agtttatattcagagatcaccctaattatctaaaattcagtatagttgatgcttgaacaacatgggttaggggcacccacccccccgcaatgcagtgggaaatctgtgtataatttttgactccccagaacttaactactaatagccggttgttgaccagaagcctttctgatgacatgaacagctcattaacacatattttgtatgctatgtgtattatataccattttcctacaataaagtaagctagagaaaagactgttattaagaaaatcttaagaaggagaaaatatatttgccgttcactaaggggaagtggatcatcgtaaatgtcttcagcctcgccatcttcaagttgagtagactgaggaggagggggaggggctggtcttgctgtctcataggtggtggatgtggaagagggggaaggagaggcaggcacactcagtgtaacttctgttaaaaaagaaaaaacctgcatgtaagtggactgagtggttcagacccatgctgttcaagagactctatgctgatcctgaaaggtgttaggtgggatagaatgagccagtgagaattttgttctcattttttttaatcgcaaaagaaaatatttttaatttttgtttaaaaaagacgtggatattttgaattcattatgatatatgggaaaggaagtggcagaaacatattcataactgaaatggcttgagttgactaccagttttgaaaagttagtattcatgtcttaatgagtattttagtgccactttccaattcatatgaaatggggcttccctctccatgcttcatgagtataaccctgtgaagaatgtgttttcatccagaaggtagcttatgtgcctgtggcatcattcccacgcaaattaaaataggggtaactctcagtaggtgttgcaacaaaatccagttgtatcactctacaaattattcatcagagtagttggggcaatacccaaattgactctgccaagaaaaaacaataatattcatttagtacaaaacaccccttacacaagaggtccttttccttctagctccagaaatacatgggcaacagtcttattgattataggtggaaaaagaagaaataggactgaacaaagcattttattaaacatttttagataaaatccaatggctgggaggtagggaaggggtcaaaataaagaacatttgatatttgctaaatatttctcttttgttctatttatagaaaataaagtagtctatcaaagttttcccaaagattatgaggtttaacaacttgtccattgtagcttttgttaagccctggttttgaaagctgtggtctttgttcttgtattttgaaggactgcattttaagctgctggattatagtacttagggtttactctttgctggctcaaatccctttcacaatgttagattgttattttactctttgctggctcaaatgtctttcacaatgttagattgttatcaactaaacttttttttttttttttttttgagacagcgtcttgctctgtcgcccaggctggagtgcagtgatgccatctcggctcactgtaacctccgcctcctgggttcaagtgattctcctgccccagcctcctgagtagctgggactacaggagcacaccaccacgcccggctaatttttgtatttttagtagagatggggtttcaccatattggccaggctggtctcgaactcctgacctcgtgatccgcctgcgtcagcctcccaaagtgctaggattacaggcgtgagccaccatgtccagctcaactaaacttttcatggtgctgtctgtaagatcctaatccaacaagctgaaaaggtacatttgcagaatattttgccagcgtccagagtcacgtgatatcttatgttcttcaggcaacacattgtaatttgttcttaaataattgccgttggattccatataagcatggcttcatacagcaagtgtgtaaacgtgattatgggtgcctagcaataaggaaatcctactgaactatatgtgcaagtttttgctatccaggagctgtccttgtaatcgagaaggaatttactcaaaacagaaaagtgcaagatcatacaccagggagcagtgtcaagtttggtaggtgcacatgcgatggggtgatgagaaggactagaagtttctaccctgtgagccatgggactcacagaaagggaaaggcagaagagggcctggatgctggatgggcagtcaacaaacatcatctctaggtggcacccaagctgttcggtgcccctccttcctacccaactccaagcccatagcacctagagaacatattgaagttatctgtatgtctttccactactagactgtgagtggacatggtctgtggtttattgagctttgtggcacttcccatcccctaaatcctggcagtgtgcccggcacataataaataccttttgaaaaatctgaagtgaaagagtaaattgaaagtaaattcttactaaaactattaattcattagtgttaattcagtgcttactttgaatcagttttcacagaattttagagcaaaacgctgtgatacaaacaacctgtaaatgatgcgttatgtcttctgtaccttagtgacttttccagatgggagaggatgggaataaaaatgaggaagagggaaaacattttgctaactgaaatccctgcataaaacgaaagtctctgcttctgtatctcgtaaggtctctaacggaactagattccatttcagaacagttggctgtgtttctagcccaaagcacctactgacattattaaaatataatagcacagcagtatccccttctctttactctgctagcacaatgtgtttgaacgtagaaagccaaatgtggagagcctctgtttgaaaacagctcttgagatacacactttaaaattcagtttgattttccatttgtggcattttctttaactggggggaaaagttatatttaccacccatatttattagaacccatctcccaacctgccttgtctctgattctcccctgtggtatttagccaggcatctgctatggctcgggcaccagggagtcaataatgagtgacccagcccctgccctcaacatgctcaccacagaatacacctaagggggcagctcatgcattctcagacttgagcccctgcaaaggacccagtgctgaaagtcatttataattatttataatttataataacgttttaagcaaaactcaagatctggcttttagaagacataaaaatagattggagaagcatcatttcaataaaggatgctttatacattgtgctaataattcttgtttatcaaggcagcagtacataggtgtttggtatacatttgattgtgaatccttataattgtcttgtacttgcccaagacacacagccagcgaaggtggttatgtccagaatcctggcctggtctctctcaaacctgaggccatgctcttcacagctattctgtatcgaataggtcagctttccaaccacaaaggaaaccacaagtttagccaagtaaagaaagacatttgcaaagtcatggcagggtgtctatcatgccattgcagtctgtgctatctcccttcgccacagggtttcagctggtggcgtaatgtgttggcttcctagggcaggaaagcactccagtttagtggggtttatggaaatctatggcaaaacaaaactcttttctttcctactgaaaaaaaatatgatctgaagctaatttatcatcaccaggtaccccttcagtgttgttgtaggcagaattgaaataataacttctgcctttgaagaaggcatggctatagaattagaatgaaatggaggatagaggactaggtgaaggttagatctttggacatagaagtgccgccaaccgtaatgtctggtgatgttccccagcctgtgggaggcagatgagattgaaaccagggtgtacatgagtgacctggagcccgtaagtaacagtaacacagagcagagagcgctagatgaggtggagctcagaggagcatgggaagttgaatgagacagtaaggagcattctggaagctataatgggtagttaggagaatgccagagtgattctgatgcagtccttccaaatgccggcagagcccaagctgtgaccagtgacgcagactggaagtcccgtttactgggagagaagaggttaaggaacacccaggtgaacaattaggtcctccacaatgaagacaggtaatgtggaggaaagagagcttgtcatggtaagtgaaagcagcctgaatccatttttgcgctctatgaagcaatatataaatttaatataagaaatatttgttcctataaaatctatatgttttgatagcaaaaaacaaaattatgatttctgtgaaaaatataattcacatccggaacatcttatggttgtgttttgtttaaaaagtatgtaggtttggccgggtgcggtggctcacgcctgtaatcccagcactttgagaggccgaggtgggtggatcacctgaggtcaggagttcgagaccagcctggccaacacggtgaaacctcatctctactaaaaatacaaaaattagccagacatgttggtgggtgcctgtaatcccagctacttggtaggctgaggcaggagaatcacttaaacctaggaggtgaaggttgcagtgagccaagatcgccccactgcactctagcctgggcaacagagcaagactccctctcaaaaaaaaaaaaaaagtatgttgatgtttgtattttagctgcattgctaaccgtttatagtgttttgaatggatgaatgctaatgtttatgtgtatatatttttgttttcttaaaaacaggttcttgctcaagtaccaactctatggacccaggacaggtttgtcccatgacctgctgtgaacagtgtgttgtctgatagaagattcggttggcaaaccatctctctattgccttacagagcaagcaaagaagatggatcgattgaagagccatctgactgtgtgctttctaccttctgtgccctttttaatcctagtatccactctagccaccgctaagagtgtgactaacagcactttaaatggcactaacgtggtcttgggctctgtgcccgtaatcattgccagaactgaccatatcatagtcaaggaagggaacagtgccttgattaactgtagtgtttatggcatccctgacccacagttcaagtggtataattccattggcaagctgctgaaagaagaagaggatgagaaggagagaggaggaggtaggctttaaagttgtatcaaatgtcataataaaatataaacaggagctttggagccagcacccgtgatgttagttcttctcatgcaaatgatttaaagatctcatcttgtcttgtttttctaaggcaggagagaatatatatccttaaggattcaaagaagcaattaattcatttttttccctcattgacacagaagacaaaggacaaacacagaagtctttttaaaggcttcttggaattttgtaatataatacatccaatacattatagagacaaatgtaaaatggattttcctaaataatatattcaatttttaagggagttttgttttctttcatggagatggctggaataaacaatatagccattgtttatcattaaatgtccatttaattcattggccgtggatttaaagaccacacttctgaaagaaacctcagtgcaagtctcagccactggctgggattcctggagacctggctgcagtttctaggctgaggcagggagggagggaggatgcaataacaaggaaggatgtgggacaacaggagactgcttggtttttaataaatgcatttctgaccaaaaagtgtgagtcacctcactccgggaaagactagccagagagaggattgggtcttcgggaatcggtgcatttcttgttttagatgcgagaagtaat

SEQ ID NO: 10236 - DNA, 6000 bp, Homo sapiens
cactggaatgccaaatatcaaccctgagcaagtgctctgagtgtcagtaatagcttttgcagccaatatcttcagtctttgtttgtatccttgaggatgagtagtctagagccctagaaggactcccagtaacctcacgactgtgacagccgagtcaatatgtaaagatggtgaatgaattggaatttatttaattattttcctcatggtgccaatatctatctaatgtattggtgaaaggaacactttcataaaaaaatgtttttctcttgtcagagactaaaaataagaatgatgagaaaatactaatgtgctaattagccatgtcagagtggttattttactgatttcataaatattttgtatttaatttgttttattaaaaatgacttacatatatattcaataaaactatgtcagtactaacatgaatttttgatgttttgttactttagcgttgctcaacatttttgatacagtgacctctatatagaataaacctctatatagaaattttgtttcagaacgtgagacgcttgataaggatcatgttggttgattaattggggggatcaaaatagaacaaaagcaaaggccttatattctcaacctaaaattaatgctaaactatgccctggggaagaatcagcaagttctggccaatgatataccaaacattattgtccttaggagaaaacatgctggttgtgatatcagaggaaacatatgtacccttgtgttcatacacccatttctatgctgtcaaaaactttaatgacacgggtatgtacaagcaatatatacccaggtacaagaagtctgtgaaggtatcttttaaaaagtggactataataaatatttgtttgcatttgctacatatatgtgcatataaaattctgtctaaaaatacaggtatacactagtgaaaaacacctatttagacaaatgttatttaaatgtccctgaaaatgcttactctcaaaacaaatcaacagattttgagatgatagaaatttatatattatgtatttcttaagcaatctatgctttgcatatacttaaagctatacgtacattttatttaaaacagaaagcttagaagattattttttcaagtactaagcattatttgggggttattttctctgtctagagtcatcacaaaaccccatactagcttaaatgattgacctaagtatttccaatttattagctctgataatgatgtaggtcttgggagacaggtaaaatataactactgctactgttcctggtactaatgctgctagtaccaggaataataaagcagggactttattattaataatatttcttaaaaacttaatattaaaaattgagaatagtaattgtaatgttattaataatatttcttaagaacttattctgttctactctactccattatttgtagagaagttaggaagtcctacatgctgacaaagtaaatcgacttagcattggaccagatttcagtaatcactgttcacctagcgagggacagtaataagccctgcagcttgggttccccttaaggccagaggaaatgcttgtaagaaccatgaggaagcacctgtttctgaattggagtgaccttgagtttcagtatttcattcatgcatatatgtatatatatatatataatatataaatattatatataaatagattatatattttatattatatattatatatttttatatataatatataaatagattatatatttttatattatatattatatatagattatatatttttatattatatattatatttttatataatatataatatattatatataaatatatataatatataatatattatatattatatatatattatatatattatatattttatattttatataatatataatatatatataatatatattatatattatatattttacataatatataatatattttatataatatataatatatttttatataatatataatatattgtatatttttatatatataaaaatataaaggttttatatatatataaaggtcatatatatatgaggttactgggagtccttctaaggctctccatatatttttatatatataattatacatttttatatatatactatattatattattatatattatataatatattatatgttatatattatatatttttatataatatataatatataatatatattttatattatatataatatataatatatattttatataatatataatatataatatatattttatattatatataatatataatatatattttatattatatatgatatattatgtcacatataatatatgatatatgtcacatatatgatatattatatgtgacatataatatatcatatataatatattatatattatatatcacatataatatattatatatgatatattatatgttatatatttttatattacaaatattttatatataaatatattatatatttttgtattatatatatttttatataaatatattttttatcttatatatatttacatatataaatatatataaatacatatatatatatatatatgcatgagtgaaatactgaaaagaaattcaagatcactccaattcagaaacaggtgcttcctcatgtatgtaaaatatatataatataaaaatatatattttatatataatatatattatgtaaatatatatatgtatttttttgagacagagtctactctgttgcccaggctagaggagagtatcatgatctcagctcactgaaacctctgcctcccaggttcaatccattctcctgcctcatcctcccgagtagctgggattacaggcacgtggcaccacacccagctacgttttgtacttttagtagagatggggtttcactatgttggccagactggtcttggactcctgacctcaagtgatcaacccgccttggcctcccaaagtgctgggattacaggcgtgagccaccgcacctggcctcaattatacatatttaataataatttgggggccacattttctcagatattatgaaaagtttttgaagattgaaaaatacattcatttatttggcaaatattttgtgtatctgctatgtactaagcactctccacagcacttgatattttacagcaacaaaatactgcataaacttcattatgtgtataagccttatttaatccatatatatatgtatatatatatatatatatatatatatatatatatatacagtgattatgctttcactatgtaaatgccataatgtacaagaatataactcacagcccctgctttcaggtggcttacaatattccttaaacaaaatgctaaacttcagaggaaacagaaaattctaaaaataggttatttatagtggtatgcatcttttcccctacatcccgtgtcaaaattattttgttttttgctgtttgttgactacctgaacacaccacaatattcattatttagaattgacattgcattctttatatccatctgtacttttctagaaccagcccgcctcctctttcaatgtactgtttactaattatcaaaatcttagtgttctatttttctgaatgttggattaaaatattgcccaccctttaaaactcagagaatgtaaataactgtcaacttagtttctcttccctattcatcaaaattcatcatgtggaaagctgctttatctcccctgtggaccaagagggaagaaagaaaagaaaaacaaataagcggtctcattgctgggtaaactcaagtcaaataaaggagctttatttctccagcaacttcattactcaagacaaaccaggagcttcctttttgaacatggcactattccagtttttgtgaatgtatatacatataaaaaatccatgtaacacaatattttatctcctgtagtttataaccaaaaagaaactacaaaattcatcatatgcaaaattaacctgataatcaagtccacaggtatatttgggggtttccatgatctctctttaattggggtaatagaacctccaattaattcaagtcagttagacacaacggtatgtgaaaatatttctgattatggattataaaacatagatacatgaacatgaaatgaatcatctatggtttgggcaaatgaggacacattgggcaggaaacatcctataaagactaagaattagttttggattacttccaagaattgaaaaggagaaagagatactgaaagaaatggtgccaagaatatggtgggatatagttggaggaatgaaaatatattttatattgtttctgttaccaaagaaattttgtttccattttatatgtgaacatttcctataaagagctataattcgaagacttctttcgagatagcaaggtgtaatgaagacactgaacaaacttccaatataaattatttttctctttgattaggttcactaccttatggttctgtctgccaactgggcctatgtgaaagacgcctgccggatgcagaagtatgaagacatcaagtcgaaggaagagcaagagcttcatgacatccactctactcgctccaaagagcggctcaatgcatacacataaatgcatcttcctgttctttctaccatttgaatgcattggtgtttaactaagggccatccaaccatccaacctttaaaaaacaaaacgaaagtgcttctcatcaatgatatgtaaggtgacttatgaatcacctgagtacaattctttgttgtttagcacttaaatttcccaatttattaaattgatgtaaatcagatcttttctacaagctcctatccagccttttttttgaaatttctcaaactcatttactagttctgtaaaatcaaagatactaacattgtcaaatgcaaagatttgtttgatttttaaccacttcccatgtgttatacataacaccttttgcattatttcttatgttttgaaaagaaaatagctttttatactttttagttttgatttcggtaactagtttaactacaggtaaccttcaaagggaccattgtacattatgaacaatagatagagattacatcttgatgactcttgaaatatggaaattttgtctgaagatcagtggccatattactgtaggccctggttcatgttttcatcaatctaaggtgcaatttctaaatttgtaagagtaggtttaaaaaaaaaagtgcttcttatctttgttaacattgtacttttccttgatgttcttaaaaggtatttccctcagattactcatgtttatgttgtgagcatgtagaaacagtaatgctaatgcatggctagttgcctttttaagattgtgacaccaggcttaccttttaaagtttagtatatagagacaattttaatggaaataactactgtagactattgaagaatgatctctttgtgatttaagaagtggctggattggaacttttaatatgctaatgtggaaaattaattacctttatgaaggtggtttattacaaataagcacactaacccctcggaagttgttttacctactttaaaagttttaatggattgcacctctgtaaactattcctaaaatgtgtatgatatatttgaaaaggcttccattaatataatagctttgcttgcagccttccaatctatgttggtttacctgtagtgttttataaagtgtggtcagaggcccctatagaatgtattgtttgaaagtgtagtgatatatttgtgtttttatttcaagtaagtcattttaaccgaatgttcattcatattcatttataaaaagtacctgtatcaaaggaattttaacaaagagcaatcagtattattggaccaaatttggtgtttgttttcaccttgacgctcttcttttcattatttctaatgctacaagaatgctgtaaagtgtcttctaaaatgatgtagcctgacaagacattttt

SEQ ID NO: 10237 - DNA, 6000 bp, Homo sapiens
tctagcaccagtatcatgagagacctctgaatgccattttttaaaaaggaaagaatttgtcaattaaaggggaatagaaactgctctctggctaggttgtgattcatgtcaaataggcctgtgacttaaggagagtcaggttaactccagagtatgttttgtctctggtcccaaaacttagcagtgtggaagcctcattgggatcagggttttatttttttctcttttgtttactatcatatcccctgaggctggagctgacttgcatatcctcaatatttgcaaattgaatatatgggcgtttttcttgcatgataattaagtattatgctgagttggatgcttcaagtcaatattcaggttgcctccttttgtttaaacctttgggcagttggcaagatgcagcctacatgccagtcagttttactgtcctgcacatgatacccccacgcggtagaaccatagagccgtggaggcctcagaaatgtcacctgagagacagggtgttgggatgtaacttaaagtaattttttaagaagtgggtataatgaaacagcaaaacgttgatcattactgaagctgaagttggagtcacgggtacataaaatatagttttattatacttctgtgtctacttttgaatagatttgaattttcataataaattttaagtgaaacataaagggaatatagagaccccaaactagtatcacccattccgagcaggtaatggccgaactgcatagtctctttttctttctgtcttttaaacactggtcattattctataatcttctgcaacttgttaggtttgttttgattttggcttccccagagccagtcacctctttttatagttacctgagctctttgtgtaattttagctcatgtctcgtggttgtcaccagtacctctcttctccttcccaatacgatgagctaaatcctggttaaccttttccctatttcacttgttgcttcctccaacaccactgaggtcttccacatgacaggcacaattcagaggccagaacagggtcccatgttttttgcaggctgcgtccagtcctggggaacctcatagcctgtgattatcttctagattccattcatgtctgcttttttttttttcttttggatggcgtctctgttgtccaggctggagcgcagtggtgccatcttggctcactgccgctgcgccccccacaggttcaatcgactctcctgcctcagcctccgagtagccgggactacaggtgtgtgccatcacgcctggctaatttttgtatttttagtagagatggagtttcgccatgttggccaggctgggcttgaactcctggcctcagatgatccacccacctctgcctcccaaagtgctgggtttacaggcatgaacctgtaaacctggcctcatctctgctttttaaagtaacagcaggtacctgttgaaatctgtaaaaactcaactcagaagtggatttctccaaactcgtgagaggctgatcttcttctccctgggcagagaggtctttgtgtcctgtcttctcacccgtgtcctgctaagccatttctgtggttatcagtctctgaaaccttggtctattttaagaggtgtgagtaactctacccaacctttgccctttttaaccttcttatccaggtcactgatatgtgatagctgtgacctctgcgagctgtggggtgctgtggactccttgaagacaaggactgggtcttactcttcccagtttccccccccaggcctgggtcctggaggggacaggagggctctgtgaactaaacacccactgggtgagggcgagcctcctttagccagctgtttcttactcagccaagacattgacaagaatgctgtcatgggagagagagaggcagaggctcctgacggttgccttacaatgcggctgcgagtccccagcccacctgccgctccttcagggcctcctccctgcctctttgctcacagcactgtctggctgttgctggtgtttctccacccactcctgtctctgcctgttcagacttggcctggttccaccctcagctctctggacagccctccctcggatgcctggtgcatgcgtactgttttctccctcccctagattcctggagcaccagggccctacctgccgtggttatcagatctgtcttctgtagctctgttaactcttgcaggtgtgtttgtcttcattgatatcctaaacttgctgaaggcaaagaaaaccttgtaagtattttatcctcaggctttctgattgtcaggaactaaggagagttggttatccccctggaatgttcagagtgttgcttctttttttgtggtgtgactcctttttcaaagaggcacgaaagtggaagtggctcacatagcaggtcagtggctgagccgggtccagcgtgggcagacggggcaaagcatagctacatattttccaggaggggtttatatcctatctgtcattctgttctgaggacaggtcactacctaaatccttcgtggagcaggtgggaaatacataaatacaggaggacattaactgacctgactcacttatagcttctttatctggagaaacttttaaaaatacagctaatagttaggatggcaagttttatattaatttttccatagtaaaaaattgggaaaaatacagcaacatacaaagaacaacaacatagtagtaaaaacacccatagactcgccacatagaattgaaggttttaacattgactcttttcttcatatatcactgttccctgggggttttgggtattaggtggaaacttgattgtttagtcctggacgccaggattgtgtggccatcttttcccttctcttacatagtcttggagaagctaccatgatgttcatgatggaaagaggcgtagctctcctctgttcccactctcctttttttttttttttttttttttgaggcggagtctcgctctgtcgcccaggctggagagcagtggcacgatcttggctcactgcaagctccgcctcccgggttcatgccattctcctgcctcagcctcccgagtagctgggactacaggagcccaccaccatgcatggctaatttttttgtatttttagtagagacggggtttcaccgtgtgagccaggatggtcttgatctcctgacctcgtgatccacccgcctcggcctctctaagtgctgggattacaggcgtgagccactgtgcccagccttacatgttcatattctgtttatttccatagtcaccacgggaagatgggaagatcctgactttgggcagagcacctgagaggaccccaggatctaggtaccttctctgcgtgcagtttctcaaacaagtggagcttcctctccatccatggccctcggaggaggaaagtgcctgcatagcttggggccagctctggctactgtgaaaggacatttgatcctctctgctgttcagttgtgctctcttctcctggtgtggtctcttgcttcagggcttactttgtggttagctgagtccagtaaggtgaagagtcttctggattatttcagtggcaaaaagccttttatttccttctttagctttcgtaataacaggccgtgcttgtcttgcctaatacccttagaacatgctgtcatgttcttcaacttgcggtcatagagacacaattccgactcttcctgtgctgaacatcagctgaaataacatgccgtattgatccagttcatgagtgagaagtttagtctacacaagccttttctgtcttgctctttgcagaaggattgcgtcagcctaaaaagcggatctttttgtctccatccgctgccacaaagctgttgacggaggctatctgcccaagttggctgccttctctagctcttatcagtaaacttatctgcctcattgtgacatatctacaacagttgcttagccttattcaatcagtattggaagacaagtggaatcatctttcttctcataggaaattttttgaatggaaacttgccctcttaaatatgtaccgccaaaatttagccctgctgtcccacgcaaaggctgtacatgacctggatatcgtcatggggcatgtcctaactataatcatcattttctcaagtggatgtacatgacagatctttgcagctgtgtgtgaagagagaagggaggagagctatatgttttgttttgttttgttttgtttgctctggagaatgttgggcatatcctgttgtcagcattccgtacatctcaggtggccgcccactagctctgtgtttctgggagcattctcctcactagagccctcgcgtgggactctggatcttgtgcttgagtcttgtctgtttccctggtttggaagattctcttttctgtcatagaaaactcacagaagttggagtccagccctggtatggggctctgggctcaagcctttctgatatttgctgttttacttaagaaaagtacttatttgatctcttcccttcccccggggcagccttgatttgttttaaatgaatcatcagtcgtctgtccaaatctcactgtatctcagcgtcttctaaagacagtagcccttagagttgatggcagtcttgggctgacattctacataagtgaaacaatttgagaaatataaaacatgatcaaaataagagcaagagaatatttttatgtcccctttacatcagtggctcgcacccttttctttttcccccagtcagccaggagatgttctctactcctttctggtgtgcggtgtaggagtctggtggcgggtagaaggagactactgaagttggaaaatgcttaataccccctttctttttggagaatcactgttctatgaatatatcctcaagggacttgctgcagagacacagtcagaatcacagagggtctgacacggtcagaatcacagagggtcattcatgactcagtagatgtttgttaagcacctgtccttggctcgggactgtgttaagaaccaagggcatataaagacagatgggaggagaccctggccggggagaggaagaagcatctacataggtactaagtaccattcgctgtaagtgtaagacaggaggtgctaagtaccacacaggggttacaaataaagaagtcctggagttcagaggaaggactgattgcttctcatagaggggattgtgtaggatttctgggtagttgtggaaccgccgcctcctcccacatgaaggagggccctgaggaccctggaaggttgggccggttgctcacaaatcaccctcctgtctcctcctcccagtgtctcttcagtgttttgccattcattctcaggctcaaaattacttctcttttgtccatttgtatccacttaagcaatttttaaaaataattaaactttttttattgtggtaaaatatatataacataaaatttgtcatgctaatcatttttaagtatacagttacacagtggtttgaagtacattcatagggttgtataaccattaccaccatctagttccagaatgtttcgtcatcccgaattgaaactctgtgcccgttcagcaataacgctcattcctcctccccctgcccagcccccagtaacctctctgctgctttctgtctctgtgaatttgctgattctaggtacctcctagaagtgagatcatgtagtatttgtcctttgcttcatccatgtcatggcatgtatccaaatttccttctttttaaaggttggataatgttccattgtatagactacattttgatccgttcatctgttgttggaaatctgggtttgaatcctgggctcttaaagcattgtgcagctgggcgcggtggctcacacctgtaatcccagcactttgggaggccaaggcgggcagatcacaaagtcgggagatcgagaccatcctggccaacacggtgaaaccccgtctctactaaaaatacaaaaaaaaaattagccaggcgtggtggcgggtgcc

SEQ ID NO: 10238 - DNA, 6000 bp, Homo sapiens; identical to SEQ ID NO: 3815

SEQ ID NO: 10239 - DNA, 6000 bp, Homo sapiens
aacatcacagggataaatctcaaaacaccaaaactgtgaaaatgctgctaaccatgtgggtctgtctaaactggagtgttacttgtacaactggtttcagcccctccggagtgttttgaatgccatgtagatgagttgtgaactcatattccactttgtagtctcatatgttctgggacacgagctattccattctgacttctttctgcctcttgcagttccttcatccattctggacttggtcgatgatcaccatggctcaactgggggacagacggtgaggtgcacagctgaaggcacgccgcttcctgatattgagtggatgatatgcaaagatattaagaagtatggaaaacagatgtgtcttcttctttcgtggtcagaatatttctcccttgacacaaatgatgtcaaatacattttacttattgactataagatagggttttgggtgtgatagcttcagggtgtgtatcttttgtcatgaatagctgtgagaagaaggtccagggctctcattagaccttcaaaatgtctccaatctaaaaacaagagtgaattttaagaaccactgttctaagaagatttttactaccctggctcacatatcttatttggtgaactttgtttggtagtcggactgcatgtaaacataaatgtgactgcttagtcccttatctgcccacctgctgtttggtgggttaattcgccattccctcctccctcccccgagtcctcagccttcttaaatgggcacatgagcaatgtgtttacacttcatccatggtaactggttgtgttcagaagcctcagttgtttcttcctctagacagagactcctcatcttaacttctagggctaagaacagacttggatgttgactggggtttctagtagattccagtgtggagcaggattctaggtcttataactcaatctgaggatcatcgcaaccctagtgacaccctaggggctcttcccagtgtgagtgttgagaagggagggctccaggcctttttgaaggggtgggagattgagatcattaaatatggttgaagttgaactgttcagtttgctcataggttcaagattggggaatggtagtcatattttattaaacttgattatctctgcctgctatgtaaacacttagctttcagttgttcatgtgtgagttattccctcttcagcacatgcagacaagttttaatgttcatctgcatgtaaaataaatcagtgtgtattgccccgaaatgcagacaaggtcccaactccttgccatcttagagtgttcccgtggctccactcattgccatgactctcaggaattggccctatacttaggccctttttctctctagatgtaataatgaaacttcctggactattttggccaacaatgtctcaaacatcatcacggagatccactcccgagacaggagtaccgtggagggccgtgtgactttcgccaaagtggaggagaccatcgccgtgcgatgcctggctaagaatctccttggagctgagaaccgagagctgaagctggtggctcccagtgagttcctcaacagtcaggacaactcatcagctgagccgcatctgccccaggcggaactttgaatcccagataggggttatatagaaatgaaggtcccaaggcagaaattcagttatgaatgctcttaaagtcatgtgggactttgttttattttgttttgttttttgagacagagttttgctctgtggcccaggctggagtgcaatggcacaatattggctcactgcaacctctacctaggacgttgttttagattcagatccaaaactgcatttttgcagaggcccctcaacattttgcttgtctaataatatagctacagtctctactttgaatgtctgtgtatgtggatggagtgtggggaaggatcttctgtctcattgctccttaaaagatagatgaagccaaaagcaatataagcaaaatgcaacttacaaaataagctttataataaagcatatgaagtagaggtgtctgcccatatagtagctgtcaattgcatttatcctattcaaattctgtccacaaggttactgttggagcaactttggagaaaatactgagttctcctgattgaattttgtccccttcttgtataaggaaagagttgatgtagtttcctgggtgtagatggtttgagagatggtactgcctatccctaaaatgaaccaggcagccctcacacttccccaccagcagtgagagattcctggctcagacacagccacactaccttgctgcccctgtgcatgtctgccaggaaacttttcattgtgcctctctctcttgtcacgtagccctgcgttctgaactcacggtggctgctgcagtcctggtgctgttggtgattgtgatcatctcacttattgtcctggttgtcatttggaaacaggtagatattttctcataaaactaaagatctttgaagccaatgagaacaagcatagcaacctagttcagtgcttggcacagagaaggagctcagcaattacatgtggagtgaacgttgttggactctactgtgtccagtcactgtgctgcttcagtgaagctctggtgcactgggactttggtaattcaccagttacctgtcctggtcatttatagaaaccgaggtatgaaattcgctggagggtcattgaatcaatcagcccagatggacatgaatatatttatgtggacccgatgcagctgccttatgactcaagatgggagtttccaagagatggactagtgcttggtaagttccatggggtaacctcccaagactcccttttcccttgcacacaactttacaatttataggccttggcagaatagagatctgagcttgtgcttagtaagaactaggcaatggaaatttgctttcagaaatacatttctgtcttgacagtaagttaattggatcattgcaatgatttttttaaatctctttccataacaaattatagttaaggaaaattttacaaagggagaagagaatatgaagagggctggcaaagatacccaccaaaattgcttttctttagaaatgacacaaattgaaaatgaatttctgtgactaaaaatgagcagatgagaaatgaatgaggacaaccacaaaatgtattttgattcagtacattctgaagatgcattagatactcctttttacatatttggaatatggaatataaaaatataggtacattttgaggcaaaatatgtaaaaataagcaagccaacttatcacaagcatttcaagtatttcaatcctgggctgagaccaagtatatgaagctttagtccaagggagtatttcttttttaaatcacattcctaatgaatgaaagcaagacaaaggcaaatgaaagtagaggtagaggttgtgttatgatgaatgatctaacagtatatatgttaaagaatgccaaatgcaggttttaattatccaccggtctcattgcaaaatacagaagagtttaagtcttcttagagagttaggtaaactgaaatcaagcaaggcaccagagtgaaatcacctttgcaaaaattgtaactgaggaaattatgacagtgaatgagatatgacctaaccaactccattttgctttagcctccaagttgtccttgttccttcctgggcataggccgaactaactttgagaggaacttagtttatagtttgactttgaaaaaaagacaataatagccctttgccaaaacaaaccctctttttccctgggaactagactgcctttgcgggactaacgaattagctacaagattagaaagtatggtttaggggtcactgttgtaaaacctgaggtcagtgcttgagatattttggagaccctgtatttcgatgcaccagctgacaccacccaggtcaataaactggctcatctgatcttggggcccctacctaggaactgactcagtgcaagaggacagcatcagctccctataatttcatctttgacccaaccaatcagcactccccttttcaccccctacccaccaaatcatccttaaaaaccccattcccccagtttcagagacactgatttgagtaatagcagaatagtagaaattcccccagtttcagagacactgattcgagtaatagtagtaatagtagaataggtctcccgtacagctggctctgtgtgaattaaaccctttttctattgcaattcccctgtcttggtaaatcggctctgtctaggcagcggacaaggagaatccatggggcggttataagagctgccccccaatttcaaatatttatatctaagctttctttattttcctgcctatttcccaacaagggatgaggagcttagggagttaaaaagtagtaaaatatggggaaaagggcataattcccattataccaagaggcattgctggtgaagcaatacctttccaggtacgattttcagtaacacagacgtgcagtaagaggcagtgttggctgttagtgtcttttatgagccaagtcttttcctggcttggctatccgtggtgagactgacaccccgggaaatgtttctctcagggtgagctctttcagggtgggacaacagcttcagtgtctttacgtatgtctcctcccaacatgaagctaattgctgtgctctcgggcatgtttagctcttggtagagtggctttcctaacaaatagggagcagtgagcccagcctgaagtttttatttagtcactccttagaatcagtgatattttgaatactgaagtatttccagtggctagtaatttactaagacaaaagatgcccctgtttgcatatggaaaacagaaggggagagagccaggaggtgtgggtgagagccccgaaggcaagaggatcccaggggctggcccagcacggagctggtagacagcgcgctcacaccagggagggctgcaccctcctttctcccgtctgtgttttctttcccttgcaagtgttattcgacaaaagcaattatgctaatttccttccctgtgggctcaattccttttttgacacgatgacttggaggagtcattatgattactccaaacaggaaagacactcgcccagctgtccgcccgcagagagctggctacggtgcagaaagctgaggaggcgtctggagtttttgggtgttaatgattctgcctgcccacaggtcgggtcttggggtctggagcgtttgggaaggtggttgaaggaacagcctatggattaagccggtcccaacctgtcatgaaagttgcagtgaagatgctaaaacgtaagtgctccttcctggggattttttgagcacggggattttttgagcatggggatattaagggaatttctcaaaatcatgcagctagtaaataagacatttaggactaggtcctgattattttgactccaggttttatgtgtatttagattaggtttatttagattgctcttgctgcctgtatgttggaaaattaagagcttgttatttccagtgacttctttttactagaaagaccaggaattagttattagcactgaggccaagtagctatctgcttcttttagacttctggtaaatagaatgatatccaatcacaggattagtcatattcttggtttttttctgagaacaggaagttggtagctcagctggactgatatgtgatttattctttcaacagccacggccagatccagtgaaaaacaagctctcatgtctgaactgaagataatgactcacctggggccacatttgaacattgtaaacttgctgggagcctgcaccaagtcaggtgggctcactgacctggagtgaggattttcactggacacatgtggttgtgaaaactgttcaatcaggcttaaatcctccactctccatccccacacatggcagggaatagaagtcccttgaatggagctgactggtcccttgaattgatggaagctcattggtttttg

SEQ ID NO: 10240 - DNA, 6000 bp, Homo sapiens
tctcaatccttaggtagattgaagaatgtctcatggcctgctggcactccttgttggcattcccatagtcatattgttatacatttttaggattttaattttagaactgtcattaccttcatagtacatcatggacttatggactcatatatagcctttgaaagtatgtgtgttatcaaaaatagtcataagatggaggagggaatgaggatttaaaaccagctttttgaaaacagggttgaggatatcagcaggagtcttttgagaatgtaaaaagttccaaattttaagtagtgttgtgaattttctgtaggtaattattattataaatcccttctctatcataattctcagaagaacattggaaagaattttattcatgttagtttatagaaagagtcaaacagtttttatatgtttaaggaaacattgtgtgagacaagaaagcctttgtggaaagattaaacaaggatgtactataaacaggaacaaacatgcacaaactttgcagaaagatttattggatgaaatgtgatcagagccttaatctacagaaaatgtttgcatcccagtttgttttaagtaattgtgagatacagattatttcctttcactaagcaagttcctttctcgttctcccttttttttctatcataattggtaacataacatagttccaagtgatttatttgaaaacagttgtacatcaacaagaaacatttgagaagccatgctttaaatccatcacttagtaatatgtggcaagcgttattttaatctcaatgctatatcatttgtttatgttatagcagcagcagtgataatcttctgtctagatacaaaatatttgggtagatcactatttccaaaagtgtgtttcatcaattactagactcattccatgctccatgaaaaaaaaaaacctctgtggtcccagtaagtctgggaagtgctgtatactatatacccccctcttggtagttcactttagactttagcatgcaagtgatctgaaaaagtccttcagttaagaactattttactttgtcttgcccagattttccccaacatattttaccactgttgaagaataggtagatccttgctttgtaggttcactggactcaaactctgcataatcatggatttatttctgaggttttgatatttgccctgtaaactggagaattataaaggaatatgaatgatatgctgccatctcttaaaatcagtaatagaaggaagaaaatagctcacaacttttcaaagatacttgtagttttatttcccaaattctgcaatctgttttgcattatttttacacattttatcacaataataattagattccttctttttacttgggtgaggaatctgaaagatgtttcagcaatgtgttctaaggtatataaaaacttcacaattaaggttggattttaacttgtattattatcatttggtcattcagtatttttccctatattctttaaacagtttacttttaagccttcaaatttttaattcgtccatgatattaccggatgtatttttttagggagtttatatttatttgtcagtggctgcacattaatttctgtagcatatttcagatgtgacttcttcagtttgtcttgtatccttggttttatgctactgagaaactatgactcaaaaaatctaggaacactgagtggtaccataatgatatgaatctattttttccttttaattcaccataatttcttctttgatctctaatatcatttcctgttgctttttaaaacttaattgctgtttaaatttggcaccaagggaatttattggatgtaataataccattttactgtaatcattactgatgatcaacttatttacatttttctcatcccttattcctctttcttcttgatgctctacacatatcactttcataatgaagtgccattggttttattgactttatttgggtcattcttgttgaactactgtagtattgcttaagtcttttaaagcagctagtttagcatattgtttagattctaaggtttaagtttatacatgtatcttttcctttgtacccaaactaatgttgttcctaaccattagctagttaatggatttgtttctcatcctatcctgtaaacattaaatctataaacaactactagcattcttagaacaaatcaagattgctctttcatcttcttgctagggtagcaaaactaggtaattgtttaaaatttttattttaatttaaggaaaaagtatgttgtctcagaagtaacagaactgtatttcttagttgttattctgacactgactcattgtatgataatgtaaattatatcaaatttctagaactcagttttttctatagtttacttatctcacataggcatgcataggatgaaaacagtggtgttccggacacaaagcaaactgcaaaggaaagtaaaagttatcttcagaaggatcccataaagtctattgaagataactttaccccagtattaataatctccttcttcggtaatgtatttcaatttgcatgattagataagaagagaaaaacaaaagacattgactttaatattcaccctctctagagctaaatacaaatcagatggggaatcatgctacaatttttaaaaggaaaatctaagaatcaagagatttggtttctggtcaagctctgtcaggaaaggccttaaaactctgatgttggataaatgatttaacttccattggtcttggtgtctttatctataaaatgagttgtaatttgacagattggtgtctgtattagccagtgttctccagagaaacagaacccataaaatgtgagtgtgtgtgcagatttattataaagagttggctcatgcaattatagaggctgacaaggctgacaggctggagacccaggggagccaatgctcctatttgagtctgaaggctgtctgctgtagaaccaggaagagctgatgttgtggaagttcaaaggcagtctgctggagaattctctgctgccctggggaaggtcaatcttttttgttttattcaggcttgcaactgattggatgagttcctcccacatactatggagggtgatctgctttactcaaagcccaccaatttgaatgtttatttctcaaaagacaccctaacagaaacacccagaataatgtttgaccaaatgtctgggtgcttcgtagcctggtcaggacataaaattaatcatcacagtacctaaagaactttaaattctaatattctataattttgagctatcataggaacagtcatgtcttggttgcatgagacatagttcataggtcagtgtcagtaactgtctcagccaagtcttaagttacagacatgcatttattcatcctgcaagtctttattgggcactttctatgtgccaggcactgtgctaggtaaagaatttgaattttattctaagggcaatgggaagctattgaaagatttaagctagggtgtctgactttcattaaaagggataattttggctgtggtgtggaaaatggctttgagtgaggcgagtatagatatcagtaaggatatcaatgagggggtttgtatcaggcaaaaacttacctgtgggttgggtaagattgggttggtgctggtagaggtggagagttgactgcctatgggaaagttttaagatatatcattagcagttatcagaaactcattgtctaaaagcaaggttctagagtgtcaagcatgcacaatccttgacttatttcttattctcatgcaagtaatacctactacccgctttttcgtcacaaataaatagagtttaaaaaatcattgtaaagcactctccacataattttaaagggatcagtataaaatggtaagacattaacacttgacccatcctttcagagttgtgaatcttgaactattaatcaatcagttgtaagaaatgggaaaggcctcaaaagacagtgatctccttagatagaagtagcctattctaagtctgctgtgggacaaacacagaaagatgttggtcgcaagatgcttcacacccagcttcagcagaagaatatcagatctgtgagcaagcttcataagaagtggaagggtctggcagtagcatggcaagacagcctttcttgatctgatgacagatcatatttctaattccacctcatgttggtggcacactgtccacacacagtgagcattacaggccatcttgtgccacgttatctttttaactattttttcctcttcctggccttgctctctctggtctgtccagaaagtttctactacttatccttgaacaccttgaattttttctgcgacttcatctttccttccagccagaattagttactccttcttctgtaacattatcacttagtattttatagtgcgattacatttatcgatttgtttccctcagtagaccgtgatgacatagggacagaaaatatattgatcttcatgtctttatgaacccataaaactcatacaaacgtttattgaacacattctaggtaccagtgctatgcttgcaaattgtttactctataaactctatgaaggtagggaccatattttttgaatgagaaaaataataaggttttcacatataaatgatataactactttcaatgcattttcctcaaacttttattgctattttaaaaattgtatcattaaactaaattcttaaacttagtgctttctggctaaagtagagtttcacatttagtggctaaaggtgatcttgtatttttgtcaatctttctgtagacatttggtagttttatattattctttgtgttccaaggaggaggaatctaaacatttttctttcttttttccagggacaataattttgactatttggagtttcgcctttggattggcctgtggtccgccttcctatgtctcattttggtagccactgatgccagcttcttggttcaatacttcacacgtttcacggaggagggcttttcctctctgattagcttcatctttatctatgatgctttcaagaagatgatcaagcttgcagattactaccccatcaactccaacttcaaagtgggctacaacactctcttttcctgtacctgtgtgccacctgacccaggtgagggcattacgctttgtgtttatgctcgctttgtatttggaggaaggtgtaggctccatgcttgcaaattttcaacatgctgtcatggtcctcaggaattagtcttgtttttttctctgaaaaactctgctactgaatttgatgtctcattgcctgaggtattttagctgtatgattcaaccaggaaggagaccaggagctctggaatgtgaacataaccaactcaatattttgaaattaactcaaactgtgggatttgcaaggaattcatgtgtacattattcttgattttataagtggggaaacctggatacatgtattaacagatataaatatgtgacaaacctatcctttgctgcttctttattggtgtaggaatgtcttcctttaagtaaacctttaatacatgattttaaacttatagaagaaaaagatactaatccacttcagataatttaaagaattaaattatgaaaaaaagaaattcagattggaattgcctactggtagaattttatagtttatctctactagacaaataagaaaagaaaggaagagagaagaagaaatgaaagaaggaatgtgatgttctaggagtagatttatattgtagaatccagaaggacataacagcaaaagtaactcctggaaaggaatgtgattctctatatcttagccctttaaaatctatcataccaaacatgagttgacatcagaactttttcacaaaaaaataaaaataaaaaaatgttcagcttggtctttggaattctttcttggagtaattccattataaaattccattttataatatgaaaggcatttcaaaaaaggatttactttgagggaaa

SEQ ID NO: 10241 - DNA, 6000 bp, Homo sapiens
caaggcttaaggcttcaaagggggcagacatgtctggatctcaggaatagctgaactcacatcagaatcccaggcacctccccgagcaggttgaatgatctgaggataattttctggtgcatttagggaggcaggatgctaggtacctgtgaccctaaaaagtttgtcatagagaccccagaactttgtggcctgaggaactatatggattgggctaagtgtctgtggtcaccaaagcagaacgatgtgggatcttaccatctaccttgagtcccccaaaaccccctgagacttcatcatcctgaaatgtaaagcttccccaaaagataaaagtctaatttcctgccactcttccaggatggaaactagtgagtttactgactcatatttataaatcctttgcaaaagtaataatatgtggttcacgcttttttatttacaaagctactacaaattatattttaacaaccagatgttaacagcaactttgcttagtaaaggtcataggaaaaggccacagatggagagattcaggattaataaaagccaatgtaatagaaaacataataaaataaaaaacaaagtagatcaaatatttcagggtttatgccaaggtatgattatgaagagttactaaaaaagctgttaggaaatattttaacttgaggtaattacaaaaaatgcactattatacccatacatcatatacagtatacttaatacagaatttggaaaatattgcaaaccaaataaatattccattttcaacaatttctatgttattaagtacttgtgacattgattaattgtatcttctacagttgagactttaccaatatcctactgttactatattaataggttgatttggaattttaacttgttcataacatgtcatctgtttaaatttattagtaactatatatctcttggtgatatacatacctgtagatattatttttcctcatctgtgttttcaaaattttctgcaaagaacatgtaacacttttgaaatgttagttaccttccaagttcttagttttttccaattggcaataagaaaagttaacttattcaccattttttttgaaaagataggatgcattgtttatatcagtattactttaattgaaattaacctaaatttattctgagaaaaatataaataggattttgaatcacgtattctttatagcaaccaaatggagtcatttagtttattccagcccttatagaagcttaccaaacagagcaaaatggatcacatatttaaaagcaagttggctacactggtggcatctcaagtcattcactggcatactgaatcacaagatgatttcattctaaagatcaaagaagattttgttttgcctttaagtatttgagtttgctttaaagttcactgattcatggtttctcactctatcgcattctgggtcccctgaaacacaaagtaacacagtaaaaaaagggatggtaagacaccagttgtaacatgtcttatcaatgctgtatactgatttgggaagcagtgtgttacagtaatagtgttttgacttttagaaacagagaatgggtttaaaacttggacctgccacttagtagatgcatgatgtgatacttaatctctttttgaacttcgaagacccttatataagaaaatggggtcatgtattctttgtataatattttgtgtatgagttttcctcctaaatgatactagagtgtgtttgaaattaattagccaaaatgatttagccactccccttttgacagatttttgaggggtttctgtggttttactattaaaaatatatactactaacattaaaatccttgtattcttgttgtttgtgcaggttactctggattaggaatgatgaaaggtagaagggtagaaaatgtagtctcattattaactggaagacattattaaccatggaacacactctttttgcatgcataaaaatctctttcttttcatgaaaagcaattgtgggcagaatggagcagctatttcctcagaggggagtcactctatcagacagagttagtcttttatattttgtgactctgtctttcgagctaaggcagagcaattgttctttagcaccccttcctcgctttttcgctatatacagaagtatcttcctatagattagatatagatgatttcccacttggacttagtagttgctgagaacacttaatttggtctatcacttttccttttttttctgagcaaaagtatcttcaaagaactaaaaaaaaatgtaattctaacatgaggacggtctgctatcttatcttctgttttccaattatatctgccatctcagttttaagatcaacaaagaaggtggataaagcacttgtgaaattatcagccacactgagacaacagtattctcagaagtaggagttaaggggtctctgaaataagagattaatttatttttaatctctgtcttttttaaggattggatttttgaccaatccatttcaacaggaatgatctcagagatagaatgtgaggtgtgcagctctctcaaatgttgatcattatattttatatcattttgttaattaatttatatcgctttttcttaccgagttttagcaccttcatgtcctacaaagagatgagttgatagatatcaggttatcttagactacacattcctagaataaacttatattcttcagtgaacttctgtttttacttaggaaggttaggaaacgtaactagattatgcaaatctgatctgaacaaagatttgaagatataaaacgaatgaggttagttatcatccccacctgtcttataagacattaagaaggaatattatctattcagggggtagtttaagaaaaactggccgaggaaagaaaggaggaccccatgaaggtgctggaggatcaggaggaagaatagaacaagaggaaaaaggcagtcagcttaagggaggccaggagggaggctgatcagagtaaggtcaggagaaagggagaagtgtttaacttaggattttaggtactccatgcttttattaccttttctaaggagttcttaagggaatcagttttagaaatttcttaagttgtagaggctacttcaaaaaataaaaaacgctgatcattgaatagttgaaattttgaaacttctcctttcctacggcatatcacaaaggattattttcttcatattccaagtttttctagtattatcaataaagttcaaagttgttcttaataaaagcctgccacagtttaagaagctggatagcagcccacaagtacattgattcaaaataagagaacctgagcatcaggctcgtaggtttaccatcactgtctccaatgcctgtcttatccatgggggagacccattaagtagcgaaacagtgcaaatgaaaaagcttacaccaaggacaattaagatggaagaataaaagcttagatagtgctttcaagcaaagggagcagaacagtggtcaggagcaggaccagcccaactgtctagtcactgggactccaaagagaggagacatcaacagagtgtctggcatgatgaaatgccaagcacccaaaaacacagtcctgatctgagtcttgacattgaaaccctggaagaaaatcagtcagaacaatataggtaaaaatctggaagacggagcttttattgagtttagcaagaggaagtagttgaagttcacctagttttgggaatagttgctcaaagatgattcttgtatattcactgccattgtttgaggaatttggattatgtcaacagggtgagaaggggcaattgggtgaaggtcatgtgccagaggggatgggaggaagagacagctgtagggatcaagcaaatgaaagagccgtagtggaaaatttagtccttcactctctcttacaaagtggatgaaaatatttattgaataaaggaatgaaagaatgaacaataagtataagaagtaaaaatagagtgcaacaggatttcacagtagtgaccattactccagttggggctgcttacgaattcatgaaatagttgacacatgaattacaagttgaaggatagacagtattggacatttgagagagaagaaagcacaaataatgaccaagaagtgagaaaaagtagggaagggatagggaacaataagtagcagattgtttttctagatgtattttttaaggttaatgaagtaagttcgaatgaaataagagggtatcttgagtccctatttaaggattttaattatgtaaataataaatgactgtgatattatctctcaattaggtaggattcatatgagcaagatgccatttggttaattttgttcttgagaatgtaaattgtagttcgctttagttaccaaaaggtggcaaagttacatgcttgatagtagttttaaagtactagactgcttcccaaacaagccctctgatttttattgagtctgtgtcaacacacatacaacatgcaagataacaacgggcaaaagccacattgaagtttgctgtactgcttgttgatctctgttcctggcaatcctgcagcatcacagcttgcaatattatgaatcatagccttgccttttcattttattctttatttagtactataattatctaaatgagctttgaaattatgagttgaagcttcagactagtctctgattctgctattccaagtataaatttggttcaatactttacatgtcttaaaagagcaatgcagtttttaagaggcagttcaaattctcaccaccttcttttctctcttacagcttctcaaggaataactactgtcctgaaattagaatgacttttttctgtatgtttctgttttaattacttattctggttaatgcctcctaacaaagatcatcaggaaatctgtatttgaataagttcggtacatttcgatgatggagaatgcacatcataagaaagcgtggagcacctcagtaagagggtgttagaaaggatttattacagatttggacttgcattaggtaagtctgggaggactcaaggaagtgggactttgctccaaaatgtttactgttaggaagcagaagtaattctattattgaatgtcttatcaaatcttacctaaaagaagggaagaataggataaaactaaagctgtaaccggtagagaagcaacaatcactcctattagctgggaagaggaaatgacattcagtagagagaagaaagcataaatagaggagatttggtcatacttgtggtttggataatattcctggtttgccttcgtttaatatgaattcagacttgtttttattttggcctataatgatcacaaggtggctttgtctgatgttgatgtaaaattacttatgttaagtagaagaatattaagcctatgtcatcagtctcataaaggtgagttccaggccagaccctagttgttagtgttagctttgctcacacatgtcaagggctgctttttgcatatatttatatatctacatctagttgcatatactctatatcatttgggctatgtatcattttttgtgtttaaatgtatataaatgttatcatactgcatgcgtgatctctaataatttgattcttaaaatgttcattcttagaggggtgtgatggctcatgcctgtaatcccagcactttgggagaccaaagtggaaggatcacttgaggtcaggggtttgagaccagtctgggcaacacagcaagaccccatctctacaatataaaaataaagattagctgggtttgattgcatgcaattgtagtcctagctacttgggaggatcacttaagcccagcagttagaggctgcggtgggccatgattgcaccactgcactccagcctgggcaacagagcaagactctgtctcaataaaataataaaataaaataataaaataaaataaaataaaaacatagcataacataaaataaaataaaataaaataaaataaaataaaataaaatt

SEQ ID NO: 10242 - DNA, 6000 bp, Homo sapiens; identical to SEQ ID NO: 3816

SEQ ID NO: 10243 - DNA, 6000 bp, Homo sapiens
ctttcaaatgcgcgacaggtttacacagttcacatcatctgcctcattgcctttgacaaatagatttctgcaatatttagactttcaggcagtgaaagtcagccactaaacaattgctctgggacattaccattaccaagttcttctctctctctcatctgctatgcagcaaatcctatttcatgcattctttcaaaaatattgtcacaggatctctagatttctatcagcataatcaagctttctatcccctcattttgctcttgtatataatcacaggatgtctccatcacttaatgccacccctatccattctagtcgtactctaattaattaagaaaataaattcaagcttgagaaagtgaaataaacaacaatttgttaataaaacagtatcaaggctgcagaaatagacctttagctaatatacatacttttccacacaccatgaccccttcttcacttcaataaaattcctactcccagaagattctttctcttttctccaatgccattgacagttctcctccagatgttccatatgttctttgccttatcagtgtgaagtcatatgtgtgagtgtgtctctgtgtgtgtctgtatggcctggagtggggaattcaaaatattaagtgactgcttccacatgatgaactcaagacgtatacgctgttttttccatatatataaaatacatgtgctaaaggaagaaatattgttgaggtccaataatttaatagagatagctatatcctaaccatcatgtgactgacttaggctaaaacttttttgctcgattgtttcctgtgttgaaagaattattcaatggactagcaatctgtgaccacgtttttcatgactggtacatttggatatggtgatatgcttatctcaggatttctttaatataggctcttgctttttgtttataagttcttttctaaaatatttatttagcagatattatctagttctttgagagtgtaatgcttttgtttaattacatcagaaaatttttagaaccagaatgatcggaaaaagattttctgagcaataattagtttttagagattaaaatggatttccctcaataattcatttcatataaaaactaggaaaattattgaaagcactttttttggccaaattcttcccatttagcatgtttgcaattttttcagttctatgccttaaatttctttttttcttcccccccattcatttgtacttttgtctaccaaacaaatcctctacaagaaaatcattccctactttagaggtttttgtcttatgccaacaaattctcttagccttttttgtttatgtgttagcacatagaaaagtagagaaaacctatttgccaagagggaggaagatgttaaacccctcacttccccaaaatggtaccgaaacataacatttcaggccaaatttatagcctaaacagtagttacacaatgaaaatgtattacttatcatagcaaaaatgtgttcattcttcacacattatataatattcattccttatgtacatatttaataacatattcctatgttattaaaaacaacaacaaatgcagttttttgagctatgaaatttaagcaaattagaaacgattaaaattacattgatgaatcttgaagttgatctaaaaaattactgttgaaaataaatagggtactggtatgctgaaatttacttaaataatttgacaagttaagtttgagccacaaaggatatatatgtgaccagttttaattgggaaaaaaatcatgggatagatacttaaatagatctggaggattcaaatcaaatttattttctaagaaaatgatagctaagaattaagaggcttttgatagacacttatcttattcattagctcttttgtgatactcattaacatacattaatttaatgattaaattacttccttttttttcctttcacattttttacatttagataggttctcactttgtttctcaggctggagtgcagtggtgtgatcgtagcgcattgcagcattgacctcctcaacacaaacaatactgcagcttcagcctcccacgtagctaggactacagccttctgccagcaagactgtctagtttttaaatttttgtagagatggggtgtctctatgttgaccaggctggtttcgaactatggttcaagtgatcctctcacctcagcctctcgaagcggtgggattgcaggcgtgagccactgcccccacccaattcagttttttatccagcattgtcagatatcgttctagtggaagatacagtagttgatataaatgatcaaaacttctgtctttatgaaacttatattctagtagagatgtcaaaaattaaagggaggctgggtgtagtggctcacacatgtaatcctagcactgtaggaggccaaggctggcagatcctgtattagtccgttctcaggctgctataaaagacatacctgagaccgggtaatttataaaagaaagaggtttaattgactcacagttcagccaactggagaggcctcaggaaacttacaaccatggtggaaggggaagcaaacacgtttttcacatagcggcaagagagagaagtgcagtgagaagcagcaggaaagcatcttagaaaaccatcagatctcacgagaactcactcactatcacaagaacaacatggaggtaaccgcccccatgattcacctacctcccggtgggtctctcccatgacacatggggattatgggaactacaattcaagatgagatttgggtggggacacagccaaaccatatcagatccctttgagcccaggagttcagatcccttcagaccaatctgggcagcatggcaaaaccccgtctctacaaaaaaaacgaagaaatttgcaaggcatggtggtgcacacctctagtctctactacttgggaggctgaggcgagaggatcacttgagtccaggaggttgaggctgcggtgagccatgctcgtgtcactgcactccagtcagggtgacagagggagaccatgtcttgaaaaataaataaataaataaataagtggaaattatacgaagaaaaatcattaaaaatcttaattatgaaggaaattagaagttcaaaggaagattagtgggtttattgaaagtgtaaatttgtttcatactcactgaattcacccagcagtctcaaggaaatatttaacatcaacaagtacttatatattggtgctgtattaacttttaattagaaagtcatggtctctatccaaagaaatgtatataattaatacattcccagtgttaaatataacctgttttttaggttaagcaactattgcatagcattcagttggtgttattgccacatctgcatttaactggctgtttctacaactcttactacgttgaatataaaagctcactgatcatgcagatatatatataatatatatacatatatacatataaaataaataaatcctaatggagtatttaactctagctacacctaggactatgaatattcctacagatttaaaagatattatttggagcatatgtatggaatgaatgttttcaaaacatgggaatgcaaatgatcttcattcataaatgaactaattgttcttaatgttattgaatatcatttcctagttacagagctggggaaaagaattaaatctatctatctatccatatatccatctgttattatgtatcagttctggctgtgcacatttttatattttctagataaatgttttattttagccacatggtgtttttttcttttaaaaaaaaaaagcaaaactgggtaatcaattgtgagaaaatgaaaaggaccttcccatgccactataaaagtatgccatatcttggctcagatccaattctgctgaatattcattagtgagtatacctaaatggcttcattgtcaatgtttatctgtaaaaccatatcttttcattattcgcattatcattaacaaatacacatgatgtgtatgatgagtacaaaatagaatacaactataattgactatctgtaacgtaaaaatatggaatttgtatcattttatgtaaaactactgcatcattaagtataaagcttccttcccttttaatgtaagttttaaaaaccagtgttacatacacaaatctttgcatttggtattttgtcctaattagagaaatcatatgataattaccctacttaacaaatgaataggccaggagtagtggctcagcctgaaatcctagcactttgggaagccaaggtggtggattgcctgagctcaggagtttgaaccagcctggccaacatggtgaaaccctgcctcttctaaaaagacaaaattatctgggcatggtgacacatgcctgtaatccgagctacttgggaggctgaggcaggagaatcacttgaacacggcaggcagaagttgcagcgagccgagatcgcaccactgtactccagactgggcaacagagcagtctctgtctcaaaataaataaataaataactaaataaaaataaggagcaaattcctttagaagtataatttattgcttattccagcttactttggtgtgaaccagggaagaggagaagttagaaaagaagaagaaactgacaaacatgaaaaccttaaatctcttgtcaacaaatattggaagtggcagcaaaaaaattgtatataaacattagatatatgaagcaaacatgtttttaaatccaaccttcattatgaatataaatattctataactttcattccaaaagaatcatgagcatgtgagaatcaatttctgcacagcagcaatgaaaagttattgaaataaatcactttgtcttttctctcaggattgacatctttaagtatgtgatctacggcatcgcagctgcgttctttgtgtatggcattttgctgatggtggaaggtttcttcacaactggggccatcaaagatctctatggggatttcaaaatcaccacttgtggcagatgtgtgagcgcttgggtatgttagttctctacattcagtatttaatgtggattgatttcaatagcacacaggtgtttgcattcatctcccaagaattaaagtatttttttttcacacagtaacgtttccttctgtgatgctatcttaaatcttgataacattatttttgaaattaagattattccttgtgaaaattcagtttcaaatactcagattctatgtagcacaactagttttgtttctagaggtagcaacactgttgattgatgtatggttttttttttccaaagggctctgtgattctcttgagaatcacagaaaaattcatctccaatttataagcaatacatgtgcctgtctcctgttaaacatatgtctctgtattttactgtaaatttgaggacagctatatcatatgatttctgttttctattaatttaagaattctattaatttcagcattaaattttaatttatataatatttaatggcaaatcaaacttatagtcttactctacagttttgtaatacagacaatgcgtatctatctattaatgcatgagtggtgaaaatgaaaaataataaggttgaaagtacttttgcacttttatacagaataatttttctagaatgaaatgttgaagcttccattcttgacagacatattttccttttttctaatgttatgtaacaacatgtgtctaattatagcatataattcatgttaagtaagctgtctctaataaggactgatgtaaattacttcaatctcacagaaatgttcaaaaatgcctgtttaccagcaaaccttttttattttaacctgtttctaacacattttattatgcttcttggtgtcaacagcaacaataatctgataagatagtttgcctgagttgtgggtatttgtagtggtctctggaattatttcttataagaatcatctgtttttagtttgggacaaaacttattgtaacacccaaaga

SEQ ID NO: 10244 - DNA, 6000 bp, Homo sapiens
tttgtcatcctcagacaatgattgttttactttgagtcttctcaaaaagtagtttacaactggctacagtacaaaatgtgcttatttttaattggttacagtccaaaatgtacttatttttcaaagaaattcatggaaaggacattgccaaatattctcagaaatacaggtttctgacaactttgaaggtcgtaccattagactaggtaaaaacttccagaagtctaatgaaaaaactaatgagttcatgaagattgctaacccaacatcaagcagaacaaacgttagtcatgtaagacttaactgatagagaactgaatgatttttctatgatttttaaaatttgaaatatagctgatggtttttgttttgttttctagagtcaagaaaactctttttttcttttgaactatttatagcttacagtaattggtaaagtatacttttgtgagcaaagtggaaacatttaccattttctctacctggtgtcactagaatttagaaactatttgtgagtagtcttattttatggcaacatagtaatttgcataaattaaataagaatctgttttttcccaaaataatacacaattgtagacactattttaccaaggctgtggatggaatgacatattttcagatattactactttgaggaattgaggttgactttctagagctgattaaaaaaaaaaaaaaaacccttgtaaatactggcctggtagcttgtctatatggttctcttacaaggttcctgactttgcagcaagtagaatgtcactttttggcagcttcaggaacctcaagatattttggaatccttgagaaaaggggaatgtacccagttcatacaggtattgggtacagtctcatagcaaatccatggtttggcttcccagccttgggaggtttttaaaaatcgaatgtgagattccttatgtaaaagttccagcaaagccaactttaaaaaaggtcatatagccaatcactgttcttactgcactttgtgcaaataattaggccaattacaataggagtaaaacttatgttgcaaataaattggtcttactatgtcttatctttggtagacctaggggactacagagagaaacatatgtttcagaagaaaactatagtatgcctgttattggattttagccttgtccattgtttttaagtttttattatttgcctacaatttggactgcattctgaattattttctggctacaagtctttaaggttttcaaatttttctctcatttttctaaattgaaatcactagaaattaaaaacatgcttttttttttaaagctctgcaaactaaaactagataacatgatataaactttcagggaaatcactagagaaacttacatacaaacagtcttcatgcctattgatgtctggactctgccgaacgttcatttgaatacctgattcgaactacaatccagaaaaatctgtcagattgccatctaaagatgcttcagagatgctagaaaaattagtttatagactactccagacattaatctttgttttttttatgtttctacagaaatgcctcttactaaagatctgtttgtctgcactgtatatggaggtcaagcccatctgccatgccgcctcctggaatgggaccctgctgtttaactcaactgaacttttctcaggactaagaggctgattcgagaagatatgagataacatatttaaatttgttcttttctgcttatcctaacttgtttttctcctcctttgcctgcctcctaaatagcaacctttaactcacatctttccaaagttatcaaccttgcctttaataagtgaaactttcttaaagaaaaacttccaaaggggaacagaaggaaactaaaatatttcctctccaaatatattttcttgacatatttcaagaaaactattcagaaaagctggaaattcaagaatagctgaaaagctgccttttgtggggggagattcgcatcagtagagaaaacctgcattgatgcagccaggccctctctgagaccttcctttgtctggatataggaaagattaactgagagtctgacacctttaaaagtctgaaagaaacattcaccttgtgttcttggtgtgggctgagccctgcaaggtttcatctgcatagaaagaccagctttgcaagcccgggctcctcttctccccctcccataagctgtcttgccaccgtatcctattttgccatgataaaagccccaattctttctgtaacctcaagatggaatatataagatttgctaccccactgggggttgaggtaatcactctatggttctctgtgctcattaataaatttgtatgccatttctcctatttatccatctttgctcagttgattttcagtgaactttcagagagtaaaggggaagtcttcccttggcttcaacaaggttatgtcatgaaaaatttctagccaggcacggtggcttatgccagcactttgggaggcagaggtgggtggatcaccagaggtcaggagtttgagaccagccttgctaacatggtgaaaccccgtctctactaaaaaatgcctgtaatcccagctactcaggaggctgaggcaggagaatcgcttgaacctgggaggcagaggttgcagtcagccaagatcatgccattgcactccagccagggcaacaaaagcgagactccatctcaaaaaaaaaaaaaagaaaagaaaagaaaaatttatattcatctcagaattttacaagtttagctaaagccttaattttgagtcccatggttggtaagtatctccgtttttaaaaagaagtgttagttatatttccacaggacttgctaaaaggtggtctaggcaatgaaactgaagatgcgggatgaatgggaagaatattttggaaacagaaccttaggacttgatggacaattaggtgacaggaatgagaaagcagaaataccggataattagagtaaaaaaataatgtactaagtaagataatgaattaatttatatgtttattgaatcccatataaaattatgtaacttgttagatttcaggggagataatggcctctctatacctgagatctaggatactgacaccatttacatcatcactgtaagataaatgaattcaacatcaacattttgatctattcacttataataaggcaaaggaaagaaaacatcatgattttgattattaaaagccagtatatgatgatttgtatctttagtgtattctaaatttcatatattttactgggaatgttaaaaatatttatgaattaggccaggcatggtggctcacgcctgtaatcccagcactttgggaggccgaggtgggtgggtcatgaggtcaggagatcgagaccatcctggctaacacagtgaaaccccatctctactaaaaatacaaaaaaaaaaaaaattagccgggcgtggtggtgggcacctgtagtcccagctactcgggaggctgaggcaggagaatggcatgaacccgggaggtggagcttgcagtgagccgagatggcgccattgcactctagcctgggtgactgagccagactctgtctcaaaaaaaaaaaaaaaaaattatgaattatatttattgttggaagatatcaccatctttctcaagcatgtggcaaaccagttggatactgagaaacaatgtggttaactgactaagatcatgaactctggagtattttgtcctgggtatgaattttgcattcccatttattatgagaatttgggcaagtgtttaatctctttgtggattaattccctcatctgtaaagtggggataacagtattttccttttttagtgagaattatattagctaatatgaagcccttagtacaatgcctgacacttagcacactgtactcagtttatgttataattattattttgtatttcaggattatcatagaatccgatgggaaaaaaacaaaaaacagttctaatttttagaattcaaatattattttgaataagtcttcaggagatagattgtaagttgcttgtggtgatcctaaaactgagcttatgaatcaatctccaaaatctatcacttatctttttttttttttttgagacacggtctcactctgttgtccaggctgaagtgcagtggtgcagtcttggctcactgcagccttaacctcccaggataaagtgatccttccacctcagcctcccaagtagctgggactacaggcgtgcaccaccacaccaagctaattttttgtttatttttttggagagacgaggtctcactatgttgcccaggctgatctcaaactcctgagcttcagggatatacctgcctcaggctctgtaagtgccagaagtacaagtgtgagccagcaacttatatttattgaacaaatgtattagtgttatgctttgctacagtcacagttcatgttagtcaatttctagaagggtgatgcatttctgaatgatatgttgaacacttttaatttttgttgactacttcctttcccctcccataagaataactgtattcccatgtaactgaagtgcatttacacacccctgccaggagtatacctcttccattacgtgagaaagagctgtgcagatgtttatgtggcatttgaatgatatgctctgcatttatccatgcattctgctaaaaatattgttatttatttttcatatcaccttttccccattagatagcaatgttcctcaaggtaagtaatcatatccattttattttattcttccacttgctcacagcatagatatgtatacttttgggtgtgctttgcatgaaaaagctgtgtacaccttggggactgacttactgaaataacttctccagtatgactcttgaaagaactaggtcaataacccatagagttatataattttttttttttttttagcttgaggagaccttagagatcactttttccagatccttcattttacaaattaggaaatgagccaggattacaactcatcctctcaactgtcaagccctgtgctctttcagcctcatcaactgcctcttggattgaattgtttattttccaggtgatttctgcatattatgatgtgtgtgtgtgtgtatgtcagggtgtgtgcatgtgtgtttgagtgtatggtttttagaactttataaccttgtccaattacagaaacatattttatgtagaagaaagaggagatgacaaaggataaattaaagggagaattttctcttcctcttgtctttattaatgttattatcattaagaaacaaaatggtacacagaagacaagggaacataaaattatcatatgaaacctgtcttttggaataatctatttccagactccacttagagatcattatcttggctaccgagtcggttgtggggtgctgagacaacgtgtgtgtctgtaatgtgcattcaatgtatttaggagagagactttgcacgtgtctctaatgaaagtgaaagggggcagggtgggggcctctggggaggagacccacagtgaaggggaggaaaacgggcttctcgcagaggaggcaggtggaaagagggaggggtctgtgcgcccgcagagtcgccaggcgccctgcgagttgtctccgctgggaggggcgaggctgtcacttgccagggcgcgaggagcctcagcgcggcttggagaacttggccccgcgcagcgtctggtcactcgctctcctctggggactgcagagaagcaggacctcgggccatgggtgagtgcgcgggcgggcgcgtacacctcgcccaaaggctcggcctcgggaatgggcattatagaaagaaaatgaatgttcctcggcctcagactgcgtccttcccagctctgttccccccgcgcctggcgtcccccgccccccgccctcttgtctccggacttttttttctgggagagaggcgatggcgatggggtggcacctggaggcgagggagggtgcccgactgt

SEQ ID NO: 10245 - DNA, 6000 bp, Homo sapiens
ttcttaatgcttctcttgcctagtttcagcttattatttttattatttttgagacaatctcactctgtcgcccaggctggagtgcagtggcgtgatctcgtctcactgcaacatccacctcccgggttcaagcgattctcctgccttagcctcccaagtagctggtgaccaccaccacgcctggctaatttttgtatttttttagtagagacggggtttcaccatgttggccaggctggtcttgaactcctgacctcagctgatccgcctgcctcatcctcctaaagtgctgggattacaggcgtgagccactgcgcctggcctcccttgcttataacttgccttttctcctaattgctttgaagaaactgaaaatatcagtctgcacctttcagctaaaaacttttccataggtaataaatatatatattcaatatttagaaaaattgatataaatttgaataatgttcttaatttttggtgagaacaatttggccattcatagacagatatatgagaatcaaaataatcaggttttcaaatttacactgcagctcatcctccacgtgctcccttctagagcttcatattattcacatgttgatttttaaactacagttaatttttaatatatattatatctatttgttatatatggtatacttatcacaaaaactttattttatgtgtgcgtgtgtgtgtatatatacacatatacatatagcatcaggagtactggaggttcagtaatgatgttagcagtggtacatccatatgggcctgcagcaacctcacttcttgcctcctcagaaggaagaattcaactgaggggcataaggcagagtaagataccggggcaagtttcagagcaggagtgaaagtctattaaaaagttttagagcaggctgaggcaggagaatggcgtgaacccgggaagcggagcttgcagtgagccgagatagcgccactgcagtctggcctgggcaaaagagcgagactccatctcaaaaaaaaaaaaaaaaaaaacaaacggaaaagttttagagcaggaatgaaagaaagtagagttggaaaagggccaagcgggagacttgagagatcaagtaccctgttggatcttttgacttggggttttatacattggccttcttctagggtcttgcatacttctcacctggttcttcccttgaggtgggctgtccgcatgtgcagtgggtggccggcacttgggaaggaccgtatgtgcactgtgttttctggagttgcacacatgctcatttgagtgttcctagaggaaggtcatatatcagttacactctgccattttgcctcttagtgtgcaggcttgagcccgcttctgcaactcctgagttcagatcaagaagctgccgatcaccagctacaggtgtttctttattaggagccagctgtgactaattattattttagaaagacagttaacaactacctgactgtcacctgatggtggcctgacatccttggtgggcggtgagttggggtctctcttgctctgctcatgtctgactacctactgtaacgatagtatttttttttaatgatgtagaaaaattgcactgagcagttgtcatttgaaggacaggagtagctcagctctgggaatattcttgtcagagagaagagccggtgctaagttaccaagccaatgtgatacctggtttctcaggaaacaacagggaagtcaatgtgtctgaagtagaacaagacagtaggacaaaagactgagatgaagtctatgagttcccacgatgtaccatcttgatgaatgcattacagaacattataggtgtggggttttattctgaggggagtagagagtcattacagattttggcagaggcaggagatggtctgactaataatagaaggattactctagctgctacttgaagaatggtttgtaggaagggtagaagcaaggaagccagttagcaaatgattgtattaatccaagtgggagattttggtggcttggatgaggagatggcaagggaggtgggaagaatcggtctgattatggatgtattttgaacatagaggcagcagaatttcctgatagattgcatgtagggtttgcgggggaaaaaagagaattcaaggaggaatttcttttgactgagcaaatggtaagatttgctatcaagaaagataggaaaggctatgagaagtgtttgcttgggagtggagccagcaaaggagaagagcagaagtttttttaaaatgcttattagaaatccaaatagaatggtcagatgagaaattggatatatgaatcctgatttcagaagagagatatgggatggccacatagatttaggagttgttgacagtatttaaatatctgggactggatgagatatgcatgggagaaaaaaggctgaggagtgaagggtgggaagctgcaacttaagaggtcagagagaagaggaggcaacagacaaaaatatgagaagaaggagccaatgagatcagaaaggcaaaaactgaaaactgtagattttagaagacaaatgaagagagcatgaaggaaaaggtgggcatcaactgtgtttaatactgtcaacttgcaagaagatgaaaactgagaattaatccttggaggtcattattatctttataagaaaatttccatggaggggggttagggcaaaatctgacttgagaggatttaagtagaaatgaaaggaaaggaattacagtgaggttaggcaacactttctaggtgttttgctgaaaacatgaattgagaaatgaataaggaaatgtaagcacaacataaatattccacaaaataaagtctgtaatggattactatgaagagagagagccttgaccagaagctttttcaacaatggtgattttttagggaggaaatctcatgagagaacccttttaaatttttacccactcttagaaccatcttggcagaaaggaaaggctgtagagagggatctctgtgtttgtttactgcaaatagatttttcacactgaaatagattccacaaactattggcaaaggacaaactaatagcagcagctctgtaagagagggagagttgatgacaccccataaagctaagaatatgtaaatacatatacatattaaaactaaataaagaaggcctggtaccgtggctcctacctgtaattctggcactttgggaggctgaggcgggcagatgacttggggtcagaagtctgataccagtttggtgaacatggtgaaactcgtctctactaaaaacagaaaaattagctgggtgtggtggcgggcacctgtaatcccagctactctggaggttgaggcatgagaattacttgaacccgggaggcgtaggttgcaattagctgagattgcaccactatactccagcctgggtgacagagtgagactccgtctcaaacaaaacaaaacaaaccatgaaaataaaacaacaataacaaaaacaactaaagagcagaaaatgctaaaatcttaggtattagaatgtcctgaaaatgttttatcatgcctgtatgtgtttagcacttcaagagttcagaaaataaaattaaagagccatgctcagatgaacttggttacttttgctctctaagatgagacaaagaggcgtgccagtgaattgcctctgtgctcgttttaaaaatgcagtgttctaggcctaatattcatagattcccatctatcagttttgtgttagagtctaaaaatacatatttttgacaacttcctaggtgattctaatgctgttggtctatgaaccaactggaacaagggtaaatagaagcgaaatggcaacttttcatttcctgttactaatagcattgtttgcaatattggcagaaaaaaaagtactcctttgggcagtatgcttttagagattaacagaagcactgcaccagctgaacaaatttagatcctgacttcagcacagtctggggcatagttaacaaaataattgtgatgcctatactatcacattaatgggccaaaccaataaactggctataattgagtctggaaattctggtggtgagattcaattgaattcagattgaaattatttaaattgcttgagggctaaatagtcttgcatattatattcataattctatgcatagttattatccacaatgaaagctagattatttttccactgtaacataacataagataaaatggaacttgcttagatttgattagcaaaaactcatttttttctctcttggctcttcaaaacatttatactgctaaactgtcatttcccacacattgtaggaattgtgacaattggagaggaaaagaaaatttgtactgtctctgagaatttcttgaggatgtgcgaatctactgaggtgagtgtttttacagcctttaattttgtcagaattttagcattcattttttattatttggataatgtattaaaactaaatctatattgacttttccctttattctatcagaggcaattttacctgaagtagtgttattcaggaggagtagaggataaataggaattagatgctctgcatatttcaataaaaattataataactatttcaaattttctggaaactcattttaatgaaggctgaaaacatgatgaagttgtttttaaagagagcatagccctccttatattgttataatgttactgatgaaaaccatcattattaatcattgtctcatctttataatgaaattatgttataatgatgaagttgaaaggatttaaatgatttgcaggggaaaatatattgtaataatctgttttaatcaggtgggtgatttatcacaggctcgcttttatttaagatgtacaaagtcttgtttataagacagtagcaatcttgacttctcttctacctataactctgacaccttttgattctctgtggtttccattgcagctgaacatgaccttccacttgtttattgtggcacttgctggagctggggcagcagtcattgctatggtaagacctcaaagcgctggtgcttggttttcaatgtgaattccaaagctatttgcttgtagagatgataaactatctctaaagtttgaagttcatgtaaaacacatttatgtcatcagattaaaaaaagtagggaaaacaatgggtaagtaagtcaacaacaagactaaaccccaagaaatattattattaccatattgagaacattaacaaaaatagtaattcattaggattttagatattagattactataaatataaaaattatttctgtagcatatatgtacataccaatgtgacattgtgagtaatctaatcaattccttgatttacttttttttccttagctaagaacattaaaaagccatatagagtcatttatgaaaaacaaattaggttattaaaaaaaacaaatgtcagtagtttcaagtcatgtcttctatatctaatttgcttcagaaatattaagagccagtctttagatcttcttttaagacatcaagcttttacacaatgaggaggatctaccacgtgccagagccagtctcctcctttctaacttggcatgagttccagtatgcccactggaatgccaaatatcaaccctgagcaagtgctctgagtgtcagtaatagcttttgcagccaatatcttcagtctttgtttgtatccttgaggatgagtagtctagagccctagaaggactcccagtaacctcacgactgtgacagccgagtcaatatgtaaagatggtgaatgaattggaatttatttaattattttcctcatggtgccaatatctatctaatgtattggtgaaaggaacactttcataaaaaaatgtttttctcttgtcagagactaaaaataagaatgatgagaaaatactaatgtgctaattagccatgtcagagtggttattttactgatttcataaatattttgtatttaatttgttttattaaaaatgacttacatata

SEQ ID NO: 10246 - DNA, 6000 bp, Homo sapiens
gctcattctgcttaactccaactctcatttacaatttttgtttgtttgtttgttttttgagacggagtcttgctctgtcgcccaggctggagtgcagtggcgccatctcggttcactgaaacctctgcctcccaggttcaagcaattctcctgcctcagcctcccgaggagctgggattacaggcgtgtgccaccatgcctggctaatttttgtttttttagtagagacggggttttaccatgttggccaggctggtctcgaactcctgacctcaaatgatccacctgccttggcctcccgaagtgctgggattacaggcgtgagccaccccacccggcctacaattttcttaagaggaatttacaaccctaggagtcgcacttcaactgtccagtaagcaccaaaggtttttattgccttagtgatgaaagtcataggaaccgtgtacacacattacgcatcattttctctgacgttgttcatatttcaagtacaaataattctcacaattccagaaatatattacttgtgtttagctagcatgaaaaatataaggtactaaagaagcccgttactgcaactttcatgcatcaagtcctccctgttctccccaattctctttgcacccagttcttaatgcttctcttgcctagtttcagcttattatttttattatttttgagacaatctcactctgtcgcccaggctggagtgcagtggcgtgatctcgtctcactgcaacatccacctcccgggttcaagcgattctcctgccttagcctcccaagtagctggtgaccaccaccacgcctggctaatttttgtatttttttagtagagacggggtttcaccatgttggccaggctggtcttgaactcctgacctcagctgatccgcctgcctcatcctcctaaagtgctgggattacaggcgtgagccactgcgcctggcctcccttgcttataacttgccttttctcctaattgctttgaagaaactgaaaatatcagtctgcacctttcagctaaaaacttttccataggtaataaatatatatattcaatatttagaaaaattgatataaatttgaataatgttcttaatttttggtgagaacaatttggccattcatagacagatatatgagaatcaaaataatcaggttttcaaatttacactgcagctcatcctccacgtgctcccttctagagcttcatattattcacatgttgatttttaaactacagttaatttttaatatatattatatctatttgttatatatggtatacttatcacaaaaactttattttatgtgtgcgtgtgtgtgtatatatacacatatacatatagcatcaggagtactggaggttcagtaatgatgttagcagtggtacatccatatgggcctgcagcaacctcacttcttgcctcctcagaaggaagaattcaactgaggggcataaggcagagtaagataccggggcaagtttcagagcaggagtgaaagtctattaaaaagttttagagcaggctgaggcaggagaatggcgtgaacccgggaagcggagcttgcagtgagccgagatagcgccactgcagtctggcctgggcaaaagagcgagactccatctcaaaaaaaaaaaaaaaaaaaacaaacggaaaagttttagagcaggaatgaaagaaagtagagttggaaaagggccaagcgggagacttgagagatcaagtaccctgttggatcttttgacttggggttttatacattggccttcttctagggtcttgcatacttctcacctggttcttcccttgaggtgggctgtccgcatgtgcagtgggtggccggcacttgggaaggaccgtatgtgcactgtgttttctggagttgcacacatgctcatttgagtgttcctagaggaaggtcatatatcagttacactctgccattttgcctcttagtgtgcaggcttgagcccgcttctgcaactcctgagttcagatcaagaagctgccgatcaccagctacaggtgtttctttattaggagccagctgtgactaattattattttagaaagacagttaacaactacctgactgtcacctgatggtggcctgacatccttggtgggcggtgagttggggtctctcttgctctgctcatgtctgactacctactgtaacgatagtatttttttttaatgatgtagaaaaattgcactgagcagttgtcatttgaaggacaggagtagctcagctctgggaatattcttgtcagagagaagagccggtgctaagttaccaagccaatgtgatacctggtttctcaggaaacaacagggaagtcaatgtgtctgaagtagaacaagacagtaggacaaaagactgagatgaagtctatgagttcccacgatgtaccatcttgatgaatgcattacagaacattataggtgtggggttttattctgaggggagtagagagtcattacagattttggcagaggcaggagatggtctgactaataatagaaggattactctagctgctacttgaagaatggtttgtaggaagggtagaagcaaggaagccagttagcaaatgattgtattaatccaagtgggagattttggtggcttggatgaggagatggcaagggaggtgggaagaatcggtctgattatggatgtattttgaacatagaggcagcagaatttcctgatagattgcatgtagggtttgcgggggaaaaaagagaattcaaggaggaatttcttttgactgagcaaatggtaagatttgctatcaagaaagataggaaaggctatgagaagtgtttgcttgggagtggagccagcaaaggagaagagcagaagtttttttaaaatgcttattagaaatccaaatagaatggtcagatgagaaattggatatatgaatcctgatttcagaagagagatatgggatggccacatagatttaggagttgttgacagtatttaaatatctgggactggatgagatatgcatgggagaaaaaaggctgaggagtgaagggtgggaagctgcaacttaagaggtcagagagaagaggaggcaacagacaaaaatatgagaagaaggagccaatgagatcagaaaggcaaaaactgaaaactgtagattttagaagacaaatgaagagagcatgaaggaaaaggtgggcatcaactgtgtttaatactgtcaacttgcaagaagatgaaaactgagaattaatccttggaggtcattattatctttataagaaaatttccatggaggggggttagggcaaaatctgacttgagaggatttaagtagaaatgaaaggaaaggaattacagtgaggttaggcaacactttctaggtgttttgctgaaaacatgaattgagaaatgaataaggaaatgtaagcacaacataaatattccacaaaataaagtctgtaatggattactatgaagagagagagccttgaccagaagctttttcaacaatggtgattttttagggaggaaatctcatgagagaacccttttaaatttttacccactcttagaaccatcttggcagaaaggaaaggctgtagagagggatctctgtgtttgtttactgcaaatagatttttcacactgaaatagattccacaaactattggcaaaggacaaactaatagcagcagctctgtaagagagggagagttgatgacaccccataaagctaagaatatgtaaatacatatacatattaaaactaaataaagaaggcctggtaccgtggctcctacctgtaattctggcactttgggaggctgaggcgggcagatgacttggggtcagaagtctgataccagtttggtgaacatggtgaaactcgtctctactaaaaacagaaaaattagctgggtgtggtggcgggcacctgtaatcccagctactctggaggttgaggcatgagaattacttgaacccgggaggcgtaggttgcaattagctgagattgcaccactatactccagcctgggtgacagagtgagactccgtctcaaacaaaacaaaacaaaccatgaaaataaaacaacaataacaaaaacaactaaagagcagaaaatgctaaaatcttaggtattagaatgtcctgaaaatgttttatcatgcctgtatgtgtttagcacttcaagagttcagaaaataaaattaaagagccatgctcagatgaacttggttacttttgctctctaagatgagacaaagaggcgtgccagtgaattgcctctgtgctcgttttaaaaatgcagtgttctaggcctaatattcatagattcccatctatcagttttgtgttagagtctaaaaatacatatttttgacaacttcctaggtgattctaatgctgttggtctatgaaccaactggaacaagggtaaatagaagcgaaatggcaacttttcatttcctgttactaatagcattgtttgcaatattggcagaaaaaaaagtactcctttgggcagtatgcttttagagattaacagaagcactgcaccagctgaacaaatttagatcctgacttcagcacagtctggggcatagttaacaaaataattgtgatgcctatactatcacattaatgggccaaaccaataaactggctataattgagtctggaaattctggtggtgagattcaattgaattcagattgaaattatttaaattgcttgagggctaaatagtcttgcatattatattcataattctatgcatagttattatccacaatgaaagctagattatttttccactgtaacataacataagataaaatggaacttgcttagatttgattagcaaaaactcatttttttctctcttggctcttcaaaacatttatactgctaaactgtcatttcccacacattgtaggaattgtgacaattggagaggaaaagaaaatttgtactgtctctgagaatttcttgaggatgtgcgaatctactgaggtgagtgtttttacagcctttaattttgtcagaattttagcattcattttttattatttggataatgtattaaaactaaatctatattgacttttccctttattctatcagaggcaattttacctgaagtagtgttattcaggaggagtagaggataaataggaattagatgctctgcatatttcaataaaaattataataactatttcaaattttctggaaactcattttaatgaaggctgaaaacatgatgaagttgtttttaaagagagcatagccctccttatattgttataatgttactgatgaaaaccatcattattaatcattgtctcatctttataatgaaattatgttataatgatgaagttgaaaggatttaaatgatttgcaggggaaaatatattgtaataatctgttttaatcaggtgggtgatttatcacaggctcgcttttatttaagatgtacaaagtcttgtttataagacagtagcaatcttgacttctcttctacctataactctgacaccttttgattctctgtggtttccattgcagctgaacatgaccttccacttgtttattgtggcacttgctggagctggggcagcagtcattgctatggtaagacctcaaagcgctggtgcttggttttcaatgtgaattccaaagctatttgcttgtagagatgataaactatctctaaagtttgaagttcatgtaaaacacatttatgtcatcagattaaaaaaagtagggaaaacaatgggtaagtaagtcaacaacaagactaaaccccaagaaatattattattaccatattgagaacattaacaaaaatagtaattcattaggattttagatattagattactataaatataaaaattatttctgtagcatatatgtacataccaatgtgacattgtgagtaatctaatcaattccttgatttacttttttttccttagcta

SEQ ID NO: 10247 - DNA, 6000 bp, Homo sapiens
gctttcagggacaaaacttgtggagaggaagagagagaacatacaaagagaacaagcgctcaagtgagcagagctacagcagcctcatgactgccatcaatcttaaagcggaaattgctgaggtgcagtaagaggcagagcatgatggggagggaaaatctaggcaaatttcctgcatcactgatgtagattttcactgggtgacttagtttgaggggttaagaattcaatggcagttactgatgctattccaccgtacaatatggagtactctgttcaacagtttacatgcattatctcaactacccctcacagagatctagcatgcaagtactgtcactctccctttttcacagatgaggagccttgggcttaggaggtaaagaaactcgtctgaatttccctactgattagtgtgcagatcaagcacaggtttgatgccaaggccaaagtaaccaagtttaggaactatatatagagagagtgtgaggcgcacacacacacacacacacacacactccttacctattagtacatataatttgggtaaccctgaaaatgagtctgtagaactaatttctgcataggaattatatcatttaggtgaattttaaacatcaatccaaattaaaaagcattttgttctgttgatgaaattcaaccttaaaccatgagaaaaatcaagatcaaatgactcctatagtactactgttgcaatcattggccctcagatgtcttcatggtttggggcgagcagagaagagtgtgactaatacaaggcataggtggagactttccctgtattgccagagactgcctactaacagggacttctgaccccaaagcattgtgccattcatttggcaattcatcatttattttttggatgtttctcttatttttttgaattttacataaaatattatattgtcatctaattttcttttcacctctctataggctggacaatgttctataattttgagtcccctacagtccctagacagtccctcatattatttgactttttttcctttgatgtgaaagagcaatgctcagtgttcttttgaaaattttttttgccattggaattgtcaaagtaaatactgttcttagccttctgtttaaaagttcttagcttttctaaatgcaggcattatctaaattgtaaatgggccttttccaaaagttattttgtatattggtttttggaactctctaaaaataatatacatatcggctatgtttccaaatcaaactacacaagagctattcagcccatcacttatgtgaagtaagatgatcccctaaactaccacaaaaccaaatattcatgtataacacagttgccgtgggaaagcacagatatgcagatgtatgtgtaccgcaccctcacccccaagactacccaccctccctgccgttgtgtgtgcagggagactcttcccttcacttccctaggtttccagttgttgttctggatctaggcactaccagaacagggctgtgtggcaaaggagagttgaattcttgggtcccaaatcaatgacagaggattgatgaaatcagaggtgatggaggtgacagagtcccattatgggggcctccctgggacttccaagtgttgagatgaggtgtgcctgcaagatgtcatttgtttctttttgtccctttccttgttcctttgttgctgctgaaaggaagggaaagcagaggatcagctgtgggagttttttttgtttttgtttttgtttttttttttttggcagggtctcactctgctatccaagctggagtgcagtggcgtgatcacatctcactgcaacctcaatctcctgagctcaagcaattcttctgcctcagcctccttgtagttaaaaaatgtttttttagagagacggagtcccactatgtttcccaggctggtattgaactcctgggctcaagcaatcctcccacctcgggctcccaagctgctgggattataggcttaagccactgcacatgacgaagattcttacagttgtaacaagatggaattgcctcccctctcctttggcatatactagagggtgatgaaaatcctgggagggagctttgactaagtagcgccttaatagaggtagaaggaaaagatttcttcctgtaaatccctgtactcttaattccccccaactccacacacgctgtgatgtgacaggtagaagagggagaaatgcatttcagagattgaactgggaattggaaattctaaacatctgtatgttggtagcagcaaggagaaatgaaagaagagaggaagagaaaatattagcagaggaggggactaacatgtcaagaagagagctatttaagacacacttttcctgtcaaatagaaggcaaaacccaagccaaggccctcaaatcataattacataaatgcccttatattttctaagaaaagtatgttttaaaacttaaatgatgaaatccggacgtggaattttctgtgggtaactccactttgtgtatgtcaattttatagtctgttaaatgttaagtggcctcagagtacagggaagtggaggagaggccagactgcctgaggccatgctcctctctggagctcagatctaacagtcttctgttttattcacttctctctcattattttcctgtctgcaaggtatgtagatgcatggaaattgggtctgcttctggacccccaggaagcatggaagcaatgattgtaggggtcaatgtgggaaggggagggagcagggtccaagcagcctccccacagtcctaaaatgagccttccctgggccatcaggtgtgtagcctaaggtggaaaagctagtcagaaagaaaaagggctgacccctgatagaactgtcacctattatttcaaaaatctgtgattgatgagctctgccaaccctcactaaaatgaacaaatagactactccagatatatattttatctttcattgtcttccacaagtatagatttaactatgcttttggagccagaaaagtattagtaaaaaaataatgggtaaaaacaactggaatgaaaacaacttgaataaagatttgacaaatacatccctggactcttaacatcatttcttttacccaattctctctaaagtaaaatcaaatatttcattaataggagtgaaacaaaaaacaataaaacgacccacaaaattaaagatggattttttttttttttcttgagacaacgtctccctctgtcgcccaggctggagtgcagtggcacgatctcggctcactgcaacctctgctcccaggttcaagcgattttcctggctcagcctcccaagtagctggaattacaggcgtgcgccaacactcccccggctttttgtatttttagtaaaggcgggtttcatcatgttggcgacgctgttctcgaactcctggcctcatgtgatccgcctgcctgggcgtcccaaactgctgggattacaggtgtgagccacctcgcccggctaaagatggcttatttaaagctagtagtgaattaattcagttcctaattgaaacctaggttttaacaataaacatttgaattttgttcaagttttcttcagggtacattatattatgagacagcattgctttttcacaacgaaacgtgaccatgccagaaaataaaatgttgccttctttacgggcttccttctccttgtcaaactttggtagcatagtcagaaacaactgaaaggcaaaatactaaaacatacagctccagtaactttttttttttaagattctaagccaacagttttttggagcctgcgggaggggggcgaggagtgttgaaagggccctactaagctgaggtcgagccaacagtgaagcttcaaaattgtcagcaggcagagtctctggagaggcaaatgaataggcttaacagaagtcccttgccctgcaaaaaacgaggcaggtgctaggggggtggactttttggataggatggaaaccgggacggatgaagtcttctctggttagagaggaaatttggtattaagagagcctcactgaatcccaataataaccaaacaactggtgttgtccagggcaccggctggaaagtgggaggcaggaagcagaaaggctcaagctcctttccctgagtcggttcaggattttaatttcagccaatgtttattggggcacggtgttaagcacggtgatatcaagctgaataaaacgtggtcttgtccttgaagagcgtatagttcagtgaaatggctttaacattcctcgtgggttttgataacttttatcctgggagttgtcagggaagagctgcatctaaatccatccatactttggtaaagatttcaaaacagaggaagcaagatacggggcgacgaggttggaggagagatgacggcaggggccggtgccagatttgggagccgccaacgccgggctgtgctggtgctgcatgctggcaaggggcagccaagaccgtgctccgcgcgggcaccctcgggctcggtcccagcagctggcagtgccgtgcgggcggactgcggtgggcctggcaggggccgagcgtaggtccggagcagcttgcgcggccggcgcccgcccccagggggcagagttcccgggctcgtgcctgcgccgctacctggggctcaggcccaaccgctccccgctgcgtccgcgccttctcttttccggtcctctccgccggccggggctcggctgagctccagatttccccacccgcggccgccgccaggggacaggagccgaggcgcggcagggcaccagcggcgggaggcaaggttggggaggcgagggcggtccgcgtgcgggggcgggagggggctgggggattcgagggacgcggcagccccgcccccgccccctcctcttctccgctccaagcccgagaagctggggagcatggaccagaccccgcagcgctggcaccatgacgctcgcccgcttcgtgctagccctgatgttaggggcgctccccgaagtggtcggctttgattctgtcctcaatgattccctccaccacagccaccgccattcgccccctgcgggtccgcactacccctattaccttcccacccagcagcggcccccgaggacgcgtccgccgccgcctctcccgcgcttcccgcgccccccgcgggcgctccctgcccagcgcccgcacgccctccaggccgggcacacgccccggccgcacccctggggctgccccgccggcgagccatgggtcagcgtgacggacttcggcgccccgtgtctgcggtgggcggaggtgccacccttcctggagcggtcgcccccagcgagctgggctcagctgcgaggacagcgccacaacttttgtcggagccccgacggcgcgggcagaccctggtgtttctacggagacgcccgtggcaaggtggactggggctactgcgactgcagacacggttagtggcctcggggcggccgcggaaactccggacgggctcggagccagtgaggcttggggccggcgtacaggtctcttggaaaaagtgacggggtgtgtggggttgtgggcttgcgtttgcgggctgtgatggtgggctgcagctgggttaccagtaaggtatactggtgctgcaaatctaagccagccaggtgtgcttgtgtgaaggttgtcaggggtgacagttctatgcaaggtgctgagctctgggtttctgaatttgctctgtcctctggccactgtgtgtgtgtgtgcgctcgtgtattgggtgacagtgtgctttgggcgtctgttctctagattagcttacgttgagtgggttaccatatttacattaaagaggcataattacttgttctggaaagggaaatgttacattaacgtggcaatcaataaccttccctccattctttagactccgatttttaaaaatgtggtaaaattttgccttaatttagctgttgacctctgttttaaaaagtatggcaaaattat

SEQ ID NO: 10248 - DNA, 6000 bp, Homo sapiens; identical to SEQ ID NO: 2331

SEQ ID NO: 10249 - DNA, 6000 bp, Homo sapiens
gacagaacgagggaaagactcagcagaatgtagcccagagacatcgcgatggagacatgagctcactttctgtctcctcatcaaccaagaaccccataaacaagggcagaatgctccctgcgtccagcactgagaccgagacccaagatgcaccaagagattgagaaactgagatccacagatgcacaaagacccacagacgcacaaagaccctcagacacacaaagcaaaacgcgttctgatgccccgtgtcagacgcgtcctgaaggatgagcgatggtttctgcccgctgagaagtatccatctggagctgagatttaagcccctccactcaacggcagcaggagtctctccccacgctggtgtgacccacatgcagggcacccacacatgtgaggggcgcccgctgcgaggaggtggtgcctgcgccccctccaagctgcacctcaacctgtcccaccctaaagtgagacggactggatcccccaccggccagggctgcttcgcatcacaccggttccccctgctctctgtgccatcgtcccctccatgtggcttcccaaaccacggacacctggcatctccatcagccttggccctgggcacagtgagtgttttccatgcatttgtgggatttttaaaataaacttctgttgccctcgttagattataggccttgtgagaacagggaccaagtcttttatggatgaggggcgggtgtccggagtttcaacatggcacttccagggctacaaggaggtgaatggatgaagagctcctgttgagtggagacagaggagccctgaggcctctttatgaaaaagcaaaaataagcaccatggagcaggtggtggtcgtgccactggtgggagtgggatcatcctgctaggcaccaaccatccccaaccaacagaggaacacaggctctgcctcctgctccgcatctcctcattacacacagaaacgtcctcggctcgaggacaaaagcccatctgtattctgatctgagcaggactgggtgccgccctcacatctggagggagcctgagactacccgacaggagccacaggtaccacacggtgaggacccccttccagacacccccctgcccagctcctgtggaccctcccccaacctttgccaggggggaccgtggtcctctgtggcgtgtcgtctgcacccgtcttcatcgggggcactagcacctgccacacactcaacagcatcacttcccactggaaaaacaatgccacaagattcttcttggcgagaacaaaccagaaaatgggacctgaagaagccgagagcctcgcctgtggtcagacagcagctgagcatgggcagaggacagagcccaggccgagggccgcggccgcccccacccacaaagacccctgtcctgtcctgggtggaattcccacaccagctcaggaggagccccacctcctcacccttccttgtcctcattccagggaaatggtctggaagagcaccagctccccacggagctgactgtttctctgcttgcaaatttcatgagatttctgattctgagctcgaatcttctctccactttcacctcttgccattcctcatgaccggtccatttcaacatcagggccaattgttccttgtacaattgcatcttttccacagtttagtacaagaaactaggattctcttcatgtaaaagctatttgatgacaaacaccttgttctaagtgactgccaggaagtgcttgctaattttaaattctacattatgatgaggcaaagttagtaggagccaagggacagagcactcccatatctcctcagacactcgccaggtgcatctgtggagaagccgcccagtgagtccttgcatctcacaggtgcttctcacaggtgcgtctcacaggtgcacctcacaggtgcatctcacatgtgcatctcacaggtgcatctcacaggtgcgtctcacagctatgtctcacaggtgtgcctcataggtgcgtctcacgtgtgtctcacgtgtgtctcacaggtgcgtctcaggtgcgtctcacgtgtgtctcacaggtgcatctcacaggtgcatgtcacaggtgtgtctcacaggtgcatgtcacaggtgcgtctcacatgtgtgtctcacaggtgcatctcacgtgtttctcacaggtgcgtctcaggtgcatgtcacaggtgtgtctcacaggtgcatgtcacaggtgcgtctcacatgtgtgtctcacaggtgcgtctcacgtgtgtctcacaggtgcgtctcacaggtgtgtctcaggtgcatgtcacaggtgagcctcacaggtgcgtctcacaggtgcgtctcacaggtgtgtctcacaggtgtgtctcacaggtgcatctcacaggtgcatgtcacaggtgcatctcacaggtaagccttacaggtgcgtctcacagctgtgtctcacaggtgtgtctcacaggtgtgcctcacaggtgtgtctttttgactgtgtcaagtccaacccaatcagggtcccccagcatcatcagtaggtatgtagggaagtgagatggggaaaagatagaaccaatagtgtgccatggagcagttacctctgggcccctgcaggtaagggagctgcggtgttcacacacaactcccatggtcatggctcagggttccccagaggctgtggactccttgccgccctgaacctactcacctacaatcacgacgggctcctggggcaggacaaagccacaggtgaggaacgcggtgctgcgggtggaagctgctgtcacagtcgtgttagggtgagtggactatggccgcagactgtgggctcctcccagccaaccctcactcccgctagcgccccaaatcttcagtccagcaccccttccccgtcccacccactctccacactgagccctcccagccaaccctcactcccgctagcaccacaaatcctcagcccagcaccccttccctgtcccacctgctctccacactgagcccagccactccacgctcccttgggcaggtggcaaggcagagcctgaggtcagctgccacccccagccccaccccagggccctcatgcccccagcaaggcctctccagctctgcggtcccactcaagatgcgcttagctcatttcacacgcaggtgagtgtctcagttctgcgggcacggaggcccctgtgggagggaggttggcaggcccctcgctgacggaggggagcaaggggcaaagtgggggtgtccagaagggggttgtgaggaactgggggacgggaaagagcccggagaggaaaaaggaggtggggaggggctgcgtgtgcatagacctcagggtggggcaaccgaggacctgaaggctggtttccggccgccatcctcacatccaggcgcaatgtgagctcatccctgggagttgggaaatgcaaccggcaggctctggaggctgttctgggactgaatgcaaagcaggcgaccctccccccggccccaaacccaagcactgcagcggccccacaacccctccccccacccacatccccactcccccgtccccagtgagaattcactatttttaggaaaaaggggaagcctctcagcagatccttgaaaggaagtgactttgtgactaagtggaggcaggaacatcatggcacaagggcacacgtcgcacacccagctgggcccactgtggacggcgcagatgctgcctcagagcagcctccgagacaggcagctgcagcggtgcagcccagggccctcgcagaagcttccccggggcctggcctcgtgctgagagaactctgcgctcctgagggcacctggctgtcatgcacacgtgctcacacgaacacacacacctacacgtgcgcacactcacactccgtgcacacacgtatgtgcacactcatgcacgcgtgcacacacgtctaccagctgagtgcagtaaaagaaccacatgaaaaccttgcatcctggttaaaagtatggtgacaacatggacagataaactggaaaagatgggaagaaaccttaagcccaggatctggcagcacaaaggtgcctggaaagcgacaatcagcgtttttatattcagggaaatcaggaacactgccacccgcccgccaggccggcgcccatgccagacccagccaaggtgcttctggccacatcacccctgctggcctgcagggagctggcccaggagccgagaggcctatgggagcaggcaaggcttgctgaggtgacagcggagaggagaggtcgggctttgttgccaggcagccccccaacattcaggtcctttttccactgaaagccatgtggcctcagagcggcgtcaccccgaagcttgtcccagccggggcctgacagcaggtaaaggctgactagcaactctgcatccctcagagtgtgggggaaggtggatgtggtcccacctccacatccagggtccccttgctggcctctgggcatttgggtcctggtgtgattacccagccccctctccctgcacaggggtgaactgcatctcctggaggcagggccagtgccccaccacctccccagcacacccgagcccaggtctgggctcccaggagggcctggggccacctgtgggaccaacccaaaccctcaggcagctccaccagcagaaagcgtcatgctgtgtgtgggataacctcctcaggggattagttctcagggcctggtccgctagaagccaaatgcctgtgcccagccacccgtgacgcctgcaacaggcaggagatcccccaacagttactcccagccttcattccacagggtctggttttcctggaaggtgggaagtcccagggtctgaggagagggagcgcaggcccccatttgtaggagtgagtcagctgacccgcccccggggttcctaatctcactaagaaagactttgctgatgacagggtttcctgggagtccatgcgtgcctggagcagcagcgtctccagggacaggcagccaccatgagcctcagtgaggagcaggcccggagctttctggaccagaaccccgattttgcccgccagtactttgggaagaaactgagccctgagaatgtggccgcggcctgcgaggacgggtgcccgccggactgcgacagcctccgggacctctgccaggtggaggagagcacggcgctgctggagctggtgcaggatatgcaggagagcatcaacatggagcgcgtggtcttcaaggtcctgcggcgcctctgcaccctcctgcaggccgaccgctgcagcctcttcatgtaccgccagcgcaacggcgtggccgagctggccaccaggcttttcagcgtgcagccggacagcgtcctggaggactgcctggtgccccccgactccgagatcgtcttcccactggacatcggggtcgtgggccacgtggctcagaccaaaaagatggtgaacgtcgaggacgtggccgaggtgggtctgtgcggagcctcagggaggcggctgtgtgcatctcttgcacctgtcccaggtgtctaagggtcagctcggatcctcaggcctccagggaggcctcttgtcagggcacaggctagttctgtgctgaggagcaagtacctagagccccctcccggcactgtgccctggccgcctgcctctccgactcggcttctggctcaagctgacatcgcatggccactgagttggttagacctgagtctaggagcctcggctgaagcagactcaggctcaaaccggggtgcccctgattctgcatccacatcccatggtggggaccatgtagtccctgtgaggacccctggcttccaggaagactgaccagatgggggcttcagggctctctgggctgggagggaggccctgccttgggatttgggaagaagaggtcacagtcgaaggtggtgcagacgcccacagggagggagagccaggggaaccccaaacttccactgtggcagaagcagctttatcccatgggagccca

SEQ ID NO: 10250 - DNA, 6000 bp, Homo sapiens
gctgggattacaggtgcccaccaccgcggcccggctaatttttgtatttttagtagagatgagtgtcaccatgttggccaggctggtcttgaactcctgacttcagttgaactgcccgcctcagcctcccaaagcactagaattacaggcatgcgccacctcgcctggcctgatcatagtaattttaaattcccagtctgataattcccaacttcgtgtcacatctgagtctggttctgaggcttgctttgcctttttggactgttgctttttcttgccttttagcatgacttataatttttggccaaagcagggactggggcaaatcagccttgagtgtgggatttggggtccatctggccgggagctgggctgtattgaatgaacatttgctgcagctgagggtgacagcagcttccgcgcccttgtttatggtttgtttttgcttctgtattagcttgagctgccataacaaaataccacacaccgagcacctgagacagtgggcattcgtttctgacacttctggaggctgtgaagttccagatgaaggtgctgaccaggttccatttctggcgagggctctctccctggcttgctgtgtcctcgtcccataagggcacgtctcgtaggggccccaggctcgtgacctcacctaaccctaatcatcccccagggccccacctccactcaccatcgcatctcgggtgagggcttcacagatgcatggggggaggggcacgcaatctagtacacagcgggaaccacccagcaacagacctcagttttaaaagtgtggctctggccaggtgtgatggctcatgcctgtaatcccagcactttgggaggctgaggcgcgcagatcacctgaggtcaggagttcgagaccagcctggccaaaatggtgaaaccccatctctagtaaaaaatacaaaaaattagctgggcgtggtggtgcatgcctataaccccagctactcaggaggctgaggcaggaaaattgcttgaacccgggaggcagaggtagcagtgagccaagatcgcgccactgcactttagcctgggcaacaagagcaaaactccatctcgaaaaaaaaaagaaagaaagagccaagagtcaggcgtatttgcccgttctgttgtctggtcaccccagccctaaaccaggcaacaagtgaattaccaacacctaggaaactccttgtttccagcctctcagtctgcaggcatgtggagaccagctcaaggttctaacacgtgaccttgtgtctccatgtgagactttcgattttgcaccagacattgcccagtcctaggaaaagctgtttctgggtcttgccctccgaacggcatttttaggcatcctgacttgcaggaggcacaggcctgcctcacggctctttttgaaaataaaagtttgtgatgagcaaagattggcccccgcagtccgcccaacgcctgcacttcgtctgcctcctccttgagctgtggaaggaaagctggtcactgggattgaagcagcctctgggcgctcccccctccctctgtcccgggccctcacctggacaatcaggaactaccttctgtcccaggcaccctccagctggaggcccctgccattccctttctgaaaagcctctcggacactcccatcagagccaacagaggccgcaggaaagccatgggttaggccctacagagctcaggtttctctctgacctgtcacggcagctgcctgttcggcttagtggagcaattctcaccgcccagctgtctgagctgcagcaaagctgcatgaaaggcctgtgggtgcagggctgcagctctcaccttcaggccggccatgcgtcaggacccggtggctcgctgcaagggcggaggaggtgccccgactcaggtcaggcatgggaggagcgggggagccttctgtctctgcaggtctgactcctgcctcctgtgaggaagcagagccattcagaagtgagaggcggccaggaggggcgggcgtggtctgtccacaccgggcagtggcgggagcctgttgagctggccaacttcggacttagggccccaccatgatgagccagatggagctgtggggagatccacgctggcacagcagtccgtctgccgtagcgaagccccgagcacggccaacagcgacccacagtggggcggggcgggtgatcctgggtgtctgtcgcctttccttttaatacagtgttctagtttataggttacatgatttaattgacataatggccatgattgaattgtcataatggctatgtttaatggctggctctcagaatgcctgaggattcaacaaccagctctgagaagctcaccatgagatgaagccctctgccctgatgccaggacacacactagatttgtcaaggccctgggcccagggggaaacgtctccagaaacaaggctcctggggctggggcttcagtagggccgaggcccgtcctagcgaccaggcctccaagggacgctggggccacctgctgctgctttgaaagtgaaggagcgccattcttggattccccaggcactcgctggggtcccttatgctgaccacagcctgggaagactgttcactggtggacccacaaaggcctgggaagactgttcgctggtggacccacagaggcctgggaagactgttcgctggtggacccacaaaggcctggggttgggaccgcgtaggcctgagcgcttgcctcccaccacagctatggcccagggctcagggtcggggggagactctggccctactccactggctgggcagccagtggggatcccatctgccctggcccctcaggacctcctggcccctccttcccataagtaatgagagggccatgaggctgagcagctccccttccagggccatatgcgtctctgtgccttctgccccccatgtcagtggatccctcatttctgagtacacggggtggccaccgctgtcaccctggtttcaccctggagcattaaacctgaccccagtcaatgcaggagggacacaacctcagcttccatgcagcccagaagcccaggctgctcgaaccatccccggggccttgtggatgcagcaggtgtatcctgtaccggggtgctgggacgctgggcacgggcttggggcaggaggggcccccgctccctgaggaggggacaagtctggaaaactccagggcgggcctccagccacaccttgaaaagggggtaggtcccacccagcactggatgtttggcttaacaagttcccaacattttaaagtcgagacaattcacgtaagaattagggtttctacatctcttgaaaggctgagagctcaacactgctgggtgtccggccccccctgtccccactgcccaggacaggcagaccccaggtgcgaagcctcacagcctgcttcctccacacaggcaacagcctccatcagaggcctcagggctccccttcgatctggagttggaattgagggatgctgcccaggaagatgccagggacacctgcgtgggcagagagggcccaggaaggccccaagcgtggggtcagggcaccgaggggacagagtggagggggtcccccagcccagaaccacccaggcaccaagactcccagcagtcaggacagaaacagctccgacacccacacacagggaggggggccggcagggagggctggcgtctggaggctgcggaggcgagaaggctggttggggaggctgcgtagatgccgtttcagagcaggccagggtcggaggttggaagagccattccggagggcagggggtgttgacgggggcacagaggaatgccctgagcccgagccggcagcgaaaatccacccgccacacgctgaagacgcctgcacttcagtcagttgctgtgtgcaccagcaggcttttaaccggaaaattaaaaatgaaaacaaggaggacggcagaagcctcagggtggggctgctgggctgggaccaccttgaactcagtgcctcccctcactgaggtgccgatgtcaacggcagtggggctgtcacaggcaggacgggctgaggcggcgatgtcaacggcagtggggctgtcacaggcggggcaggggctgaggtggcgatgtcaacagcagtggggccgtcacaggcaggacagggctgaggcgccgatgtcaacagcagtggggccgtcacaggcggggcaggggctgaggcggcgatgtcaacggcagtggggccgtcacaggcggggcaggggctgaggcggcgatgtcaacagcagtggggccgtcacaggcggggcaggggctgacccgtggggtcagactgaatggggagtgggggccccaggggttggtgggtcctcagggggggcctcctggaaaggacttgaggccaggccttgggaggaggagggcctgggatgagggcctggaggcagaggccagagcccgtgcgaaggcgctgagttcggcaggagacagactgagtgtgggagggacgcagagggcgcagagggtggggccgggcctccacctgcggctctgggtgaaccagtcacgcgaggagaatgcacctggcgattccacacatctacagcgagtctcctgagccgcaggcgccggggctgtggagagccgtctccattcagcaggcgccagggctatggggagccgtctccattcagcaggctctggagctatgaagagccgtctccattcagcaggcgccggggctatggggagccgtctccattcagcaggtgccggggctgtggagagtgctagggcggtcgccatctgcacctgctgttttcccaagtcctgttctggacccactaactccagtgactgagctgacttcttcacacgggcatggggccaaagctcctgaccagtgcagggacacggggggtgggacatactcagataggggctgggaaggctgggagcttctgctgagggtggcaccagcagcagctccatgactgtgactgcggccagggcggctccacgacggtgactggggtcagggcaggagagtgtggaggccagtgaggagggtccacacccatcggtgaggcaggagtcagggtaggctgcagacccgggcggagattgcgaggcaggggtcagggtcactggagaaacatggctcaggaaaggcttcagggagaaaaaggtgttggacgagagaggctggtgctcaggggctgcaggggggccgggcctcagcagggagggagggagggactctgggaacagcagagccggcactgaggatgctgccagggaagggcactgacgtgcatggacctggaggatgccactggccaaaagctaggatctcactcacatgtgggatccgaaaaccctgaattcatggaaacagagagtggaaagggggttgcaggaggccggggcaggaagagagatagagaaagcagagacgttggtgaaagggtgcaaagcgttcgttagctggagctgtgggcttcaaggtcagccgcgctgtgtggcggccaccactgccgttaaccacagtacacagggtgctcggtaagtgcagttctgcttccgaggatttatgatgtgggaaaagttttaaattaaaaataagaataagaatgtaaaacaatacagtagaacagccgttttcatggccttgccttgcactgggtgctaagtcatcggagatgatttgaagtcctgggggtgcgtgtgcaacctctgtacaaactctaggccatttcacatccgggacttgaacatcctcggattttgttatcagagcggcgtcctggaaccaatttccctgaggatgccgagggatgactgtattgtataccaaattgctagaaaatagacttgtaatgttctcaccacaaaaaaaacaagttggtgaggtgatggatatgttgattagcttaattgaatctttctgcaacaaatacttacatcagaacatcacgccaaaccccataaaacataaa

SEQ ID NO: 10251 - DNA, 6000 bp, Homo sapiens
gaccagctcaaggttctaacacgtgaccttgtgtctccatgtgagactttcgattttgcaccagacattgcccagtcctaggaaaagctgtttctgggtcttgccctccgaacggcatttttaggcatcctgacttgcaggaggcacaggcctgcctcacggctctttttgaaaataaaagtttgtgatgagcaaagattggcccccgcagtccgcccaacgcctgcacttcgtctgcctcctccttgagctgtggaaggaaagctggtcactgggattgaagcagcctctgggcgctcccccctccctctgtcccgggccctcacctggacaatcaggaactaccttctgtcccaggcaccctccagctggaggcccctgccattccctttctgaaaagcctctcggacactcccatcagagccaacagaggccgcaggaaagccatgggttaggccctacagagctcaggtttctctctgacctgtcacggcagctgcctgttcggcttagtggagcaattctcaccgcccagctgtctgagctgcagcaaagctgcatgaaaggcctgtgggtgcagggctgcagctctcaccttcaggccggccatgcgtcaggacccggtggctcgctgcaagggcggaggaggtgccccgactcaggtcaggcatgggaggagcgggggagccttctgtctctgcaggtctgactcctgcctcctgtgaggaagcagagccattcagaagtgagaggcggccaggaggggcgggcgtggtctgtccacaccgggcagtggcgggagcctgttgagctggccaacttcggacttagggccccaccatgatgagccagatggagctgtggggagatccacgctggcacagcagtccgtctgccgtagcgaagccccgagcacggccaacagcgacccacagtggggcggggcgggtgatcctgggtgtctgtcgcctttccttttaatacagtgttctagtttataggttacatgatttaattgacataatggccatgattgaattgtcataatggctatgtttaatggctggctctcagaatgcctgaggattcaacaaccagctctgagaagctcaccatgagatgaagccctctgccctgatgccaggacacacactagatttgtcaaggccctgggcccagggggaaacgtctccagaaacaaggctcctggggctggggcttcagtagggccgaggcccgtcctagcgaccaggcctccaagggacgctggggccacctgctgctgctttgaaagtgaaggagcgccattcttggattccccaggcactcgctggggtcccttatgctgaccacagcctgggaagactgttcactggtggacccacaaaggcctgggaagactgttcgctggtggacccacagaggcctgggaagactgttcgctggtggacccacaaaggcctggggttgggaccgcgtaggcctgagcgcttgcctcccaccacagctatggcccagggctcagggtcggggggagactctggccctactccactggctgggcagccagtggggatcccatctgccctggcccctcaggacctcctggcccctccttcccataagtaatgagagggccatgaggctgagcagctccccttccagggccatatgcgtctctgtgccttctgccccccatgtcagtggatccctcatttctgagtacacggggtggccaccgctgtcaccctggtttcaccctggagcattaaacctgaccccagtcaatgcaggagggacacaacctcagcttccatgcagcccagaagcccaggctgctcgaaccatccccggggccttgtggatgcagcaggtgtatcctgtaccggggtgctgggacgctgggcacgggcttggggcaggaggggcccccgctccctgaggaggggacaagtctggaaaactccagggcgggcctccagccacaccttgaaaagggggtaggtcccacccagcactggatgtttggcttaacaagttcccaacattttaaagtcgagacaattcacgtaagaattagggtttctacatctcttgaaaggctgagagctcaacactgctgggtgtccggccccccctgtccccactgcccaggacaggcagaccccaggtgcgaagcctcacagcctgcttcctccacacaggcaacagcctccatcagaggcctcagggctccccttcgatctggagttggaattgagggatgctgcccaggaagatgccagggacacctgcgtgggcagagagggcccaggaaggccccaagcgtggggtcagggcaccgaggggacagagtggagggggtcccccagcccagaaccacccaggcaccaagactcccagcagtcaggacagaaacagctccgacacccacacacagggaggggggccggcagggagggctggcgtctggaggctgcggaggcgagaaggctggttggggaggctgcgtagatgccgtttcagagcaggccagggtcggaggttggaagagccattccggagggcagggggtgttgacgggggcacagaggaatgccctgagcccgagccggcagcgaaaatccacccgccacacgctgaagacgcctgcacttcagtcagttgctgtgtgcaccagcaggcttttaaccggaaaattaaaaatgaaaacaaggaggacggcagaagcctcagggtggggctgctgggctgggaccaccttgaactcagtgcctcccctcactgaggtgccgatgtcaacggcagtggggctgtcacaggcaggacgggctgaggcggcgatgtcaacggcagtggggctgtcacaggcggggcaggggctgaggtggcgatgtcaacagcagtggggccgtcacaggcaggacagggctgaggcgccgatgtcaacagcagtggggccgtcacaggcggggcaggggctgaggcggcgatgtcaacggcagtggggccgtcacaggcggggcaggggctgaggcggcgatgtcaacagcagtggggccgtcacaggcggggcaggggctgacccgtggggtcagactgaatggggagtgggggccccaggggttggtgggtcctcagggggggcctcctggaaaggacttgaggccaggccttgggaggaggagggcctgggatgagggcctggaggcagaggccagagcccgtgcgaaggcgctgagttcggcaggagacagactgagtgtgggagggacgcagagggcgcagagggtggggccgggcctccacctgcggctctgggtgaaccagtcacgcgaggagaatgcacctggcgattccacacatctacagcgagtctcctgagccgcaggcgccggggctgtggagagccgtctccattcagcaggcgccagggctatggggagccgtctccattcagcaggctctggagctatgaagagccgtctccattcagcaggcgccggggctatggggagccgtctccattcagcaggtgccggggctgtggagagtgctagggcggtcgccatctgcacctgctgttttcccaagtcctgttctggacccactaactccagtgactgagctgacttcttcacacgggcatggggccaaagctcctgaccagtgcagggacacggggggtgggacatactcagataggggctgggaaggctgggagcttctgctgagggtggcaccagcagcagctccatgactgtgactgcggccagggcggctccacgacggtgactggggtcagggcaggagagtgtggaggccagtgaggagggtccacacccatcggtgaggcaggagtcagggtaggctgcagacccgggcggagattgcgaggcaggggtcagggtcactggagaaacatggctcaggaaaggcttcagggagaaaaaggtgttggacgagagaggctggtgctcaggggctgcaggggggccgggcctcagcagggagggagggagggactctgggaacagcagagccggcactgaggatgctgccagggaagggcactgacgtgcatggacctggaggatgccactggccaaaagctaggatctcactcacatgtgggatccgaaaaccctgaattcatggaaacagagagtggaaagggggttgcaggaggccggggcaggaagagagatagagaaagcagagacgttggtgaaagggtgcaaagcgttcgttagctggagctgtgggcttcaaggtcagccgcgctgtgtggcggccaccactgccgttaaccacagtacacagggtgctcggtaagtgcagttctgcttccgaggatttatgatgtgggaaaagttttaaattaaaaataagaataagaatgtaaaacaatacagtagaacagccgttttcatggccttgccttgcactgggtgctaagtcatcggagatgatttgaagtcctgggggtgcgtgtgcaacctctgtacaaactctaggccatttcacatccgggacttgaacatcctcggattttgttatcagagcggcgtcctggaaccaatttccctgaggatgccgagggatgactgtattgtataccaaattgctagaaaatagacttgtaatgttctcaccacaaaaaaaacaagttggtgaggtgatggatatgttgattagcttaattgaatctttctgcaacaaatacttacatcagaacatcacgccaaaccccataaaacataaaccccatcaatacacacaattattcaactgaagataaactaaaatcagtaaaatcaatgtactgggaaataaagctacgaacatctcactgcccttggcaacaggagagcctggtcctgttcccaccatgagctgagtgccagggggtggaacttcagagggcctggcagggagagagctgggctaggacaccgcagcggaggagagggagctggcaccatgcggtagaagacccagcggccgccgcgagtgtgaggaggcagggcctggtggggcctgggtctgggccttgaccaaggaggcagagaaaggtggcccaaggagggccctggggtgagtctgagcctggtggcagcgctgacccagcaaccaggggcctgtgcagcgggatgtcctgagtggggtctggccaggacctcgtggagtgcgtcagcaatgcttcactctcagacgcttggcggaggccacaggcggcctgacgtgcggaaaccacggcccgatgttctcaaagccctgctcgccgcaggtggttctggagcagccgggcggaggaagggctggtcggatgtttgcctgtcaagctcaaagcgacagattccactttccactcgtccactcctgagtgatcagggacacgaccgcagcctcgaggcctcaccgccagccagctcccgggccccacaagctcagatgaaacctggccacggagccaccaatcagggtctgtgccaggctccacggctgggcaggtggtcagatcagggagcgcacctgtgtcaggcttgagttaaacccctgctgctgtggtcagaccggcgtgagggtgggagtggccacaggcccacaggtgtgcccctccctccaggtgctgctgtggtcggccaacaaggtgtttgaggagctgacggacatcgagaggcagttccacaaggccttctacacggtgcgggcctacctcaactgcgagcggtactccgtgggcctcctggacatgaccaaggagaaggtgaggcttccgtggctcagggaccccctgcctggcccgacccaggtcccgcagtgaccgccccaccctcacctcttctctgcccaggaattttttgacgtgtggtctgtgctgatgggagagtcccagccgtactcgggcccacgcacgcctgatggccgggtgagtcttaggggaggggcccagggcctgtccacacgcctctgtttccctgactccaactccagggc

SEQ ID NO: 10252 - DNA, 6000 bp, Homo sapiens
taatgtatcattggctcaattgtaaaaatgtaccacactaataccagatgttaacaacagggaaaactcgaggaggggttactggagagagggtacatgggaactctgtatgctcattttttcttttgaaaaccaaaaagtcaaaaggaaaggattacaaaagggatcaatgaaatttcagtgagtggaggatgtgttcattatcttaactgtgctgtagttacttgaatgtatctgtatgtcaaatcttattaaattgtacactttatgtgcggtttattgtatgtcatttatactttaataaatttgtttaaaaaaaaccaaaaagtgctctaaaagtctattaattacaaaataaattacattctaagatctccccaccaaactcagtgaatccatccacaggctggagcagaggagtttttaatctgtttagatgattcttatgcatgttaaagtttaagaacaatcaagaagcaattgaaagctctagtgttttaatcagatgaacgtgagttcaaatcgcagctgcacctcttcacagctggctgtccttgggctacttaacctctctgagtctcagtctcattttaaaatcagggtaagaataagtatatatgatgatttttcttagaattaattcatacaatgacatagagtttttaacacagtgcataggtgcatagtgtaagtgctcagcaattatgaaataatagaagttttactgttactgcctgagttctggtgagccagggagaattgtgccaaaatgtaaggggctttcagagaagacaaagcagtaaaggtaataagcaataaaaaatcaggaaataataaaagtaatcctggatgcttctacaacattccatggtttatatatagctttcactttcattccctgacttgatcctgacaatgaccttgtgaagcagaaattcccctttttacagaagaggaactgaagcttagacatgatcagtgactttccggaggacacagaactaggaaatgtcagagtctagagcatcgaaattctagtgcagggtgacagtacactgtagtaattaaatatgggggctcttgagtcagacggttgggttcaaagcccagatatactgattactattataaaactggcaaaccagttcccttctctgaggcttaatttcttcactagttaagtagagataataacagtgcttatctcccagtgctttgtaaagattaaatgaaataatgttcataaagtctgagattcatggctggcacatggtgagtttcctatttctgcactcaattttgaatatggttccttgagggaaaaatacacatccgtgctatacagaaagtaatctagggttagtcagagaaggtggcaatctttgtgcatgtgtcttgaggttgggaagacgggctagggttgctacagcctcggaggagtaataagaagctggcacagcatgctgtggcctatgaagctcttctctttaactagttgaagtacttaaagagccaataaggagatggtacaagcaagacagagaaatcctggactttcggtcccaaatatcaaaaatggcggtaaatgtggcagtaaaaagataattattctgtgatgtttggcaatgactaagaatccgagtaaaaaggtctggacttgggatttgtagtagctaaactcccatacaaatattttggaaatatattaatatattaatattatatattgattatattatataatacaatatttatatgttaatatattacaaacttcttcagcacagtgtctactttacacgattttgttgccttctttataattagttaaggggtaaacgtttagtagggccaccatgggcagatattctttggataagatttgaaagatagtttggtccaacaaaatgttctgcatattttggagatgagaaaggggttgtgtattacttcccacactgtgagggaaggttgcttagacctgttgtagaatatagtggtgccatttcttctttgagttcaccatgacaaaatatgatgatgataatggtgataactattacgatggcagctcttactgactctatgtgccaggggccatcctaaacactttacatatgctgcctcatataatctttcccaatagttaagtagacactattcttttctttactttttttttttgagacagagtcttgctctgttacccaggctggagtgcaatggcatgatctcggcttactgcaacctccgcctcccaggttcaagtgattctcctgcctcagcctcttgagtagctgggattacaggcatgcatcaccacacctggctaatttttgtattattagtagagttggggtttcaccatgttggccaggctggtctcgaactcctgacctcaggtgatccgctcacctcggcctcccaaagtgctgggattacaggcatgagccaccttgcccggctgacactattattttcttcattttagagtgagaaaactgagggaggttattagtcctcaaacatacagcttgttcacagttggaactggaattccaacccaggctgcagaatccaaaccagcatgctcaggtagctttagaagtcatcatatagaagacaaaatttggagttggacaagtattagtgattcaaagttgtgggtggtttctggaaagagtgttagctacagaaaaagagaaagaagtagttggtcagtaagttggaagtttgctaggagaagtctgcagaagagggagaaggtggcacgcgacagaatcgaatgattgaatctgatagaatgggcagcgagaagacttgttatgaggaagctggcaagtgggaagaatgcattggctgtaaaagtatgcagacaaaattcaataaacatttacactgcacatgatcccatcctctctgactctctctcctgttaccctttccttctctcaatgtacttcagccctgtcaacctcctggctgccctgcaaacatgctattcttatgttagctcttgctcttctctctgcttggaagttctttttcccttgagatgcccatggctagctcctcgctttcatcaggattccaattaaatgttgcctctttcataaagcccttatggaccccctatataaaagtgatctccctagcagatcacttctgattccttgatttattgtcagtctctctgccttctagatagtcagccaataactgagggtctttgttgtattcactgtggtatcccagtgcctataattgtgtcttgtacacagtagttactagatgtttgctgaataatgaaaaaacaaatgtttagtgaagaccaactatgtgcaaggaacttttctaattgctttgtcaatataacattgttctcaacttcaagaatcagggttgcctgtctttatacagtgattgctacatgccagtcacggctctaagccctttgcatctattgattttcttaaatcctcacaacaaaacaataatgtaggtaccagttatagctgatatttgtaccaggccacaggattatgaagtagtggaactaggatttgaacccagacaatggggtgtcagcatctgtctccttaacaatgaactaaaagagtaaaaggctctcaagaaatatacaaatacatgctacaagggctcaaaggactaagtaaatcgctcgtgcgtttgggggtggggagaagggcaataaggtgtcaattgagacctacttggagaaagggggaagatttcacttggtgacagtgtgtataaataatccagcagccatagggaaggcaaatagtttcacaaacacttagaaatggcttccacccaagtcatggccaactgaccttgcagctgagagtgagagggaattttaattcagtttgcctggagaacgggtcaacttgacctttcttctgaaaagagaggcttcatgcacttgactcttggggacacagaaatctgcattttaattttgacttctcaaacagtaaccatggccacaagtggtctattggtttctctttaccttcccaactattcccggccttactgtgctttagaagggcaaatgaccttgcgggtggtgagcgatacctcctggttgacctgcctgggagatctcaaatgaaaccccccacatggatgcttctccaaaatgccaccagtctatgccaccccctctctccaaggtggtattctgcacctcggccctgcgatgttcacctggagtctagagccagtgtttccccacacttagccgagtcgcatgaccggttctagcttcaatgggggaaagtttcccgtctaggagttctggcgctctgcccggctccggagaagggcatctccttgcgcttcctctctggtgtccttcgaactcagcctaactttgtgcagcagtatttccagtctagctgtccaagttggagcccctgggggacgcagcggcgcgttgagaaggcgcggcgccttcgagcccctccccagagcaggcgctgctcgcagtgacaaggggtcctagaggcgcccgctgagagccgctggcaactcccgggggtgtcctgcccagcccgaagtcacctcgggtctctttcgggtccatctactctgtcgccagaggcaccgtgccacccgcggcgctttcctctccccgcaccccgccccccgcatccccagtccggtgacttggcagcaggtggcaggggcggcgctcacgagggcgaggggctggggtccccgcactcgagccgcccgtgcagcccgcccgcttccagccgccggcgcgaagctgccggcgcctcggcctcccccgccaccccgcgcgcccccgccgccaagggccgcgcagcgcccccggcgccccccgccggcctccgcccgcacctgcagcccgctccgcgcgccctgcccgcagccgccgccgaagctctcgctcccagcgccacggacgcccccgggccgagcggcggtgcgctcccgtgcagacccgtggacagacgcccctggccggtggactctcgagtctcgcttctgcaccctgcgtccctagacatgaatgtgaggagggtggaaagcatttcggctcagctggaggaggccagctctacaggcggtaggatgcaataagcttgcgagcgggcgcccgcttccgccctccttccctcgcgagccaagacggctgccccttcccttcctcggctggggacgcttgttgccttcgctgcatgagacacagtcacctggcgggactgggaaggggaggtgggagcggcaggaatggggtgcaaaggagaggggggtgcatgcaagatccaggtcggggaagaaaagatgtttgaagtgtgtttgaaactcgccggtggcagggtcccctgcgatcctgtgcgtacttttgccttctctgaaaatttccgaggttgtttatgcatctgccagatgactccagaccgcacgcttccttcccctaacacctggggattaatgagctgaaatagtattgatcctcgccttccacttttccttcatgcccccacacgtttcttcattacaactgtatttttgtcccctggtaatatactggcggcatcttgcccatgtcagattctaaagcaggagcgtatggcttgttttatggctagcttcagtttagtgtgttcagagaaaatggtcctcagtgacacttgcaaataatttatatacagtacagccttgttaaggtatcgggcactgtgttaggagcttggctttcagagaaacgtgcgttctgcgaaagcagggagaaatgttttgctgtttggtgggatccatagagaaataggagacgatgcccttccacaaagcgtcttgggttgcatcgatttgttattaggtggttttgatgtgtacagagtattttacaggagccggaaagagaatggaagtgattttggggcacatgagagtgataaagggctggacctctccctgattacataagctaaggggtca

SEQ ID NO: 10253 - DNA, 6000 bp, Homo sapiens
ggtgtatatgtgtactctactattagacacgagagcagttacatgtttgtgggcaaaccaagtaaaaagaaaccacggaagatataagaaagagtagagatattaatccgtgatgaaagttcagattcagaaattataatacagaaacaaaaaagctaaaacaacataagttagaagccagagatccattcctgacatcaaggagtaacttctgcactctgtctcagcagcactctggaggccaggtacaggattaaggagattgaacaggttggcaaagaaagagtgcatgccttcagtctttgaaaatatctttgtgctggtcatcacctctgtttcattatagaaaataatctgattatataaactgaaatggcggggtttgttgattttggtcttgacaagcagtgaatcagaaaaataattattccttatggtctcatgggaaggaataagtcaagcatcaaaatctggaatttgtctacttggatctgaacactagagaacactactaaggaacagagatcccctcatagctccaatatatatatatatacatatatatatatcaaaaggttaaagttattcatctgcttatttagtaaattatgtattgaatctatattcattctacaagtatttattgactgcctattaccctctagccattgctttatatgaaagggatgcagagatgatgaaaacaaattaaggccccaccttctcagagctacattctatggagagagatgtactaatcaaatatgcacgtatactattaaacacatgacataataccggatctgataagaagtatcaatccttactatgtaaaattttaaaacagaactgaaagtttaggtagaaatacagacaattcccaaaaatgtaacgtattccatgatacagaaataaagcatttgctttaggaggacagataacagtgtgcacccataacctagaactgctaagaacaatgcctgggaacacatagctaatgctcaaaattattaaccattattatatataggacatctctgttacacagactaggatgcaatgaacaataaaggcttctttgaaaaaaatgacccataaaattattcagaaacaatgaaaagggattaagtagatattgaagagggaagggtctcctagggaatagcctgtgacaagacaaaaatgcatgattttgagggataagtttaggaacctgaaattgatgcattggctgaagtatagagtttcggtcatcagaagaaaagtgtatcaggagaggtagaatacaactcaaaatgtccccttgatctggagaaagcaaacatcaaggcaatgttgaaggtagggtgagcacaacagtgtctcctaattatctcctttcttcctaatagactgtacattttacaaattaactcttctgtaccaggtgctgtactagagactggaatgaataattagatttgaaacttaccatcaattagataacagtattaaaattttgagtaattttaattatccaggcactgtttcaagtgatctccatgtattaattcatttaatcctttaaaaaactctataaactaagcagaattattatcctctttttttatagactaagaaaccaaggcagtaagacttgttcaccattgtatttctaattcctggcctagttcctgacatcacagtttcttaataaatagttttgaatgaattaattaacaatggatagaggaatcatgctgagcccctgctttattaaggtcatggttgcacatatatgatcaggtctctgtctcgctggttattttgtgagatgatggtagaacctttgtcctcaaacttggatgcataaaatatctccagaatttcttgctaaaaattatatttaatggcgaagcccatgaatctgcattttaaagagataccccaaacattttattttaagatgatccctgaacaaattttgggggaaaaaattgttgtgcactgtgttgatagtcattataactgtatataagcctagtggataatgacagtggttcaaaagaaggaggagggaaatggtggcttcgatgacaatataaggaaatcatcagtttcagtagactctggttactattctcttcactcataagtcagggcttctcagccttggtactattgccactttgagctctgcaattctttgctgtgggagggccttcttttgcattttagtacatgtagcagcaacactagcatctatccattcaatactagtagctgcctttacccccagattgtgataactgaaaatatttctagacattgacagaagtcccacggggtaaagttgcctccacttgaaaacgactatcataatggaagacagagagctttcttcacttccttacctatagtaacttctagtattctaacctagaaatctgtaagacacctgatcttatttctccgagtcagtgagtgtgcccctctaagacactactttgtttgatgagtatgatgtaccttatttgctttattcagaaccgatagtatgtatctttccccacattcctcccgactatgcatacaaccggtttatcaaatcaaatgaggcagtctctcagggtcaacatatgggtgatacctaacaccatcatttcttttttccaggttctgcaggattcagatcccctttacatataatagtccataggaaattataattaactatagcagaataggatcagtttcccataaaacacatattataaaaatagaaaatatatatcaaaggaagaaacatagatatagttaaataaaagtacttgaaagaaatgaatgaaacaagttggaaaatatttcagcataaaacttgcaaaaacctggattttggagaatacgggaaattctctccagcttttaaaaatcgtttacaagaataaacaggcaaattcttactacccaaggagatacccttcacctttcctcattaatttcttttaactgttctcagtgtctttcagttacatatgtaaaattaaagagtaaaaccttgttaaaaattattgacagaaggactatcagctactgttgcatgcagtattataaagtatcatattcccatcagtgtttacaaaccttatccaatgttagcaaaatgcaaagggtaatcagacaagtatttttattcacaacatacttctaatgaattaattcctagttctctggctaatcagatcagtgagttagtgtgtgcattcaatgaaacagttaaatagctatccaaagcatattcttaattgaagcagtaaaagaaaaaaaacctcaaatttatattgacatcacattttacgtaaatttattcaccctaaaatctattataattaaatttttttgttttataaactatttgatatgggctaccttgactaacatgctttgtggaagagaaaaatactgcctaattaatgtgtagtgggagaagaaaaacaaggagggtcaatgtgcatttccagaggagactaaaagggtggagaatcaatcaaagagggggagaaacgcctagcactgcaccatttgttatttcgggatagaacaagaatcagtaacctcattacccctatccggtttctttaagtgatttcagtaggtagtgcagcaacagttaccttacggccgtgcgcaaaccctgttacttctggcttgaaccgtttgaggcagacaaatatgctcaggtaactgggtagtaaattgcagttcaaaccagaatctggccaattccaggtagttgtggggtggattaacagctaaagactccaaccccaggaggcttccgtgggaagcaggctcttgggagggcgttttaagacagaagatggctaggcagagaaagcgcctgcttccaccacctccagcgtcttcgcctgtacagttgttccagctgccagaggctttctggttaccatggcaaccgtcgggctctgctaggaactcaaagcagagcctctgaagttaggtaccaaacactgaggcttaacagatgcaaaagcagatggggagtggggcagagaactaggattgcccatctaataggtctacagctcctatggctatgacaacatttataaaatcagacttctgtttttgtgtttgtaagatgagattaagatgagatagttcttgcctggcattattcattagtgtcatctttcggtgcccggcgggagaagaagactgcatatcctctctcactattaaggcggtggaagggggttggggggagcaaacgtggtgaccaggaatgcatggagcctgctcattcattcattcattcattcaattatacattcaacatctcctgagtgctcatttgtgcggggcatcctgccaggtgctggatctgcaaagagaaaggagacaccgccccacccacaaaattaacaaaatgattaacacaaattaacagaatcctcacgaacctggggaaaaccaattaggcactgcctgcttcccacgggtctctcttggaagacagatttagaatccgaacgctggagaggaaagaggcagtcgccccgaaatagagtcagacaagaggaagagcagaaggggagaaaggcagcctctccctagggagggattctgttcaaggccactcaaacgtttctccgccgctgcgagggagaagaggtttgtttttcttttagaaaaagggagcccttttccctactgggctcaatttctagtaggagaaccccgcctccttgggctactgattggctcaactctttttaagataatttatgccaccatcctctcggcctgattggctccctggctcaattctgctgggagtcgcatcctacctgtttgggaggtgcactgcctttccacactctcccttctgtactcagccagctgctgctgaggtgggaggaaaagtcctggctgggagaattgagctagtgcagcacacgtaaaaaagcgattccgatgggtcctttgaaagcttttctcttctccccttttcttctgcggagtcaaagtagaggggtgaggttggtcttcttgttactgaccctgcatttgggaaactggtgagtaaattcaggggtttaaaactattctttgctatctacccctttccccttattcccctttcttttaaaaattattccactttaagtaattaatttgcatttcctaacacatatgtggtatttaccatcgttttattttctgattagatctattcattctcagatagaaggaaagtaacatatttctgaagcatgagattggttcagttgtttttgacttcaagcagagtataaactagtgaactagtgaactaatgaaggttgagttactgggagggagtgagggggagtagaaatgactttgccagtaaatttactgaatgaatgccaccgaagaactttctggatgattctgcattttaaaaacaaagttatttcagaaacttgttgttacacagcatgatatgtatgatgtttttctacctactgctattgcttttcccctttcctcgtttttggtaactttctggaacaaaccagtgttttacatcaagaaatattgtaaatctggctaaaaacaaatctatcagcattaaaaatgtatagtatccaagtaaaaactgaccgtgtatatttaatttgaaccagctttgagtgtttttttttaaaattggctgtccatcagtaattaaaaatgtgtggccacatgaatgtcttggctctgtgtgtgtgtgtgtgtgtgtgtgtgtgtgtgtgtgtgtgtgtttgtgtgtatgggacagagagagagagagagagaaaagtgtcaccgatcacaaatttcaaatttaacagaaacaaaactggactggaatacctttcagtaaaatgtttaagtcattctggtagacatataaaatgctcaggtatcattcttcgattatacgtaggagtagtgggtgacttgagctaaaatacgttgattaagacatagaca

SEQ ID NO: 10254 - DNA, 6000 bp, Homo sapiens
tttattcttgtcattactatgaatatcatttaaaggacatgtctcacaggtaaagctgctgatcatgtagccgcttatacttcattaacaagcatagttttcagtgaggaaatttttggtttgaattaccagagttttatctttgttttagaaaggaattgattaacctaaaaataaattatacctataatttcaagaaaggaaggtaaaataattttcttacaaataattcttatgtgtgtcttgttgtaaattgttttaaaaatctcagaaaccaccaggatatcctgaatgcttgatatattcaatttgcaagttggatgagaatttgtaaaattacttggtaaacagaaagttactaattctatttgaagaaggtaatgtgcatagtttatccaagctaatacacatgatatatttagctctaatgaaatgtgacctagatccgtgaatgtaagagagtagtttcggaattatttgtttgtgaaactagttacttccactttacagctgtttcttctctcagaaccttggggcctaaccctccatctaaatgcaacatatgggaaaaatagagcttgaccaagtcctggttttgaattgataattgtcagctaagaatttgcaccggttttgtctcattttgtctttcagtaatgtggtgaatatgtgagaactgacatatactccaggtccactttgaaattagttaactagttcaatgggaaaaagtagaagataatattaaattgtttgaaaacagaataatctgtgcttccgttcctaatttttcataaatttgtattctcattcaaatgaatgaatcacataggaatgtatgtagttaaagtatacacaaatttattatatgaaatatgtgctgagagtttaaaaagttaaatatagtgagatgctattcttgttgaagtaattatgatattgctctttaaagcatgtaaagatcatcatgatccaattcatgtagtagtaagattaaatgtattttgtagaattgtggtatttaaatgctattcttattaaaatattcttgtctatttttattagttctgatatatatttatctacagatatattagcatatttgtatatatgtatgtatgcatataagtgtacaataaatataggtgtattatatatatacatatgtaatatatatacttctatacacatatcactctatagaaagcttaaagattaatgaagtcccctagggcatataaagtagtagctctctatagcagtaatgctaggctgagctctaaaaatggaagctgtacaaaatatctgttcaagaacatgaacagtttttataacaaatcttaaaattgtacaatattgtgagatgtcagctaataagaaatcagacaaaaccaagatctcccaattcttcagctttcttttattcatggtctttatgtggaaatttccttaaggatttcagcgttggggttggggaatatgtaagaagtgaccacctccacccaccaacctaatttgttgatcagtaattcaaagaggtttgaaacagaaggttttgtgctgcccaagcctggatgggaatggatttactggcaaccaattagttgtcaattcttcctcaggattggttgccttaggacatgctctgaaaggagtgggtaggaagagcttagtcacgacccacacaggctggctcagatctcaggcagttaacctgcactctatcacaaagagcagagaagaaaatctggctgagtttgtcagctgtttgaggaagctggataatcctccaaatttccagagaaatttgtctgggctagtaatacaacaaaatagcagtatagatatggctaaacaccagaaatctgctgcccacaatcagcttttctagttccatttcctttaatgtgctttgaagtttaagttacagctatccaacatttaaaattgtaaaacattttgtgagaactaaaaatcaaggttttataatgaaaacttttaaatttagtttttactgtgggtcattctccagtaaatgcatctctaaatcggtgggatgtagtaacatacacttacagaaaaaaaaccaaaatggtgaaaaacattcaaagcagcttgaactttgtgaagtgtcatataagagggtcatatgtcattgaaattacatatttaataagggtgctaatgggaaaagctaattcctcagaacaaacaattccaattgatataaatgttgaacgaaaaaaattaaaacatttataatttgatattagaatccaggagaagaccttataagtattagaataatatatgaatatatttacaaaaattgtgacattcattaaagaaaaattttgttggagcatagcaattaaggctgggaagaaaccatacactgcttaacttccattatcaaaatatcaacaatttattagtaatataaatggagaggtgatagagattttaatgaagattgactcacagaaatggaaaataggaaaatacagtagcaagtgaactgttcatgccaagtataagatacttaggttctctggttgcaaggttttaaatggcatgctttttatctttgtgaatttcaattagactctgcaatgggcaagtcaggaaaagaatattaatgatggaggagagagctgggtggtgttccattcttcacagagcaagctaaataagagagcaaatgtttgtttaggttgtaacatattaaatgctcatccagaaaatggtgattaatagattaaaaaggacagctggaaatatttacaatgtaaaggttttactctcctcccataatcttcaaagcaaagctaaaatttactgtagattagcagtgcctgttagaaaaactgcaccatctaggaaaaacatctgaatttttggtgcataactaacaaaattgaagtgtttggcacatattgactctgaatgtaaaatgacagaaacgtatcagcatacttatctctctctcttttttcctttaaagtgtctaacgtttataacaacttctggaggagataaacactggctctgctttgccttagtaaaatgtgcataacattctgtcttctgtgcagtacaaaaaggaaaatgtccccccctttttttgttgttcaagttgcacgtttggattctatcgcctcagataaaacagaacagaaatgagacagatcaaacacacaatgctgaaagtgtaagatgggactggaattccaagtccctttgccagcaaaaagccctaaagggggaaaacctcaaacgttgttacctttcctcccactggggaatgagttgcagaggtagtagaaacacagcaggtccgtttttgctcctgggtaatgtaaactttttggagctgttgattgagtttgatcacctgctagggagggcgcctgtgaaaagaggttggaaaaggattgctggaagtgagcgggaggtttcccaaggtgtgtgtgtaatctgcaaatggactttactgactggctcaagggaattctccagctctcagagctttcaggggaaatcggtctttattgcgggagtgtgaaggaatgaatggtatatcaggagggttaaggaatcaaataaacttcctgctgtctgatttcacgcaacatgctttgaacttggtcctgcgtggatgcgttgatgactaagtaaaggcgtgattagtccccttgccctccagcaggagcggaacctctttacctcttagcagccacgtcgctccacagtagggtgatgttgggggacgggcggcagggcgcggccccagggatctagggcatcaccgccacactacattcccggctttacaccaacacccaacagcagctctgtcaggaaccttggggcctctcgggagccccagcaagcggcctcggggagcagcccgaggctgcgcgtgggctccgctcctccggcgaggtgtgggcgaggggagcggcgctccgagcgcacccaggcgcccgacgccgcccgggtctgcgccgctgctagtgccaggcgggcgacggtcagttaccagggatcgagggatcgaggcaggggagtgtgtgtgtgtgggggggggggaggggggggagggggggccctgccttcccgggaacctccttagccctcctacccggcctgactcctcctcctccaggcgcggggctcgtgcccgccaccgccggcgcgcaccgcgcctccgcccgcgtccccccaatttccccccccggccccagctcctgtcatcgttttccccctcctcctcttcctcctcctcctcttcctcctcctccgcccatcaccgccactacgaacgccttcgcctccttctacacctcgcgccgccgccgcggctcctagcgctcctctccggcttccaccagcccatcgctccacgctctcttggctgctgcagtctcggtctctctctctctctctctctctctctctctctctctctctctctctctctctctctctcccaagtttcctatctcgtcaagatcagggcaaaaggaagaaaacaccgaattctgcttgccgtttcaggtagggtcgcacacgttggtcccgatagagacactttcctgtttgtctttgcctcgcgtgcatgcctcatctccccccaccccactttcagaggctccctggaaacggaggaggctcaattcccgcacctccctcctccccagcgcacttaaaaaataatttcgatacttatcaccagaagcatatttgcaactacaataaaatccaggacacctgctcggcagcacgttagcctggctcttttatagtcttcaactttgctcactgtgattaccgctgcctgcctggctggtgtttgctgccggagcctcacgcgccttctcttattgtgatcctcggctccagagcagctgtcaaacgcgtcgtttcgcagcacttgatcggaacccggctgcctctaagacttggtcttgggcaaccgtgggtgggcaggaagggaaattatttattttattttgttaaggggagtgaagaaaagaagacgtgaggaccgcagttcactgtaatgtagagtaattgcaaaagtgggctgcctgcccctagcttttcccgctgtggttgcggaggtggtcttggttgagggggttgtggcgtgaagtacccatctctcctctcctctcctttcctcccctcccctccaacccattccctttccagctgctatgccagtttaaagtccagggtgttattattacgtgtgcgcaaaacagtgtttgctgacgatgaggctgggggacgttcctggcagagagaagtctgattacttggtcatcttgctgttaaagaaagaaagaaagaaaaaaagaaagaaagaaacagaaaggaaaagggtgggggtgggggtccataaaaaagaaatcgtctctcaatcatcaagtcctacacagagtccaggaagtaatctccatagctttaacacgaatccctaactaaaaggatattctttggggttacttggatagtgaaactgaaggcaattttaagtgtattttgtttttcattccatggctttgtaaagagcggcggtgatgaagacaaaattgaacatctacaacatgcagttcctgctttttgttttcttggtgtgggaccctgccaggtgagatatttattgtatttgactattttaattcagggcaaagatgtgtttcttgtaggccattaatgcttttgaaaatcaagggtgttttaaagaattatttctcagaaaagggggtgtatggggaaagtgaactatgaagtaatagactgtaaaaacttcactgcttctcgttcttagtgataagatccaaaagcaaacagaaacactttccatgcagaacattcacagaagaaaagaaaatcctttcaatggcatattcctacaaggaattgaagtgattaattataggcacttataatataacaccaggattcgataaggaagccaagttttccttc

SEQ ID NO: 10255 - DNA, 6000 bp, Homo sapiens
acctcggcctcccaaagtgctgggattacacacgtgagctaccatgcctggctggcctccacctattttaaaacttcagactttcaaacaaaacaaaagctaatattgaataactaatatttctgaatgtaattcaaattaatgtgagatcttggagactattaaatattgatacattgtcttaatgtccaacttgatctcagaaaattataaaaaaataattaataatctaaaatacatactataataggtgactttccaaatttcatgtgtaaagtttattcagataatagtattgtcacaattttgtttttttcaaataattgcactgaaatatctaaatctgcattaactatatggcaaaaaattcttattttgacagcagtattaactggtattatgaaatgtttactcaaatacaatatgttaaattcccccagattaggaaacccttgtacactgttggtgggaatgtaagctggtacagctattgtggaaacgatatggaggttcctcaaaaaactaaacatagcaccatcagatgacctagcaatccctcttctgaacatacacccaaaggaaataaaatcagcatcttgtagagatatctgagctctaatgtttattgcagcattattcataatagtcaagatatggatacaacctatgtgtgtccatcagtggatgaatgaataaagaaactgttatatgtatatgtgtatatgtgtatgtgtgcatatatatgtgtgtgtatatatatacgtgtgtgcatacatatatatacacacacatctatatgtacagctttgtaaaagaagggatactgccatttgcaacaacatggatgaacctggaggacatatagtaagtgaaatagaccagacacagatagcacagaaaaataaatatgaaatgatctcacttatttgtggaatctataaatagtcaagtacatagaaactgagagtagaatggtagttaccaaaggagggatggtaggggggaatttaggagatacagcttgaagcgtacgaagttatagttatgtataagaaagttattattattatatattatataataatatgttatgtataataagatctaatgtacaacatgaggccacagttaataatatttcattgcacactgaacagtaatttgctaagagagtagattttaggtactcgatcctcacacacaaaaaggtaactatgtaaggtggtggatatgttaatttgactgtaaaagtcattttgctatatatttatatcaaaacatcttgttgtatacctcaaatacatacaataagaaatgagtgaagataaaaagtctataactagacaatgatagtaggctggtatacaggtaatatttcagtggaaacactgttttaatacaaatgagaaaaggcattaactaagagactattaaatcaattcttcccacctatgcaaaatacgagggacagagaaatacattaacataaaattgtcaatagcttctaaattcttggaacaggagcatttcaaactgggcctatatctacaagccttcagaatttaaagcagtaattcacatcagtaccctcctcaaatggttacaattggttcaatttttaccagaaagaattaatgaaagaaaagaggaacaggttgaatcctttcagattatttaatttattaccactcaaatattttgcataccaagctctttggacatatgataaattgacaatagatgggaccaagtacctgcaagagacttacaatctacatgacagtctatagaaactggcaatggggaagcttataaaatgggatagagatttttatcacacattaactacaaatattcattcgcctgtttggtcaaatgttctaatatttgagttatcttttatattaaaatgttggtccatactacagttgtccatggcctataagaacttgatgagagataaagtctcacaggaaaatgcacatacttacataaacacaagattttgtgttcatttccagggcatttcataggcactgtgggctttaaagtgtccatcctaagacgttagcagttgggttatctgtattatttgcatcttattatatccaaagtaaactcatttgttaaatttataaaatgtgactggcttaatataatgatatttggggatagtgtacttgggcccaattcaaattctgctaaacctagtaatcagaggcttatatcaacttaaagaaaaaaagaggtataggtatgattttaacaccttcctatttctgcacagctacacagacaataataataattcactgacaatcctgggctatcacaaataggagtttacatgggaaacaatagcatatttatattcataagttaaagtaaattataacttttcagaatgttagatttctaaaaaaaaaaaaaaaacctcaagttagcaggcaatatttttttaaagatttcaggcagtgaaattcaacatatatcttcttgaagtaatacaaaagtggcataaataaaagactgtgaaataaaatgagaagagatataaatgcctttagtattatcttcagctgaacttaaatactataacccaattaacaaaaatataactggaagtagctactctgaaagaatgttcttttaatttgaatataatagtttcacagattttaagtttgaattttaaagatacgatatgtaactgtttccccaaagccattattttggtttcttaattttttgatatgtgtatttttaaaatgaaaattgcaagggaaagtggtttagaaaatacaaatttaggttttagaaagtataggaaaaggcttacaaatgtaaggcggtggcttacatctgtcataccagcactttgggagacagaggcaggaggatcacttgagaccaggagtttgagggtagcctggtgacatcgcagagcccccacatctctacaaaaatataaaaatatattaacagagcatggtgacacatacctgtacttccaactacttagaaggctgaggtagaaggattgcttgagcccaaaaggtagaggctgcagtcactatgatggtaccactgctctccagcctgggcaacagagctaaattctctttttaaaaaggtaggaaagtattaagattagagaaataatataatatgtggagaatctgtggtgactaatgctttcatggcatatttggaggatacactagttcttccgctatttttcccaaacgagagagcttgatagtcatccacatttataagatggatctgagaacaagcaattcattgctttgtttaattgttcattcaataaatatttattgacattctatgtgccatgcactgtaacagcagataaaataaacacagatgagcaaaaattacctagcccaggccctcagagagaccacagtctatgagaaaagaatgatagagatgggattaggatgaagttaacaaattccatgaagaaagcagtacagaatacagagcacggagctctagctactgcccacgatgagcactttgggctttcccttagaaagaaaacttgaatccagacgtttaaaacacacaaaaaaaccaaaacccctgtctaatacaatgcgttccctcttcatacccgtccactagtcatctcaatttgaacaaatcatcagagttccgactagaacctaattggtgtttggttccaaggtatgggaattacttagctcattgatccatcatatgaaaatttccacatgcatcattactaatttgaaagacgcttttcccccttggagccaataattaatgtttccaaagatctattgggaatgcttatctttgctcagtaaaacagtaaagatatggagcttagtgttccctttcatgtcacaagggaactaatatttgtccccctccattttaatttatgtatcctttctctccataccccaccttctgcctctctctctctctctctctctgtctctctctgtctctctctctctctctctcacacacacacacacacacacattttctctttccccccccactctctctccagccgtcctttccccctacctaaagcagtcaacctctggaagtaagtcaactccattctgaaaaagaagagtgtcgcaagaagtgaaagtgattttgaccagaggtcgcttgtctccacctctcccctcctctccagaaaaggatggagcagcaaagcggagggtgtgcgcgtgtctggtggaggcgggtaaagaaatggggtgtctttaaagcaatagcttagcaaatactgggactagagtgcggctcgagtccacttcccaatagtttggcgagagtccgccgggtgagctgcaacccctgttaccaggaagaatctttctgctttcattgctctccctaccgccccccataacacctgaatgggagggtctcaaaggtggtttgagcccggacttgatcccctctcctcaccaccgctaccacccgacgcccagcagtccccgtcacccgccctttctccacctccaaccttgactctgggtacaaacaggtcctcgcacaacctgatgacagaggagcttcattggttagatccaaatcccagcggaagggagggggccaggaggtaggaggacgaacactgctgtgggcggggagcccacttggggtcgggggctgcgaagccggaggaggggcgagagaccccgttcctcatccccggagttacagtcggaacaaacttgccgagtcttgcagcgcaagcgcgcggatacgaaccccagaaccttcagcgcgcgggcacgaaagggtgtggagcggtatacatagctctacatacacattgagcgctgagcgagaaaggagggggcgaggaaggcaggttccgcctcccctggccccgtgcacacacacgcccaccgcggctcgggctggctgagcgcgggcgagtgtgagcgcgagtgtgcgcacgccgcgggagcctctctgccctctcctcgcaccctgctcagggcatctgaagagcctggaaacgtgaacaggcttgaagtatggcatgttgcaaagatggtttctgccaagaaggtacccgcgatcgctctgtccgccggggtcagtttcgccctcctgcgcttcctgtgcctggcggtttggtgagttctctggggtgcgaggaggtgggcaacggaaagtggagaaatggctagctccgggacccctttggccactcgctcctccctgggtggactaggtcttcttatctcagctgtaagagcaggggccgaagccaggcttttctgtgaccgcatagatgcggagagcaccaagggcgcaggatccaagaggcgtgtgggcactgggggtcttgcggcggggcgcgcttttcctgaccatttctgtcttctgcatcccaacccccaacctcctctcctttagcttggggcaagcgactctttccctagaaaacaaacctgtttgcacctgttctctgatggattcttaaaataatctcctccgcccccggttttttttttttcgcttgcagtttaaacgaatccccaggacagaaccaaaaggaggagaaattgtgcacagaaaatttcacccgcatcctggacagtttgctcgatggttatgacaacaggctgcgtcctggatttgggggtatgaacgatttcaaacgcgcaagtgtgtcctgtctgtccctctcttggtcttcctgtctgtctgtctgtgggaatatcattaggtatgcctcacgtgcaaaaataaatctctctctctttctatctctcctctcttggtgagacctatgacaagaagaccgcctccacccgtactttcccatctccctgccccctcagaagctttgcctctcccccacactaattacctcccgggacctgactgctgggtgggggaggttggagaggaagagtcaaaaatgggaactctgggctcagctgcctggacgctcttcgctgagaa

SEQ ID NO: 10256 - DNA, 6000 bp, Homo sapiens
tttatagttgattgatatttaagtaatttacaggtcccacaaacagtacttctaatgttcttatattatgttgaactatatgaaattgatgataactgaacaatttgaaccctatgacaagtagtttcatatgtttcaacctaatatttatcttctatgtacaggtgtaatagtttacatacacacacctttaacatttaaaaatgaagatctactatctataatcatgggcaagttgagtaatggctcttggtttcagtttccgcatctgtaaaatgagggactttgactcaatgattctaaagtttgatcataacctatgtttgttctcagaattacttacaatactggtgcctcataaatgttgctgatggaccagttctaaactcataggcactgatagaggagagatattttaaagaaactgatgccaatatattaagtgacactggccaaagttatgtaactgctaaaaccagggccaagtaacccaattcccagccagcattctatttcagaaaaataaaaacataaagtacaagaaaaagccagttgaaatttattattcatgtttatataaggatgaaatgctttaaataatttgtcaaatatttgcctatagagaataataatataaatttaaataataatttaaattatccagtttattacatggaatagaaatctggttttaagaaagtcaataattgtataaaactacctttttaatcaccgcaagatatttccagttgggggtctcaccatctattctactgtgatagtttggattattattcattcagtattcagccccttacctttcccaatgtgggcaaaggtgcttcacctgatgttgggctggaagtaagttggtggccaatgggaagtcagcagaagtgatatgaagctagatttcaaagatgcttatgtggttgggtttactcatttgcatctctgtaattccctgaggagctgctgtcccttcagcctctgcacccaaatgaagacacatggagcagatctgagctcatcccacatgaaggagccaaacccaggtggacattagcctgaagcagagacatataggtgagccccatctagatcagtcaaccttcagctgacctagaaacctaagcaagaatatgtgatatacctgcctattcatattagcatgggaatgactgaatgaaatctctttatatctgttacaatttattctccaaacgctaaccagtgggaagtaggttatatcactccctggcttaatactccctgtcccctgtcatggtttttcatctcaacttacaacaaaatctcaactcctcactaactttgaactttaaagcttctcatgctctgaaactggctcgtctctgacatcatattgcattactctccctctcacccctctctgaaacactaatcttcttttccttcattcaacaaatatgtatggtgtactacctgttgggcattttctagaatctggagatagaaaaatgaatacaacaatggtcccgctctcttatattccagtgggggcagataggattaacaaacaaataactatacgtatgttaagagtgccatagcaagtagtaaaagcagcatcaaggaatatattttttaaaacaggattaaacaaaagagcctctctgctaagtctaaaagcagaaaccctgaggggttgaagaaactgcagtcagccaggttgcctggggtgacagaaagggagatggtatgagatgtggctaaagagtaggtgggagaaggatcaggtgaaatgaacctttagacaagtaggtctgatcttgtcattcctccttccaaaactccacaagggcttcccttctcattccgaaaaaaatccaaaattcccactatagcctataaggccctgtggaatcctgtctccagctgcctaacctcattccctactattgccttttcttctgttcctttcatagaataagttccttctcaccttaagctttttaaaaagcagctgttcctgagcctgttacagagtgctggctggcatagctagcttcttctgagtgagaggactaagcaactcagagaggcctttcctgccttcccaatctaaaggaacctctcagtcactttccatcatatgttcccaatcaaatagacttcctcatatggcttaattacagctttataacaaccttcatacatatttgcatttgtttcttttaaagataattttggattagagactcttttgaagcatctatagctttaaaagtcaaaaccaatgtggggtgggggatggctcatgcctgtaaacccagcactttgggatgccaaggtaggagtatcacttgaagtcaggagttcaagaccagcctggtcaacacagtgaaacccgtattaaaaatacaaaaattagctgggcatggtggcatgtgcctgtattcccagctacttgagaggctgaggcaggagaattgcttgaacccaggtggaagttgcagtgagctgaaattgcaccactgcatgccatcctgggtgacggagtggcactccgcctcaaaaaaacaaaaaaaagtcaaaaccaaagtatgaaattaactttttcttcatggaagttcaactggaatgttctatcttcagatctcatgactgaccccttgtcatttgggtctcagcttgaatatcactttcgtaaggggctttcattgaatacccaatctaaacatcccaacactcttgatacattactgctattataatgatcttttaaattactttgtttcttgcatagtagctgccatctgaacagtaaggtgcctgagagcaggaacctagtcctagagtctgggaccagactgtcttgcagatccctctatcccagcacctatgccagtgcttggcacatgggactcttgttatttgaatgaacaagtgaaaaattgagtctttgtttactccatgtcaagctctgagtggtgtagttcatatgtaatcccacctgcacctactcttcagaactgtaaactggagggatgacccccaatttatagacaggaaaatgctcaaggaagctaagttacagctcagactgtctgatgccaaagcctaatctcttcccactactaataacgtgcattcagatttctaagtctttctcaccagcttttcacacaattaattaccatggttaatcacaggtattaagcctggagcttaaatgtttcttgttggaactcaatgcataagcaaagcaggaaaaacatccagaagctcaaacaagtgggtgtaattcatataccttccttacttacagatccttgggtaaacaagtgtgggtgtgttagtaactgtcagatttgctgggttagaaattatttagaaaaagggcacacaacctgactctctaggaaataattctagattcagctgccttaaaatttttgttttttaatagtttgtgagttgttcaggcgttattgctctttttcagaaaaaaagactagaaaataattctagatccagcggccttaaaaaattttttttaatagcttgtgaattgttcaggcatttttctcctttttttggtgtcccttctcttccttgctagcatggtttggacgagctcacttgttaaaaaggaataagctggaagagtcaagaggagaggaaactagggaagttgcgagcacctttgcaaaggtgtatatgtatatacatatatatatatatatatgtgtaagggaactatatatatatgtgtatatatatagtagttcttaccatgcctttcactgcctcccttcccctttactgcattatcaggtaaattaaaaagctgctttccccttggtacggcgaaaaccatcatttcaatgtatctacatccttccagtcgctccccctacccccttccctacttttatcggggccttctgtatggagactgcagaaaacccgccagtgttgcgaacacttggcgaagggcaaggagcctcgcccagagatttcacggggctcaggtgagaagcagtaagaagagcctgcaaacgagtgctcccggttccaggtttcctctccagtacggctctcgccttaagcagccagagtgactgcacagcgagtcagacaggctcatgggtttggagaccttttcatttccaaggaagaggagagacgtgggcggcccagacttgcccaacgcccacccccgcggccccgggcgcccaacctctcgcggtgctcgatccccgggagccagcgcagggcgcagcgcagaactcccacgggccccccaggcagacacgccctctgcccaccgggtgacgtcggccgcagactctggaagggagcctgagtcagaggaaacgtccttctcagagggactcgggattcttcccatagcatcctgagtttccccgtcccacacgcagcacgcggtaatttacactggtcggcctcgcgaatcgagtgggagtcccacctgccttattccactcaggttttccagcacagcccgaatcgcctaggcacccataaataagtgttgaacgcctggctggacggccgactgactgaatgaatgaatgagtgaacgactacgtttagagtcggtacagcccccctttccagtctccgcaagtgtccggggaccgcccacccggtctcttcgccacccagctgccaggtccctcggctcagggcagacacaaaccttctcggcagggctctccgggcggcagcctcacctgtgcccccatggccccgggagcgggcttccggaacgcgggcgcttgctcctcacctgggcctctccacacgcacccgcggcgggcggggctgcggggtctgggaatggggcgccctgaccccgcccccggggcagcctccgccaatgggcatggccaggcggggcctcagcgccagccgagccctgctgcccggggcttgttgcgaattctcagggcccccgcaggcctgggagcggcctgtgataactggtgtatctggcaggagtagcagctgccccttggcgcgactgctggagccgcgaactagagaaacacagacacgcctcatagagcaacagcgtctctcggagcgtggagcccgccaaggtaactccgggaattgagtggagtggaggctgcactgaggcccccttctggctcctctctggtcgaaaaggctcccccgctagagagagccctgctgcttttggaagccttcaggtgttagttgctttgcaccgaagctgctgactgctggggttctgcgccgattgccaggctcaagtttattttgggggctgctgagcagactttgcccttctgtgctgttatcagcttctgtcgctgtccgtccacgcccgctatatccatccactctccgttctgtctccagcaggcaactccccctaccctgccccattttctgggtcataggggtatttgaaataaacctttaagggaaaagcaatgccaaaactggaaagacttatttccacgaattattaataactaatgtttatgatatccttgttataccatacatatgcaggcacattatgtattaattaaatctcacagcagtctattaacgctcagtttacagatgagggattagaggcaaagagtgaggttaagtaaccaaaccaaggttggaagacctgatagcaggtatttacaaaacaaggagtgggcagggctggcgggtggctcacccctgtaatcacagcactttgggaggttgaggcgagtggctctcttgagtccacaagttcgagactagcctgggcatcatggtgaaaccctgtctctacaaaaattagccagatgtggtggtgtactcctgtagtctcagctactcaggaggctgaggtgggaggacggatgacttgagcccaggaggtggaggctacagtgagacatgatcgaaccactgcactctagtccaggcaacagagtgagaccctgtctcaagaaaaaaaaaggtgaggggtggggt

SEQ ID NO: 10257 - DNA, 6000 bp, Homo sapiens
ggcaatgagaattggaaggaagcattcagtacaagaaacattccaaagcagaagctttagaactttgtgactgacatgatcaaaacagtgagtcatagatgaccttgaaatttctaaacctgaataatcagcctgagatacaaatgttaggagtgggagctgctttaaggaagaaggtgagttggggcattttagagtaaccaggtgatagaccacagtatatgtgggacctgaggtcaggtgagaggatgggatctaggaagagatttagaaactcaactaaacagatatttattgatatttattttctatggggcactgggtagaactctgtggataatgataaataaaacatgactgtactatctatgaacgtgtacagtagaggcatatatgagagggtatttcttaatactctgggttgtttttttttttttaaataaattcagacacttgagcccgggaggcagaagttgcagcgagccgagatcctcccactacactccagcctgggtgacagagtaagactctgtctcaaataacttaaaacaggtttaaaacacatggaatataggatatttggttttaaatctgtgtgagaaataatttaaaaaaggagaaagactgtgccagaaatgtgaaataagatagtaataacaattgagcagtccccctaagagaggggcaggggagtgagggttatacagtttttatttttagattaaaggacaaaaacttatctgaagagagaggcttcttgatttgcaattctaggttgactttggcactttaatcctcataaaaggtacaaagaatactatggtgaacaatctctttaactctttaattgtttttgaaaagatacaataaccttttaaaaatatcactccttcataaaagcaaggtcttgacattaaacagtcactgctgaaggcatttctgtaggctgcctacttgctgtgctgtggtttaggtaaatagcttcctggagaccaaattttaaatagttaataaagtttagagaaactaaatgaatgtgaggctacttgtcccttagcctgtgctgctcaaacatattatttcaacttcatttttggcaggaccagagtgacaactgcttgaaggcctcatagccaggggtccttgatccaggatgctccattatttttatattggaggttcccagtaattgtaaagaactttcatttaaagggcatatttcagggtccaaccgtgagagattctgatttagttcatctgaatggggcccagaaatctgatttcaacaagcagtccaagtgaccttgaggcaggtggtactcaggtcacacttagagaaaccctgttggaggtcagatgagttgatagcaaagttaggaaaagtgaggagtgttacttgtattttagcttctgaatagagcagagcagagggttccctatggctccaccacaatatttctcagaagagcctttcatctgcttaagtgtttggacaaattctagggtcccacaaagcatgaaaaaaatgttttgccttaaaatgtattgtcagtgtcttcattcaggctgccatgacaaaatatcatagaatgggtggcttaaaaaaaagacacacacagaaatttattttcttccagttctggagactggaagtctgaaatcggtgccagcatgttcggtttctggagaggtaccttgtaggtggccaccttctcaatgtttccttacataggaggtagcagggtgaggggagcaagccctcttgtcctataaaggcactaatcccatcatcagagccccatctttatgatcctatgatttcaaaataatctcccaaaggctctgtctccaaatactatcacattaagggttagggcttcaacatatgaattttgtggggacacaatttggtccatagcagttggatattaccagctatctgtattagtcatgaggagcttaaacatggccctcatagatctgcgggtcagtggtactccaatgcttttaccagaaagaagtccctgcagaatgcactctcgcggtgttgaatgacccattggatgaagatctgagggtaggaaattcctggcaaaataattttagtgttaacattactagagctaaacattctcccccattcacccacattccttccttatttttcatgctagaagagatacattgtcaaggccagctgagattatgtttatgcattgtggatgatgtgaatattgactcgttccatcagttcagattaatgaaatttatcttagtactataaggaaagttaacaaaaagacacttccatttgtgaatttatcataagatgagtgatattaagtcagctcttttattttgaaacaacagtataatttgttctaattgagatatctcacttctcagtgtcagaagtttttaaagacaaaataaaaatgacatgtgacttgttctaaaatcagacatttcagttcaaatatatagtatggaggtatagcttttgaaggaataagaagtattaaggaaaaccgtaaaatactaagaaatacaaaggaaatattgatgaaagaatgatgtcctaatgttctcaacctggtgtcttttgggagaaatagtaagatttttataagtgatttttccctgtagatagcaatcattaaattaaaagcctttccaccaagatgtgacactttaataagagtttattttcccaaaggtaacccctctgagtattgaaattctgacatatatactccacatatatttcctctcatcaatatataatattttatacaacatggaatttctagccatttgaagaatatcagttcatagattaataataaaaatattaacccaatgaagtcagtaccactaatagtcataaaacatacttattactataatatttacaagatttgtttaaaatccttgtcatagagtttggtcttgaaacaaagttctcttctatgcagttcttgtccacctaaaagtcattattataccaacacacacacacacacacacacacacacaccccacacatgtcccccaactcagacttgcacccttcccttgtctcccacacataccacacatacactctactccacactctcccctacacatcataccctactcataacagccaaacacagcacatttatttcacttcagaaagattataatgtaatggtttctaataaatacattttaacatttttgtcaaccaaggaattaaaaataaaatttttaataaataaaaatttaaaacattaattttatgttcaataaagagattcacactgtggttaaaactattcaaaatatgcaaaagggtataagtgaaaagtaaaaagtgaaagtcccccttcctgtatgacttcttagtcccagtccagatataacttcaaaatcttcatgtgttgatttctagaaattgctacaaacacatatgtgtatataaaacaaatatgtttatttaatttttaaaagttgatcacttgacactagttgagccattagaattgggtgccagtcacagcactgtgtccttgcataagtcaacaagcctctctggggacccctttagttgccatacctctatagagtcaggcttgcccggccacatttgccttagtccctatctgggagaagccagtggcttctgtgctcctctctctgtttggggccctcagagctgaaaacagaatggacactggtaggtgcctctgattcctcttgccagggaagcttcccaatttagtcatccaccccaggcacccagggaggccagtgtcctctctagttaattttcaactcctgactccacgaatacagttttttcaatggtaggaggtatttctggaatatatattctagaaataaagcattttcttttctagccgttcacttttaactttgacttatttgcttcaaaagtcagtaatgtggaagctttatctggtactttttggtacaattcatcccaccaaaaatcacagatttttaaaaggaagttatcttgaacattggaagtgggtaaggtaagatacagatttatacaatatttgtgcaacattttaatagccaccaaaatattgtacagattattgaaagattatagatagtcacgatgttaaaagtgtttatttagcattgtttttcagagactctgaatttccgaaaaagctttttattcatgaggaaaatctgagaacttcataaaattcgattttctacctggcgtaaggatgcacaaggaaatgaaattatttacctaacatcacagaaattaagatgtgaactcaaatcactgtacacatcaattgacataactttgataatgcagctaaataaatctcaactaatgtggttgtgttaggatttcagtgcgcattgatctggatgtacaattagtgcccagttgctttactcacaaagtaattctagtgatttttaaaccataatcaaaccttgtcgtttcagttccaagaggcaaatatataatactagtaattaaataattcttattacaaaggcacggttgttttcaataaaatcaatctaggttgatgctcaaattttataattgctaaatcttgtctgcatctttgaaaagataaatcctataacttggggatgggtgaatccccttaagagaaacgcataaggtggagggtgtgggggcaagtggcatgtgcctgtagtcctagctacttgggaggctgaggtggaggattgcttgagcctaagggttcagggctgcacctgtgatcttgccactgcactctagcttgggccacagagaccctgtctctaaaaaagtatttaaataaacaaaaattttaaaataaagagaaaaagatgaaactaagatcctgcaacatgatacttggcctaaatcctgtgcttttgtagggggctgagggtcaatgattttatttagttaaaaggatgcaatgacttggcaggagtgttttggcctcattctttaaaaaattaacttctcttagtcttcaagcctagtacttgaatgtcaagtacctgcaagcctcaatgtccaagacttttaagagcggaaggtacgatgagttccatctttactagggtcacaaggaaggcatgggtatatggaaatttttattattattccatctgaatatcattttctagagaataggagcttttgttctgaagggctgccggcttccttctgggatctagcagccagggttagatcacaggtgtcactttcaggcgagtagttagcaacggtatcgctagcaactgagccgacccctgcagccagaggtttgcagtgggtagtgtgtattccagaaagggccctgacatgtgaaaggaaggaatgtgccctaatattctacagttgttttatcgttgctactgattaggtccatggagggaagcccatccctgagacgcatgacagtgatgcgggagaagggccggcgccaggctgtcaggggcccggccttcatgttcaatgaccgcggcaccagcctcaccgccgaggaggagcgcttcctcgacgccgccgagtacggcaacatcccagtggtgcgcaagatgctggaggagtccaagacgctgaacgtcaactgcgtggactacatgggccagaacgcgctgcagctggctgtgggcaacgagcacctggaggtgaccgagctgctgctcaagaaggagaacctggcgcgcattggcgacgccctgctgctcgccatcagcaagggctacgtgcgcatcgtagaggccatcctcaaccaccctggcttcgcggccagcaagcgtctcactctgagcccctgtgagcaggagctgcaggacgacgacttctacgcttacgacgaggacggcacgcgcttctcgccggacatcacccccatcatcctggcggcgcactgccagaaatacgaagtggtgcacatgctgctgatgaagggtgccaggatcgagcggccgcacgactatttctgc

SEQ ID NO: 10258 - DNA, 6000 bp, Homo sapiens
ttacaaaaagaaaaaggtacatttacaaagtagaaattttgcagacatctccttaatcaagagatcaaaattactgtcaccaaatataggagaacctgagatcacatgcttcctgatatgtacacgcactgtgaaggatacaatatcacctatgcattattcctattgtaggtatttgacctgaacttaatcatgaagaagaaaacaactcttaactgagaggcattttgcaaagcctctgagatggatactttgaaaatagcaatgtaatgataagacaaaaaaataaaaaaattaattaatgtctagggaaattttctggattaagggagactaatagacatgcaaactaaatgtcagctgtgattcttgattgtgttctggattaggaaaattaaacatcataaatttaatttgaggaagaattttgaaaatttgaatatgaattgcatattacataaagtgctgtataaaagttaagttttctaaatgagatcactatattgtatttatgcaggaggatatcctgcttaagagatgggaagttcatacatttaataatgaagatacagcaaatgtgggaaaatgttaaaaatcattgaattaaagtaaagtatatgtgggtattccttgtacaatttttgtaactttgccataagtttgtactttttaaaataaaatgtttgaaaaattacaataattttcatcataatatgcaataaaaaggacaaacttctttttttgaaaaaattttttttgaggctgaatcttgctctgtcacctagtctggagtgcagtggtctgattccagcttactgtaacctctgcctcctgggttcaagtgattctcatgcctcagcctcctgagtagctgggattacaggtgtgcaccacaaggctgagctaatttttgtatttttagtagagataaggtttccccatgttttccaggctggtctcgaactcctcacctcacgtgatctccccactttggcctcccaaagtgctcagattacaagtgtgagctactacgcccagcccagggacggacttactcactcattgagcatcatttttctttgcagttggatagctaaacaaacaaaacaggcaaaaagtccttcctttgtagaacttccattctttctccttatttctgagcttccattgttaaatagatgagggtggggaatgataataagtactggatttgatattttgtagtctctttcctcactacatggaattatttcagatgcatgaatttgtttgctttgaatagatataccgtggctaatttcttccacctagagctctataaaaatattgtaataaaaacactaaccaacaacacttatgcatagtccataacagaaatggccctattagttctgtcttttgtattattacagacccaaagcaagacaccactgaactatttattactttaaaaacattctaagctgtgaggttgctttggtttttccttctgagattaagaataaaatatctatttcagatttttaaaaaagcattccttagattgtctttgtttgcaggccttgtaggcactatcttgtttgtctaaatctaaaaagattaattatatcattattaatggtcatgtatcaccaacagaaaataaaatataaaattttaatttaaagctaaattaaaaagtattagtcaaagattttttatacctttagatatatgccaatttaacagaatcaaaatttgtattaaaacacataagactttttaaaaatagaattaacaggaaatatttgactaacacatatttatgtgtctatataactggtaatgggtcagaaagaatatactcctctagacactgcatattgtttttaatgttgcttaggctctaatttcaaatgcagggtcagataaaagttggttgcattgtttttctatgcatgctttttaatttcatcctttgcatttattaacactaataggtagtttttttttcttgttattgttgatgctacctgttcagaggtattggataataattattcagaactctagattttcactgggttttgttttgtcatgtaattacctaccttatgtgtgtaggtatttgggtggtatgggagagaggaagaaaatttgaaatctatctttttaaatttttttcttatttttttttacaagtccctctcaatgaaaatctacctttgtcaaacacatttgctattcaaaacaactttaatgaccagatgaagtagaaggaaggaaagtgggcacttccatatttgtttttaatgagatatcttagaaagttaaggaacttgaggtcacaaaggagaagcaaggtataactgtgaagaggatactggctttgatttcaattaggggagatgaaggaaaatggaaggagatttcctaactcaacagagaagatggaatttaaatttaccaaaatcagtaataaggtagaagtgagaatgaagtactttcaaagctaaagacagaaggagaaaagtgtttaaaagctaattttaaagtaaaagagagatgaggagttaccagatttgtgtgagaaagagcaaatacatttactgtttttaaatatcatagaagagaggaacaaatttgagtaaataagtttaagaagaagcttgctttccccttattatttgttaatcagcaagatagtggggaaaatgtcttcaggacatgtcagagacctttatggcagcccctcccatcacaggcccagaggcctaggagaaaaaaatggttttgtgggccaggaccagggtccccctgctatgagcagcttaggatcttggtgtcctgtttcccagctgttccagccatggctaaaagggccaaggtacaactcaggccatggcttcagagggtgcaagcccaaagccttggcagcttccatgtgatgttgagcatgtaggtgcacagaagtcaagaatttagatttgggaaccttcacctagatttcagatgatatatggaaacacctggatgttcaggcagaagagtgctacaggggcagggccctcatggagaacctctgctagggcagtgcaggagggaaatgtggggttggagcccccacaaagagtgagaagagggctgtgagaagagggccactgttctccagaccccagaatgttagctccatcaatagcttgcaccatgcacctggaaaagctccagacactcaatgccaacccatgaaagcatccaggaggggggctataccctgcaaagccacagggtttggagctgcccaaggccatgggagcccacctcttgcatcagcatgacctggatgtgagacatggagtcaaaggagatcattttggaactttaaagcttaatgactgccctattggattttagacttgcatgggccccatagcccttttatttgtgccaatttctctcatttggaaatgagtgtatttacctaatacctgtactccgttgtatctaggaagtaactaacttgcttttgattttacacactcatagacagaagggacttgccttgtctcaggtaagtctttggactacaaaattttgagttaatgctgaaatgggttaagacttggggcacttttgggaagacatgattggctttgaacaatgtgaagacatgagatttggcaggggctaggggcagaatgaaatgatttgactgtgtccccacccaaatctcatctttaattatagcttccataattcccatgttctgtgggagggaccctgtgagagttaattgaatcatggaggcgggtctttcccatgctgttctcatgagagtgaaacagtctcaagagatctgatagttttatgaagggaagttcccctacacaaactctcttgcctgcctccatgttagatgtaactttgctcctctttcaccttccaccatgattgcgtggtcttcccagctatgtgaaactgtgagtcaattaaacctctttctaaattacccagtcttgaatatgtctttatcagcagtgtgagaacagaataatacataatttaaccctaaagaagagctctttaatggagaaattcatatatcatgaaatttatcctattcctgaaatctttactgtgataactgaggacctctagccagattccttacttacatcacttggaattagtttgcctccgtataagactagtttgaacttatagtgctgagtttacaagtttccaaatatatgcaaaatatacgtaatcatactgatgattaatggtgagatgcttataaaatggtgagtctaacaagctctattaggtacagatacatgcaatcactgaattctgtcaagagatgatgccctttatgcacaataatgcacattcttccatttattattcaatataataaattctaacaattttccaaaagtgttcatataaaaaataatcagactttatgttttagtaagttgtttgttttcagtaatcatttattcttgagcagatattttttggtgttttattttgtcatgtttattggctattatttctgttagaaacagcttctgttactaagaaagaaacaccgacaagggaagacacctttcccataaaaaaaaatttattccagctgcgttttgatttgaagttgaataaagacaaaggtaaaaagaaaagctaagaagacgttcccgggtgagtcattggagtgtcaactagcctggtcaggggctgctgcttaactacacatatttgataggaagtgtccctttaactgtgagaaaatggtttcctaatgatactttttgcttttcactcatgaaatcactctgggttagcttctcatcagtccataaatgcccatacctggttctgtcaacatttttggttttcagattatgtgctttatgaggcaaaacatagcaacacaaacatttaaattgcttccatgttttacaacctcaactgctgtattttatataaagggcacaaaatgaatactgttattgatgaaaattgggttaccctgaggactcttgcttaactgaaatcacaaatggagcagacagaaaaatcaaaagtatatgctgagaacggtgagtaaagagtgaactcctcagagcagtaatatttttcatttctagaggccagaagtaagaaaagagagattttttttcttcatttgggaaatttgatttccaatgttacttgaacacaatataagtaatataagttttaaaaatgaatagttttacttagaaaaaaagttatttgtatgagggactcaaaaatagttttaaaatattactatatgccagaatctgattttgtttctttgttttgttttatttcttttggtttctatttatcctgggcctgcaggttttattttttaaatgtaacaaagctgatttgatgttcctcaaaatgcttctatgttgatcagcactcaatgcaaggtctagttgtcataatgacactgtatatactccagtcaggagagtaagaagtttctgctttgcaaactagtgggccatttattcaaccaattttaatcttcctgacagtcatacatttacctaaaacaataataaaaaaaactctattaaaacactagaaaatagttggtattactccagaaaggccaaaccaattgtcaaggattagatgtatattaaatgggctgatttttgacaggcaaacttgaaagttaaatgttttggggtaatgcttgcaactagccacactttgcttgtcagtaactagttactacattagtcttccccttctaatagttttgatccctattctaggaatggtacaagttatccagagactgagttgttcttttatcagagtaaattcttcgcatatgtttgcaagtcatgactaaagaatacacaaaagagcatatttaaatatattttgctaattagtaacaataacttttttcttgtttctgatttttctctgggattatgccagttacttgatacatgttcattaatt

SEQ ID NO: 10259 - DNA, 6000 bp, Homo sapiens
gcttctgcacagcaaaggaagcagttagcaaaatgaaaaagtaaattatagaatgagagtaaatatttgcagaccacgtatctgaaaagtggttaatatctaaaatgtataataaactcaaacaactcaatagcaataaaacaacccaaacaaaaaatggacaagggaactgaatagacatttctcaaaagaagacataaaacagccaataagtatatgaaaaatggcttttaccagtcatcaggaaaatacaaattaaaaccacaatgagatatcagctcatatttgttaagttggctattatcaaaaaacaaagggcatgtgttggctaggatgtagagaaaagagaacactttacactgttgatgggaatgtaaattggtaaagccactatggaaaacaagatgaagattactcaaacattaaaactaaaattaccatttgatccagaaatcctacttctgagtgcatatctaaaggaattgaaattagtttgttgaagagatatctgcacttccatgttcactgcaacattattcacagtagtcaagatatggaaacaacctctgtgtccattggtggatgaatggataaagaaatcagttgtgacaccatgactcatggtaatatatatacacgcaggaaagttatttagccttaaaaaaagaagaaaacctgaacatttgtgacatcatgaatggacctgaaggacattatgttaagagaaataagccagtcaacagaaggataaatactatatgatctcacgtatatgtggagtctaaaacagtcaaactcacagaaacagagtaaagggttggttatcagaggataggggaggagtaaactggggaaggattggacaaaaggtctaaagtttcagttatacaagacaaaaaatttttgaatatctcctgcacagcaaagggcctatgattaacaatgctgtattgtatactttaaaatttgttaagaagataaatcttacgttaaatgctcttaccacagaaagaaaaaacaaaacaatcaaaagagtgggagaaaactttgggaggtcatggataggattatagcattgattgtgttgacggtttcaaaggtgtattcttatctccgaacacattaagatgtatacgttaaatatctacagctttttgaacatcgatcatctcttaataaatatttttttaaataaataagcaaaataaattttctgtggattttacaataaattactcatttaaatattctgaaaagttaaaactgtctacaaaatgtacaaaaaataaatacaatttcacatttaaaaaaatgaggctcaggagattaccaacgggatagtattcagagtctcgtgagttataaaagggagtatgaattcaatttgttgcattggaaataaagggctttgggaatagaagtagcatcgtttgatttactttaaaaaacttaatatttacaatggaactttaattagattagcaggagaaacaattaggaagctgttgctgagattcatgtacaaaattgtgtagcctagacaagcaaatgtaaataaattattggatattctccctctattcaaaatagagggtcaccaaatcaactaataacatttcatgattattctagtgttctcagtaggtcaatccttatgcagaaggtaagttcactaggctcatattcagtgacaatatgtaagcctgccatagggctaattattctctactagatttatattaaataagcaactttctgattgattcctaaattaaaactttatttcaaccttagggagtgttaattcaaagatgtcaatattctaattatttcaaaagtaacattacttttggtaagtgtttaaactggcattttgatctgtatatcaacttttgatgagatggttagaatgattcaatgctactgaatccaatcaactctcagtaaactagcactaattctatactacattgacttaaagagtatatggggcttttattaaatagcaaagcatctcaacaatatgtgtaaaatatcccaggttttagatcattggtagtaacaactgaggaaatgtaaaaaagctaactaaataaaagaggcacctttatcattatactgaaattgatctttctgttgcttaggcaatgtacacatattttgaaaaaatagaataaatgtgccttaaaaatagctccatggtagtgaacaaaagaaaactagacaatgaaccaaaagccccagattgaaatttgataccttctgcttactggatatgagggcttgtaaccgtcacttaaccacactggtctacaattgctttctcttgaaaagtaagtattaagcatgatgaagatcgatatcccattaagctccgaagtcccatgtcctatataatgtgaagtagaatccattagtgcaagaaagcaataataaaggccacgaaaggtaaagctgagatgtggccatgtcacaatccagcacagttgtatatgaatgggctgatcatctaatcgtcagccacagaaggttccccctaccccaaaaacacattcactcgcctacccattcaatcagtactattactctgaaaagagtacgatttacaagacagctaccaaaaatatgtagatgcataatattctgtttgaccttatagaaattaaaacaaacaatataaatatccctcaacaaaaatacactagaaaattaaacatcaaacgttaactgaaagaaacagagcaccacaatcactcaattttaaatatacctaattagtctagttcccaatgcactgtaacaacttccttcatttactaatagagaaaatacatattgtgtttccaatgtgataattaatgcacccaacgaatactgagtatctattatatgctaagtgttgtgctaaatagtggccattgtcctcactctagtgaaaaagtcaaacaaataaatgaggaggatgataacaaagagtgacaagtaatttgaagacaataattatggtgttatgaaaaatgagtattacgaggattccagccattctttcatatgaactttatatttaaaaaggattagatccatactaatttcatatccgtactaattttataaagtatatttctatgttttatgttaactacaagttgaaatagttaaaattatcctggcttttaagccattgtgtaatttaattttccagattactctaaagagagttttaatattatctattaatttactgacttaaacatacattgtctccatcaagccagagaataaatctgcaagatcatttaatctaattttctcaataaatatactttaaatatatatatatatataaagatattttttaaagaggataccttttctcaaagtacccagtcagtggttaagcagagcaaggaatccacgtattcttgaaataaagttttgaagttttttaatgcgtacgtttttaaacaattattactgctattcaaagaatcgccaactaaaaagcttttgtgcttagtgagatttcaaaagattcatcgtgaataattaagttgataaaaatggtatgaatcttctccaggtacaaatattcctgggcagaatcaatggtgtcccttatgaaacttctggcagtttatgatttaaatcagaaaaccactatgtgaaaagagacaagtataataaaaacatctagaaataaatccaggaaactctttattgtcactgaatgtaaataaaacttttttactaaagtgtagagagagagatttttcatatgagagggttggaaggtggtgacttatgctttccagttaaacagagaatttcaggaataaccaacgtgtcaagatgaggaatcatttttgacatgtcattagactaagttaagagatgaaagtagggatttcagaataaatatctgaggaagttttggggaaaatctaagattcaaggaatgaacatttgatcatggctgatagtaaataagagccactataaagatcaaagaagttttaatttttaaaaaacttctattactttgaaatacataaacaacacaacacacacacacacacacacacacacacacacacacttttcttttccagtcttccatccaaaacccaaagtaaataaatgtgggaggggaggaaaacagggacagagaaggagagggggaaaagaatagagaaagagaaggacagaaagctgacatgacggagaaaagatggaccttatagtaccatgtgatctagctgttcttctcacttaaacttactgtgaagatgtaaaacgggaaagaccaaaaaaaaaaaaaatggtgggaagccttgcgtctctagcagccatctctttagacttcacaccttcatctttttagaacccttactattacttaaggaaacccaacttaaatccagtcaacaacgcttcctggccagaagctggccaggcttgagaggattctagaagcagctggttcttccgttccacgggcgttcacgcaccacattgtcttctcttccccagccctccgccagggtctgggtttactgctgactcttgtatttcggtgtagagtgtaacagacagtgtcacatccgagaagacctaaagtgtgccttttcccggaagggaatactaaagggtccctcctgcggggttacactacctaatccacaaaaccgctgactttcccaggtggctttttccgcccacctcgctccagtcgccgtttggtttgtttgggttttgttaaagggtgaagcgctaagccccgcctaccgtcgtaagtggcctgtcactccgtcccgctgtgcggtcgtgattggtcgacaggaccgggttgtccggccccacccccgcttccctttgccgcgctccgggtctcgggttttaacccaaggtggagagctggattccggcgggcggcgcttggagcaggtggagaggcgtcctctttccggctgttgctgctcttcttcctccaatcctgggtctcagtcagggaagaacgaacattcttcctttgctgctggagctttagagaactgttgcccagcacctaggcacttcagacatttcatctcactcatttttgtaatttcactgtaaaaatcacctgcacatttataacactgtgactctccacttctgctcaatgctgagaaggggtccgcatactgcggggagctgtctaaggtgctgaagcttcccaagcatcagtctacaccaacaccatgcggggttagattgtacattttcattctgtctttctggttccccatgccttggataagactattttcaggatcgtgaatatctctccgtatcatggcccacgtgagacactttcggacattagtttcgggattttacttctgggaagcagcactgttactcaggtgagttcgcttggatttaacagtcggagaactcattaagcctgtgcattacgttgcaaccacttgttattgatgagaccgggaaatttgcaattctatattgacttgttgaaacaatcaatttaatcgtattgttttctgtctaaattatttagcagtctatctactgagacctactcatttgctttttcattgattagtgcattttagtaactggcatcttgcgttatttgcagctgagaaaaaaaaattattttaaaagcctacgttttccttctcaaattgcttttaaagttcccgttttctaagtgaattatataatttgggtgttactctttttttgaaagttacaaaacatttagtatttagaaacgagacattactttttttaatgcagaaatacagaccatagtcatttactgatgagagaaactccaaatgttgttgctatattcagaggttaagttaaatgaatcaaaataagggccttgcaagtactattttctaatgacctagctcaggtaatacatgaaggcaaaatcataaatagattattagatatgttctatgtcaggaataatcttcttgagtaaag

SEQ ID NO: 10260 - DNA, 6000 bp, Homo sapiens
agagagaagaagcgaggatgatgcgcaggagttggatctgtttgaagttaggttaggaaagttcatttccttcacgatgcccagaagcaccaagagagattgtcccgctgggtttcactcagaagagttttccagtccactacacaccactgacagagccagagtacagtgggacaagagtgagacacaggcacatgcactcacaaaaggagaatcggctccatgcccagtgtgatcaccttcaggtgcccacaccataatgagctccggtccgacgttcctgttggcccagaggtcctccttcctccccttcctgaatcgcttttgttctgatctaacctgcacttccccaggccaatggatttgagtacagctggggaagggagttgctaggatttctagcaatctagaaacaaaactgtgttctgggactctgtacttctcagtgaaactgccagagttctgccctccaggcctgtccttattcatggggaccccagagagactcacttgaacttctgacccattcccctgctgctcaccctgccagcccctggcctggctgtagccacagttcccaccatcacctatatctggaaactctaattcctcatccacgacactatcacggtcaccctgtggaagtgaggaggcttgcccagcctccagacatccaacagggttgcttcctactctttccagttctcttacatttctgattccttattagaaagggttcttccatgcccagagcctccgctggaaggtagtttgagtctcactggctgagctgcagtcggagtcagccctggccctgccatgcgtctgcgcacgtcaagctcttttccctgcaggctttgccccttcttcatctggaacgctgtttcctattgcaattttcatgagcaaagtggatttatggatctgtttatctatgtcaggggtcaacaaactatgccctgccacctattttcgtaaataaagttttattggaacatagccacacattcattttgctataggctgcttgcatagtacaatggcagagaagagtagttggtacagagaccatatggcctgccaagatgaaaatatttactatctagctctttgcagagagtttgccaatctctgcgacggagttagattgtgtaactctcacaaaatggataagaggattaaaaagactactgcagaaataagtaagtaaataaataaatccacggtggactgacaataatattaacatcacaataaaaaaggacaacaagaaaatagtaggactgatattcttccacccacagtacaaattgcttgtcacataaaacaattatcctctaaccaggtctgtcaagaagttgggagagagattgggcgagggagagagatggaagggggagaggaagaggggaggaaaaataaataaattaaataaataaatatataaataaacaaatagtggcattgagctacaaatgacatgcttagcatgtcattttcccctttaatgatcatttatccagcaattttatggtcaagcactatttttagggttccacatgcattaactgattcagtcctcaaaacaaccccaagaggtaggcactatttataattgtccccattttatagatgaagaaactgaggtcgaataatctggctgagcttacacagctagtaagtggtggggttggacttgaatccaagcagttcaactccagggtctgtgctcttaaactctacattatactgcttttgatcaagaatacgaagtggctgggcatggtgactcacctgtaatcccagcactttggaaggctgaggcaggtgaatcacgaggtcaggagttcaagaccagcctggccaagatggtgaaaccccatctctactaaaaatacaaaaaaaaaaaaaaaaaaaaaaaaaaaaaagccgggcgtgatggcaggtgcctgtaataccagctacttgggaggctgaggcacagaattgcttgaacccaggacgtggaggttgcagtgagctgagatcacgccactgcattccagcctgggcaacagagcaagactcaatctcaaaaaaaaaaaaaaaagaagaagaaatagaaaacaaagacagaagtaaaccctaaaatgtttggagagtggtgccatgggcagcccttttggcatgactttgcgtcctaactaccaatcttatcctaaactctggtgcaaggtgaaggaattcatgtagctgtcttttaaaggagctttgagggggtttttttgtttgtttgttttgtttgtttgtttttcaagacacatatctaggataaatccagcaaatttagaaagtagaagtgaaataggtccttggggatggcatcccattgaggtatctcctgccatttcagtgagttgtgaagcattggttagcatgcgtcatggctctgagtgcctaggacagcactcctctgtgaagagcccagcctcctggggaggttgagggtctctggcatggttcttggtggagagtcagcatcctttacccaccttcctgtggggcagatcgaagtcccacctgcccttggctgaaaggaagtgcattcccaagcctcctaaaggcacacttgaccttgatttcctctgagcttcctcaccagatgaactggtgttgtgtaaggagcactgtattgagtcaggacgatgggttatgtccttgcgaaggcttctgacctctctagtcctcagtttctttatctgtaacatgagtgaccttagctagatggtcctcaaagagctctttacaggttagaagtgctctgatcctgtacttaatgaaatggagaaaatattcatgccatattcatttgcagggaaaaaatcctttgcaaaacatgatgtttgactcttgtaatttttgttttaaaaaacacatgtagcagaatgaaggtatttgttcttcccatccccactctgctgctgggcagaggatattttagccatagaattcactaggattctttgtcagacaggactctattctaaggaatgggagcactgccatcatcctcctggaatggagtcagggatgccccccaggacactggaccccaatgggcaaaggttctcagcagcttcaacctaaaagaggcccctgaggggagaagggaccctgaagggaggggagtggtataggaagggaagggacaccattcaaggtaggccctgtgtcaactacaattcaaccctgtgagtgctgtaaggaatccaagacatatgaggtaaagatcctctacacacaaggaagtcaccacccagctggcatcaaaagccatattgatgaaagacaacgagaaggaagagatgcattgttagtgttgcagggagcacagtggattggggcaggtggcctggatcctgtctctggccgatcactgctggagggaagccactctgcatccctgggcctcagtttcctcatatagaagtgaggcattaaactcaatttcaaaattaccttctgcctctgagattctggagcggatggtttgctgaaggaggactgagcgtgggcacccggaattgtgtcatttgatgaatgagtcagactaggggcgtcagaaaaataatgtcttcacaatcaacacaatgggataggcaattaagaaacactttgccgatggcttgagtgtctgttccactcagaggatacattcccgaagagggatggggtgactcatcaggcggctgtaacctgatgaaacagagctatccaatttcctcgctccaattccaggcaaccaaattatcttaatatggttttccaaagcagtttccccaggcaagaggagagacagacatgagtttccagactaagcagcaattgaaaattgacatttttttataggagtaaaattatatcacatatgagaaatgactgaaactttatatgaagtagcattcaaatgcaaagggtgtcatcattagcaatatcaccattggttattattctcatgctgatttggtcagcctttgaaccagtttttctttttttttttcgagctggtaaatcctgggtgacttggtgagtatagaaattctgggtatgcaaagctgatcaaagatgataattactgatatttagaaagtgctttcacatacagttatctcagtagctctagagagagaaaatattattttccccagtctgtagttctggaaggctcagagaggttaggtgacttttacagaataatagagctcgtcagggtttggctggcagtcaaacccaggtggtcaagtccaaatccaactcacagtgttgctgcttcttaagcgagtgattatccgcccatccagcacaccccctcacatatatactcacaaacatttactatgcaagatccatgcccagtgggacagctgcaggagggatcagaagctgaggcagagaaaaaaccaaaatgccaatatattctggagatcatagaaccgtgtctctttccctcttcaaatgctgctaaaagcacgtagagtctttctggacagccgtcccatggctcagtcttttaggcttcccttagtccctggactcaggctgactctgctcatggtgggtgtagaaatctcccattctgcttagatggagtctctggggtgtcaggcatacccctgttgcctgcatctacctccttttctgtctggttgtttctgctgagggtggctagggaccctcaactgagatggccccccacaacagcactgttggacctaacacaccctgggttcccggcttctcagccactggagctgccagtctcaaattaccggaggggagggagggcaggcctggatctcaggatctcggtcctgcatgcaatgcaagcctgagctctcccgccataaggctgcagcggtgtgggctccttgtgcccagatcctttgtattcatagggggaagtggaagaccacgctgcctgactgagactttattatagaggctcaggaaaaagatgaactggtcccattcctgcatctccttttgctggatctactttgctgcttccagactgagaggtgagaggctggtgacacgtaacctatcttgtctcatctggggctattgctttggtgggaggtggggcaggacagggaagacaaaacagatgattcaaccgcatggaagtgttctgtgcttcctactgactctgatcttggtagggcatgccagaaaaacaactcatccatccacccaaagcttgtccctcgccagtgttgggccatcccccattttagacctcagtcttgtgttgtttgtcttgaaatacacacaacactctgaatgttaatccagatccctcttgttgagtagctgcagagacggcagatggaaaatatgctcagaagttgtttaatgacctttttgaagattattctaatgctcttcgtccagtggaagatacagataaagtcctgaatgtgaccctgcagattacgctctctcagattaaggatatggtgagtaacacatggtgctgactctgtggaatgattcttagaggataaacaaccatgctttctgaagagaatgtcttaactgggaatttgagagggaatgatagctccttaagcaagctggtgggagaagagaatgtcgggaaaaggaagctttctacaaaactaattaatttcaagaaacgttacctaatcctggtcattaactgtaacagtcttagataatctaaagaaagatggggttacatactgtatgcagccatttatataaaatgtccaaaagaggtaaatccgtagagacagaaaacggcatagaggttgccggggtctgtggggaggacggggaaaacggccagtgagttcttaatgattacggcgtttctttgcggggggaagaaatgatcttgaattaggcagtggtgatggttgcacaacgttgtgaatatattggaagccggtgcattgttcccttcgaaaatgattaaaatggtgagttttaatgtga

SEQ ID NO: 10261 - DNA, 6000 bp, Homo sapiens
aggatttgcagagtatccttcataagattctacttggatagcatggtcttctgtactcaaatacaaattctttacgtaatttgggcttcttctaaaatataaatcactaataacatatgttaaaccctaaatgcatttaattatacaggagaagttgcaaaagcatttaattatctcagtagaggttaaaatatattttatgctggcaacatttttcataattaataacgtactagaaaagaatgtaaactgtcattagactatttgaatttgaattttgtctctcattttttgtttgaccttggataagttactttctgtgtttaagtgtcttcatctttaaaacagaactaattatatatccctacctcttaagatattatgaacactagatatgtcaagtgtttaaaatagtgctgataaataataagcctattaaaatgttaactatacttattaatgcaatggtaacattttaataaaagtaatggcttagaacatctctttattagtaagatagagcgtacattttgaaacaaaatatcatatttatttggctagaattatacctgaaaggagcaatgaatatccttattatcaccacaatttatcaaacagtaaaaatatcataaataataatttgagaagacattccaaaaagaataaacccagaaaaaattgcaatatgaatttttaaatataatatgaaaattgttacataacaggaagtaaaaataaaaagaggtaaaaatatacttggcttattacatgatacaagttttatcctcaaaggtccatgctataatatataaataagaagagctgaaaaatgcaaagtgaaaaatgcattttcatatagctaaagtatattaaatagctggctattaatataacctgaaacacaagaatttttttttaaagaaaataatatatcactagaggataaattgatatgcaaaaagtgaagtggtgccattcctattaacacaggttaaaatgacttcttaagttaattagaatatttaatgcaatataaaaataacatgagatttttagattgtattaaattaatgctatacttaagctagaaaataaagtatgtaaacataacaaaggatatgtaaatatcttgaaaagcaataatggtgttgctgccttatcaaaattcatacttttctaacaatgagtgattataataaaattatatcatattaggttaaatcagaaaaactgatcaattgaacagaaggcaaatgccaccaatacatgcatccaataacatattatattactattagtattacaaatcatccttaaaataaattgtggcaatttatactgtccccaaagtatatgaaattgtatttttccacagcttccatgatacttaaggttaaaccattttaaactagcaaaccaacaagtgaaaatggtacttcatatctattttaaaaattgtattcatttgattactactgagcttgaaactttacaatatatttattggtcacttaattatttttttaaatattttctattttttaaaaagttttgcaggtacatactaggtgtgtatgtttatggggtacatgagatgttttgatatagatatgttacgtgaaataagcacatcataaagaatgaggtatccatccccttaagcacttatccttgaaattacaaacaatccaaatacactgtttatgttattttaaaatgtacaattaagttactgactacagtcaccctactctgctatcaaatattagagattctttggtgaaatgcttgttacaattgtttgctcattatttattagacatttatttctctcattgattggcataaacattttaaaatataaattgcaaatgtatctcctaattggtcacttcgttatcagttttgatcagctttttgtaaaatatttcaaatatctagaaatatatggagagtagaatgatgaacacccacatatcatgttgtggctaattggaatgaaatttttttgataaaatattgtagattcatttgaaccttaaagtgtggtatccttcttatttttgttctctattctgtgtatgtgtatatatatacatacacacacaaacacacaccccgacacatacatatacaccatatatatgtatatgtgtatatatgtgtatatatatgtatatatggtatatatacatatatatggtgtatatgtgtatatatggtatatataccatatatatatatatggtgtatatgtacataatatatcttttgggttttacacttaaatattttaaaatttatgttatcatggctcattatatcattctgcaccttgctcttgtttcgtttttgctcagtgttttacttctgggatttgtcagtgtagaagcatgtagacattcaactattttgactgttgtattacattgtgtgattatattcctatttatttccaattaataaaaattgttgccagttttgcactactaaaaacaacactgccataaatattcttagactgcatgagtttatcactagggtatattctgagtggtagcaattctgggccaaagagcatgggcatctttgactttactagtatgtccaaagagtggtacaaagtgtttagatcaatttatatgtctactgaaaatatatggagttttaaaagccaatttttaatattcttaagttttgcatatctcatgagtttaaaatagtgtacaattcctttaatttgcaattccttatttagagtggcttttgatcttttcttatttacttctggaagtttttttttctggtaatttctttatacaaaccttctgatggttaaatttgctgaaaacatgttctttctatgtataacttgacttttcagaagaagctttggatttaaagaaggttacattttaacatagttatcgcaataatcttttttatcatttataactttgttcatctttagatctttccttttatcacagtcataaagatattctcctatatagtttaaagttttgaaagttttgttttttgtattaaagttacgtatctacctgtaatatattttcatgtatgtaatgatgtaaagatctacttttttcccttatggataataaattgtcttgcaacatttattgagtagctcatcttttcctacttctcttaaaatagaggagtatttctgtgctctctatttgctcgtactattttgctttttatccctacatgaattccatgccaaagacaaactgattcagtttctatatagcacaataatgtcttgatatctcaaaggcaaatgcccccatattccttctctttttttcttcttcttcttccaggttttcttggcttttatttaccccctcattcttctatttgaattttggaattagtttattcatttccatttagaatgtaggaattttgattcaaattggttatatttcttacattggatagaattgacatccttacaatgttgagtcttcccaattacccatatggtacattttccatttatctaggtcatattttgtgtatttaaataatgttatgtaccttcactctaaacttcttgtgcatatttttcccccagttattcctaggtacattagaattttttgttattattgtaatggaataaatttttctattacgtttttttgtttggtaactcctgtgtagggaaatactaagaatatgcataagtttcttgaccttgagacacttccatcctagttagaagctaatttttaagctgtctcctctttccctcataaaagtaagcagcagactataataggagtagggattacaattcgctttacttacacttgtgtgtgtccctctcccattagatgtgaatttctctaggacaagaaccctttttgaatcagttataagtcccagaatgcccacaacaaaatttaatatatactatttaacaaaagaacaaacacctagtccagggccttctgcctaacatgtgctcaatgacatttgtagaatcgaagttactgaatttgatttaattcaaacaatacttgctcctgcagaatcccaacctactggcgaacagaggttaaactgtctggatgtttcagagttctgctaggggtcacaaataccaccttaaatgctgtcaatttaagaaggagatttttcttatcacaacctggaggataagtggggcttgcagtggatggccctagaaaaaaagattgcctgcccagaactgctgctggatcctttgtttccctcatttcccaacctggatgaaaaacgacaaggggagggaagaaaagtggggtggaagaaaagttggcttgcccctcctactctgcctcctacagaagtctacaccaagccagatgtcctaggatgcctcccaagggcacctaatttttggagttctcaaatacgtcctgagtttcctctgtacctttagtaactctcccgttccctctctctccactcttccctgctcccagtcacccccacccacaacccccgctgatcacatcctcccggtgcccgccacaggcaaccagagaacaacagaccctcctccagagtccccgttctaggacctccctgactgtcaacgaaagatgccaatcacaggcagccttagccagatcactgagcgcccagtaaaaaaaacaaaatcaggttgagggcagaaatgaaatcaacatagcaacctccaatgcatgaaggaaactccgtttacacatgctcgtaggatcccctgcgtggaaacagcagcttgtctctgactacccggaggacatggagcaccccaaataggaactttagagggattgaaatctgttgcctgttccactaggaatattgtttgcaaggcacaaggtgtcttttggtagtgagcgcgctctgcgcatgcgcaggtccattcgggaattactgcccagcagccgactaagttgcattccttgaatcttcgcagaaaagacaattcttttaatcagagttagtaatgtggacagtacaaaatcgagagagtctggggcttctctctttccctgtgatgattaccatggtctgttgtgcacacaggtgagctgctgttgttgaatctcgctctctctctctctctctctttttttcttggtatgtttctttttacgtgtctgctggatcatgtatcttgttgtttgggggtaggtgtgcctgtatctttttatatgtgctcacagtttgtgctcattttgaatacggtccctacttcttccccttagcaccaatgaacccagcaacatgtcatacgtgaaagagacagtggacagattgctcaaaggatatgacattcgcttgcggccggacttcggaggtaacgcttcatcttttttcaacctgtaacccatccttagttctccttttctgtcaaagataaatgtcaaaaaaaaaaaaagaaaaggcatgtcattttcgtaagcgtgcactataccctgggcacacacacacacacacacacacacacacacaccccgggtccccagtctcaggtggatgaatcctcaggcggaggcgaccttctcccgggccgacacaccctctgcatagtcactgcatcacgcgtgtgcccacacctgttttcccaggcagtcccctgaaaggggtggtggggggagcagggagggagcccgttaagaatggagtaagggctgggaagcccccagaccctccccagcctgctgtcactgagagaatctgttcctaatgtggcccacctccccggcagggccccccgtcgacgttgggatgcggatcgatgtcgccagcatagacatggtctccgaagtgaatatggtgagtggcctcccgaggggcccggcggttcggcttacgcagatgggaaatggacaggtccctttgccctctgcgtttcattggcggtcacctcgcccctggcccctgaggtcccactccgcacccgctccccgctccggcacacacacccggtcg

SEQ ID NO: 10262 - DNA, 6000 bp, Homo sapiens
attgcaaaattatattagaatttatatctaattgagttagaagataatatggcattgtctgatagggcatatagatttacagtttcatagatttacagaaagctttgaaaagaagaaagagattatgagtttattttagaagggagggaagagggaaggaaaaggaaaggaagggaagggaagaagaaagggagagatgaagagaggaaggaaggaaggaaagaaggaaggaagggaggggaggggagggaaggcgaaggaagggaagggagagatataagctattactgaggataagattttcactagtgtcacagacaaaatagtttgacagagcggtaagtggtaagtcagtgtgaagttgacctgaaaaaaatgaggtcaagataaggccagcgtaaatatgttatacaggaatatgtaatttaagtattttttcaaagcttatttaaaagtcaaaacatgtgctttctaagtttaagccttccaacaaatattagtacaacttctggaactcaattttcccatcattgtctagaaaaccaagacactgaatgagaaagcccctgaagcctcaatgagctctgaacttctttgatgtgctgagtacaaaagttactctttcagtccctcaaccaaagggaatttatgtttttcacatctgcaaataaatatcccaattacaattttacagccatttatcacaactacttgcatctatagatgatcagtctttgccttttaacagttttcctttcatgctcatattaaggttgaaatgtacttggaatcttttgtgtgactagccatatttgtaatatgaataatataatcataaataattagaaataatgatcagaatttattgtgtcccattttgatgatattattttaaaaaccaactcttttaagtttcaaataagttgactcataaattcatagatctttatactaaaacaaaataaaactcatgagtcattaaaatataattgaacagttcgttaaaattgaccaatgtaagttgatttactgctgttataacaatgagcagctgatttttaaaatttaagcattggtattcttagcagttttaacagtgaaaatgaaataattatatgttccaagaatttctattctattaccttgctttctttccacaattgtgcatgattgaagcagtcagcatttgtagtttcccctccaatgcaaatcagtttttctcaaaaattctgcttttcaaagaaaaataggcatattagtttaaatcttggggtagttcagataatctatcatttcttcaaataattgatgttcaaatcatgatcgatgcctgaatgaagtaacagtctccaccttggaagaataaactcaacaaacatgatttacttacattttattttaaatagttaatcatttgttataaaactttagttaatgagggtattttcctgccaatacatgccagaatttcacaaggtttgaatttaagtacagtgggccaggtacatcacttatttccatataataaggcttgaattaaagttaagcagccttaatgagaccaacagatagctgtcattaaaacatttaatatgcacagctagtgaattcatattttttcttctggaatttaacatctaactcacacattataaatatttgtatccagctaactacatattacattatgacagacaattttctaaagtagtagaaaatatagttaatatatatttattatatatttattaattaggaatcattgaatgtagaaattatttcaacagtaaaaagactgattgttattcttgaaaaatcaaacagccaatgttaaatttatactaactttcttgtgtaacttttggaaagccaaaacttgttgttctactgtttcttctgattggcaggagtggtcattataccttaagggctttttttgatgtgtcacccagactcatttaaatgtctgagtattagaacagtgattctgaactatggctgcatagcagagccctgtatagaggcttttagaatatattacaggctgtgtcccaaactccagagattctgattaaattagccttaagtgaccattttaaaaagcttctcagattatttcaaagtgaatctacatttgaaaactactaaactggaggatttgggaataatgaaaatgctttgctcacagtacactaaaacatttccaagaggggaaatagtatgaatatgactatacaatatttgactttctccaggacagatactcattagccaggactggactagttaatgctctgaagttcttcctagttatcttattctaagatatcatggtgttctttccatgttaaatggttataatttttcttgatagaatacataatgacttaccaatttttagaatgtcactgtaaataatatttgaaggaagctatggggagtgcatctcttctttcaattcattatctgaataagcaaagtataatctatggaattgcatcaaaacactttataaagtaaaatgacattaacaccaacattaatataatcaatattgagtcaatgtctactaatggaaacaaaagataagagaatgatcaaaattgagagtaattaatcagtgaatgcttcttggaagcactggtttgttccagattcagaaggaagtgatgaaattcaagtcaacaaaggggttctctgtaaaatgctgtgttgaataaaatgtgaatgagctttggttttcactctcaaggcatttatgatctaacttagtagtagttctgtctaactctaatacaaaatagggtgtgttacgacagcatagaagatagatggatttattccacattaaaggactggacactacttcatgggcaaaaggaatttgaactagcccttgagatggtgaaggagagtggttgggaggacaaatacgtgctttccaagcagaaatattaacataagtaaaaatatggcagcaaaacattttctggaatgttcaggaaaaagtgtacaagatgaatgaaaacagccagaagtgagaatgtacaactgtgtctggaaaaatagtaacccaattcagaaggctagagagaagggctcaagtgagggaacgggaggaaaagaggtttgccaaacttggaggtaaggctttgaaaggttgtgtaatgagcttgacatccacacatccaacattcctaaagaattccaattataactgagacaatattatgacattaatacctgacctcgactagtcactcgattgtgttaacaaatcttcagtttgcaatgaggccagattgacataagtcaatcattataagaaaagaagtcacaatgatcaggattttatcttaaggaataagcttgcagaaaatcctttcactggagactgagaggctgtcattcaggacttcctcagctttttccatggaagagagtacccaacttcctcattcggaatttatctacataggttattaagctactcaatgaaatattttgaccaaatgtttatgaaaaatttttctgttttatttaattattctgcttttttattttaatttcaagatcttttctatcctgatagagaagaatttctatcaatagaaaggatttcaggaacctttctctatcctgattgcctaaaaaatacactggagacagaaaaaaaaaatcattgtataaaaggtaattagcacgttctctcctttttataactttataattgaaatctcattaaaagctttctaggtctgtatttccctaagtgaccaggtgtccctaatttgttttcaaccaatgtgactaattccaggcaaagactagaaaaagtctgatacctgttagagaatagcaaggttaaataagtggggtggcttttttaggttgcatttaacctcgtaaaataaagaaaggaaaaaaaaagcttcaatgtctttttacagtcctgcctttttctcagtcccggttgaagattccatgggaaatgagagcactattttgtttctcccttgtattgcagatagggggaggaggtggttattagagagaagctcttcctctcttggtttccccctctctccgcctgacagcaccgctctctcgcaggctcgctccttctcctaggtgatccatttctaggcaacgtggggctggtgctgaagctgccaggctcgctccttgcttcctgcatcccgccaggcgaaacgctccaaaagcatcctgcagcctgcggcggcttccctcctctggcccggccccgctgctcgcgcccggcgcaacccccccgccaccgcgccccagcaaaccggctccccgggcccgcctcgccaagctgcgttccgcgcctcacgcagaaagggaattttctctgcattactatctgcattaccttgaagttcactttttctacccctcttggagagggcttttttcccccctccctggtggaatctggctgctccgtttggaatctcctaatctttcctttccacttagattctggcagcgaagaccagtgattctctgcgggctgtaggggcgggggcgggggtcttttttggtccgagagggtgcggggaagggggcacatccggcgtgaggggggtgttggaagttgcagcggagctgggaccggagacccgcggcccccgcgcagcgatgggtctgatctgagccccagcctctccccctgcccaagagcagtagaggctggatatatttttcaaaagccaaactgcaaacaactctggcgatgccaaaattcccctccaagtgacacggctttgcgaaggaggtttcctcaggctgggctctttctgtcattcccttctgcctttctcggcgacgataaaaggctttgctctggcaataggaatttagaaaaaaagaaaaagctgcgctaaactccaccgtgacctcaaactctttggactgtttgaaaaaaaaaaaattggaagaaaatccatcctccaagagaatcggcataggaggagatggaagttttcccctttctcttggttttgtccgtctggtggtctcgaacctgggactcggcgaatgcggattcgatcattcacatcggtaagaaagtgttggtgcagctcgtggttacttttaccgtttcagttctcaaatgtttccccttcgctttccccctctccggtctctgtgtgtcttgttggaggtggcttcagttcattgccccttcccgctacccttccctcacacttgctcagttttctgaaaggatgtggatgctcgaacctcgactgacttgtgctgttgttttgcagtgattcgtggaatgtggctggatgcgtgggggtctcgagttgacctgagtgtgagtgtgtgctgggaactgcagggggattctaagtgtgtggggaaagggagtttaattgactcttatcttccatattttttttcccggatgtacatttgctccatttaaaaatttatctttgggggagcagagaagctgtcacctgtgagatgaaaagaactgggctggggggtagggggagctcccttcggatcgaacaggtggttttgcaacgtgagccggctgagttcgccgcagcttagtgcgatggtgacgggggtgccggatgcgcccccagccaccctctcttctcacatcttcttggctttatgatccttgcgtgtagtctttgagacggtggcaggaggggctggcggcagtgtcgccaaggactgattgtcgcgtgcctcgcctcctcggacacgctcccggggcctggcgcggcggcgaaactgaccccggggcgcttgggaaacgcggggaagcgaatgcgcgcaggctgctcccgaggtctgcttagcagatatccgccttgcctcgcctcgcctcgcctcgcagtcaactccgagtagccgcgcaaggcagacagcgaaggcgccgggactactgcgggccgcgactctgagaaggactgccgagcgggctccgagatgctggtggccccacct

SEQ ID NO: 10263 - DNA, 6000 bp, Homo sapiens
aggtaacgagctctcctgatgtaatagacaatcaaagacaacattttaaggaagcaattttaatgccccataactcaaatgcctccctgttgctttgctaatgttgtaaacgttgtaaaacacggtgtcacgctcgtccgtgttcatgtgaagagtccaccaacaggctttgtgtgagcaacaaggctgtttatttcatgtgggagcaagtgggctgagtctgaaaagagtcggcaaagggaggtggggtggggcagttttataggactgggataagcagtggaaagttacagttaaaggtggctatctattgtcagcagaggagggggtcacaaggtgcatggtggggagatcataagacccatggtccagaagaagaatgtcacgaggtcgatcaatcaatcagttgggcagggaaggaacaggtcataatggaatgtcttaaggttggtcaatcagttaagacaggagcaggctgtttctcttcctttgtagttttcagttgactcaggccatctggatgtatacacgcaggcttgggctcagaggcctgacacatggagcttgcaggttaaaagtgaattgcatttgaagatatcattttttaaaaaaatttccttgtttagtttgcttgttttatacttgattagcatctgtgttttacaaacatgacttatagtccaatgtggtgatttttgaagatgaactgggagatggaagagaattctaagtcttaataattctgataaagttagtaatgaagaatcacaacttataaatgaagcaatggctccagcaaaattgaaaagacacttaactgcaaaccatagtaaaggagcagataattttatatggcctttggaaacccagagtaaagaatgtatttatttttttaagtcaccttcagtaaaaaggcccagaaagcaagttatttagcagaagaaccttttgactagaaaaggaaagagccccacaattgatgggacctcacaatttcagcatgtataattacagagagtcagacgccagcatatgatgtaatgagaaactaaaacggtttcactttcaaagtttgataaattgatgtgattgatgacatgtcacataatgctgcatagcatcaaaagaacctaacaacttctcatccaggttgatgaatcatcagatttcaacaacaaatgtcataaagtagcatttgcaagatttataaattacggcaaaattcaagaaaatttttcttctattaaacactgctgcaaagaagcaaaggtaaagatatatttactgtcttcatattggaaaaagaaggtacctcttggaagaactgtgtcagtatctatttatggtaccctatcaacgattggttccctcagagatttcaattctcattaaaatcctgacatattcacaactcattgctttcttcccagagagtgctgatgtcagaaagttttggagcagaaatgaaaaaagttctagatgatgctatgaagatgacttatcaaacataatgcaattcacttctaaaaatttttttttttaaactatgtgaaaacctggacaaggcccatataaatctccttccacatgcgtaaatcttatggcttagcagatcattttgggggaatccagctggcatgtcatgtcagtactcaagcaccctgtaaagaggtctgtatggcaaggaactggggctggcagtaggcagcatcagcttgctaggcatgtcagtgagctccctcagaaaaggatcctccagccctagtcaagtcttcagtggactgcagccccaggtgataccttgactgcaaccttatgagagaccctgggtcaaaatcatccagctaagctgctccttaatttctgacctacagaaattacacaaaataatgtttattgacactacggattggagtgagagaaggtaatacagattctgctccttaacaggacgcttgacctagaaagtgaatcacagaaatacattcaagaaaacagtagcccagattttaccaaattctttgaagataaagaatggctgtggaaaccagcatttttgtttttttttgcattgctgtaaagaaatgcccaaggctaggtaatttataaagaaagaggtttaattggcttatggttctggaggctttacaggaagcatggtgctggcatcagtttctggtgaggtctctagaagcttacaatcatggcggaaggtgatggggagccagcatgtcacatggcaagagtgggagcaagagagaaatagaagaggtcacagactcttaaaacaaccacatctcaagtgaactgagtgaaaactcacttatcaccaaggggatggtgctaagccattcatgagaattctgcccccatgatccaatcacctcccacgaggtcccatctacgacactgggaatcaaatttcagcatgagatttggagggaacaaacatccaaaccatatcacctacttaacagacattttcatcacatgaactagttgaacaaggatcttcaggccctggagaaaatcgttttacttcgagtgacaagatttttgggtttaaataaatattgaatctttggaaaagttatattgcaaaaagggatcttgaaatgtttccactgctgcttggactttagaataaggaagtctcaagtcttaccgaaaaccaccgtggggaattgcagaacaaaaccgaacaatattttccttcccctggaacacaactgtataactacgtgaggaaccctttccttgaatcttctcagcctgagcacctggctttgagaaaagaggaagaactttgtgaatgtatgactgtagatataagatgaaatgtacttatttgtgtttctccttctttttttttttttttttttttttgagacggagtcttgctctgttgcccaggctggaatgcagtggcgcaatcttggctcactgcaatctccgcctcccgggttcaagcgattctcctgcctcagcctcccaaatagctaggattacaggcgcccgccaccacgcccggctaagttttgtatttttagtagagacagggtttcaccatgttggccaggctggtcttgaactcctgaccacaggtgatctgcctgcctcagcctcccaaaatgctgggattacaggcgtcagccacagcacctggcctgatctgtgcttctacaagttttggatttctgagaaagaagagcagcttgacatttttaagaaagtaataaacattttgacatactttaaaacttcttgttcaagcaagctttttctcactaagttttaagagtaaagacaaaaatcatctcatttcagttgaaaatgcaatctgtgtgtgacaatctcaagttcaattcagaattgagcaaatacacagcaaaagataagcaaaggtttcatactaaataggtaattttcattttttgtttcaaaaataatacacttatataggcccataaaaagaccaacattcgttaaaatcaaattgcagcatttactaaactaaaagaaaaagaacaagtaaagtttcctctctcacttattttgttttttgtttgttttgagaccaagccttgctctgtcgtccaggctggagtgcagtggcgtgatctcggctcacggcaacctccgcctcccgggttcaagcgattctcctgcctcagcctcccgagtagctgcgattacaggcgtgtgccaccatgcccggctgatttttgtatttttagtagagaaggggtttcaccgtattggccaggctggtctcgaactcctgatctcaagtgatccatctgccttggcctcccaaagtgctgggattacaggcgtgagccaccacgccccgcctacaaaggtattttaaaatcccatttacaataaccctctgaattagataggtaccaagttccaccctcttctaaacacgagatcaaatatcaaggtaaggtctcagagggtttgggtgtaaaagactccaaccaaatttaataaatgggaagtcattacctttatttgtgagagaagctttggagaatgtgggggaagctgatgtcaaatataaagggcttaaagagagaagagggagaggagctttcagcacagtccagttcacagcccgtcggtgctcaaaacatacttgaatacctggtacaaaagataaaaatgatggtttggttttctataagacagcatagtttctttaaaattacacacacacatgcattgcttttcttcctttaattagttgagaccataggacaaaagaagaggcatagttgagcgcgtaatggtgcgaaaatcaaaaggttgggaagaaacaagaaactcagataaacgcttccgtcggctgtgacaggttctgaggcgcccagatctactggacatagcgcggctcagaagcctcagagacctgtccgcacagttcctgaagttagcaacaaattagtgagtgctgttgcgggccattttgcagccagagaagcaaatgcgcaaatgcgcccagccagtcagcacggacttcaagaaccaacttcattccttgcaaggtgctttagttctggccgttagggcggcaaccaaacagaaacctgccccgcctctgggagagaaggcggatccctaacgccagctatctccaagagcaacattgccgcagcacttccgggacgtcgtgctgcaaaggacgccgctgttatacgtcacttccacggctcagcgtcaggcaagttggcctctctgttgtaaattagtggttaaggttatctattattgccacttttccagcgctaaaggctgttttggaaccagtgttgcttgttccgcgggtgattggcttttttttttggcaaaccagttattcaagtttctggtctttaaaaaactctgtggcggtacggtaaccgaggaggttccagcgcggcggaagtaccccgcgggtgggtgtgtgcgcaaggccagggccagaggggcacgtggcgccggtgagtggccgtagaagccggaggatttgaaaatgctggacgtggaacccaactgccggagggagggaggaaggaaggggatgcggtgcgaagaccttgctgtctgtagggggaggagatactaatcatggggcggcaagggtggtgtgtggtcggtcggcgctcacgagaccatggagaagtaaactcttcacccatcaggttggtggtcactggctgtctgaccgtgggtgaggtgacagggctgcttttgtctcctttatggtgttctcaccgcagctccgaggggttggagtatactcagaggctacagtgatcagaagacataggtcgtttttttttcatcagggaggagagagaatgtcttttcgaggcggaggtcgtggaggctttaatcgaggtggtggaggtggcggcttcaaccgaggtggcagcagcaaccacttccgaggtggaggcggcggtggaggcggcggcaatttcagaggcggcggcaggggaggatttggacgagggggtggccgcggaggctttaacaaaggccaagaccaaggacctccagaacgtgtagtctgtatgcagtcttcagtatttagcttatttgaaggagtaggtgtgggttgggggtttgtgttgttaggcagcaagtttgggatacacaagcctgtgtggagaatgtagcatgtaagggtggagtggggagatcaagaaagctgagggatacttagaatgcatcttggaggtggaacttgagggttgacaggaagatattaaataggtaatcgtgagtacttatgcctaattccccgattttacagatgagaaaactatgatttagagttaagtttttttgctggggtcataaggttagtgataagtgatcaattagtgatatagctgaaatacaggctgggtgcggtggctcacgcctgtaatcccaacactttgggaagctaagacgggaggatcttttgaagccgggagttagagaccagcctggataataaagcag

SEQ ID NO: 10264 - DNA, 6000 bp, Homo sapiens
tttaaggccaaaatattaagtaaaaaatgactcacatattagttcatctttaaggccaatctggaattggaggtaagaacaacccctttgatttcaattttttaatttgcattcagtattctgtacaaagacatctacgactaaaaactaagcttctttcacttgcctatgtgcaattggagtcagtcttaatgttgtaaaggacatgaaagatgaaataatcctatctcttcctcttccaagtctaatattccggataagttaaattccctttctgagcctctcctctggtttctcatcaaaaatatggatatgaaaataacttgcaagtaaattttgaagttttaaaaccataatgtagaaaatttttttgcaattaataggtaatcaatgaaagatggctattattgtttaaaagttagtttaaaaataagagattgcagaacattttaaggataatgtgctatttgaagaaaacatatggaagtgattttatcaaatatcaaataatgtttttattattctaataagactggctacaaatcaacatttcctaatgtaagttttactgtctttcaagttttatgaacagtgtttgcaagatgctgaattactgtcccactattctcatcatcttctgctgtaattttctctttatttatatttattctcccattatctattttgataaatgtttaaagatgatgatttggaggagaaccatatctaaaacagctggacatacttttattgaaaatatctgatcattatagtggtaaatggactgaaagtttgatgaaaaatttcatgaatgactattacagtgcaggctgtcattaaagaggaagtatgactcatgtagagagaatacagaaaaaaataatttatatctttaaaccatgttgtaaggctatttaggcaatggcaacagtgatgagtacttatgtcacacacaaaaaatgatttggtgagaatactctctctgtatccaaagtttgatttcttagtataacagaagatatttagggctgtatttaggttttattatcaagtcaaataaaataaatatattataggccaggtgaagatggatgcatagaaaatagagtccttagctacccaggagtctgaggtaggaagtttgcttgagcatgagaggaggaggttgcagtgaatcaagatcatgccactgtactccaaccggggcgacagagccagaccctgtttcaaaaagaaaaaaaaaaagaaaaaagaaagaaaagaaggttagaaggtttttagtgtttagatgtaggcctacaaaatgttctcagtgtagacgtacaagaaagaaatggataacagggtcccagtaagcaaaaaatgcatgtacccacaaaaattaaaaataattaaaaaaaaaacagccacaacaaaattctatcattccattaagcaaataaaaacaagcaaaaataggggaggttaattctttgtgacttttcttctctgcagcagatttttaacgtcaattaacctgtttatttcttggtacaatcctgcaaattatgcattgtcattttcattttactaataaagaaacatgaaatttgaagaaattaataaatgaggccaagatttacacattcattcaacactattctaggtgtgtgggcaacatcaatggacaaaaatagatacaaatctctgccttcatgaagcctacattttagcaaggaaacagaggccacaaactgtaagtatattgtatgatgagttgggaggtaataagtactatgaaaacaaaaagaaaagcaggcaaagggggattggaaatctttggatgggagatggtttgcacttttaaataacattggataaatctctgtgagacggtgacatctgggttgatgttgaagatatgagggagtcagtcatgtggtggtctggggggaaagcattttagacagaggagccaataacctaagatgggaccatacctggctttggcatgttggagaagcagcaagatcagcagggctgaaagagagcgagccattaggagagaagaagtcagagttagggggaggagatgcataacaattgaaggtttgtagaccattgtaaacactggtttataaaatggggactaactgctgggtgttgagttgaggaatgacacaatatgacctatgacatgttttaaagggatcactctggctactgttttgagattactcaagggtaggagaggacaatgatagaggcagggtgagtagctaaagtgctattatagtaatctaacgtagagatgaaagtcactgagtctaggttggctgcagtaaaaatcataagaagtagctgaattcctgttgtcatttgagagtaaacaggatttcctcagagatttggttgtgaggtgtgagaaaaagagcggaatcaagaacaacttcatgatttttagcctgaccaaccctaaggatgaggttgccgtgaactgagaaggagaaggctgaatgtggggcagattttagggagaaccatagctcagtttgggacacactgagtttgacatgtttattaaatacgcaagttgaaatgttgaaaaggcagttagatagatgagtctggagttctggagagatgtctagtcaggagaagtacatatgggagctatcaacatggtgtttaaaaccttgtgaccagatgaaattactaaaggagtgaatattgatagaaataaatagagaaaagtagatcaacacttgacagaattggggaaaataggttatttcatgacattatttagaagcatcccttttcacactatgatataaaagttatagaaatataggtaagcagatcactttcatagaaaaaaattttcagaattctgaacttgaccattttacaggctagaagaagtgcttttagggcatcaactatatttcttaacctttgggccaaaaccctacaaacccatccaacctgctggacttgcttttcttctgaataacctaattctccaatataacatccatggatggcacagaaacaatactagggaaggtgagcaagtctgttgtaggtattttcagcatagttcttccaaatgtggacattagagtttgtaaataaaagatgttcattttattacaggaatcggaattcctattattctaaactcttaataatttcttgattaattgaaaactaagtgtaaggttttcgccaacttctaaactcccctggctgcatgaaaactaattcctttatcattcttcatatgacctattcaccaaaagttatatcttatgaaacgtatattatcaatatagttctctctaataaagcattaaaatccaaagttatatcctgatccactttggcgggggggtcttcaaacagtacagctctttgaataatgatcattttgtaatgtaaataaggtaatgatcacttattaatgatcactactcttaggcagcagaatatctcatgaagcttatggaacacggttatatgcaggaaatattccttccctccatatgctgcgggtggaaaaatttattagtggatacatctgtgggtccacaatacaatgctaagtgatgctcacttgagacaatgcttttttaataaaaaaaatccatcaggacctggtgcagtggggtggggtggctcaagcctgtaagccccccagcttgggaggctaaggcaggcggatggcttcaggccagagttggagaccatcctggacaacaaagccagagatgctgtctcttaaaaaataataataataattagtggagcgcaatggcctgtctgttgttccagctactctactagggagaccgagacaagaggatctcttgattgcccagaagttcaagactgcggtgagcgatgactgtgcctctgcactccagcctgggcaacaaagtgagctcctgttgcttaaaaaataacaattaaaaaaaatcaatcaggcatacattcaagaggtaataggatagccttatctgttatctaagggctgcatatccaagtaagggctacttcttcacaaggatgaggacaacagtattttgctcttataaggcagagaccctgtctggttcagatatgcaaaaatcactaattttgaatctctggtaaatttctttcaagatctgtaactctaagtaaatctcttaatataactgagtttcagattcttcatctacagaaggggatgacaaaacttgcccaggaatgtggtgagggccacatgagataaggcgagtgaaaggtgttttgcaactgtcaagttctgtacacatgttaattatgtaacagatgttaaacatagtattacctgtatgactatattgtcagtaattttgaccaatttaagcttgctcagaaagttcaggcttttagaaattggaagacccggagattaagctggatgtctgggttccaggcaaatggtgaaatgacagaaaatgtgttttgttcgctttgacccaagaaggtcatttgttgctctgttgtttgttgctagtggtcaaaagctgaccccaagcaatcccagctccttgaaaggttttttctttttgtaccgacactatcattcccgcccttcgtccccaactcctttagtcccctaaggagtgaggggggtacacatttctgctcggtaacccctccaatgcctgaaggggacgatgccgtgacgttgctctgtcgggacacctcttccctcccccgcccgcggtcgccaggttcccccgcggcccgcgctgtccccgctgcggccccgaccgcggcgcgccacggcgcaggctccgcggcccgagcaggcgcgtcagccgagctcggcggtggcgcgggcggctgggacgcagctgcccccgctcggcgcccgctgcacccttagcagccactgccacctgggcccggagcctccacgatctcgcccggcgattgtgggcaggggcgcctccgggtaagtgccaggagctccacttaggaggaggggacgcgggttggggcggcgacggtggtctgaggacgggaatagacgcctttgcggaaacagcgggtcaagcccggggcggcggagcgcgaggagcactgcggcgtgcccgggaggacgcgcgctgccctgcgcgggagaggggcgcggggcgcctggcagcggcagccgggtccccgctgcggtggcgcccgcggagacgctccgggtggagagatgcagagggccggggtaattaggaaacgcaaggttggccaggagggctccttgcgttgttttgtttatgaggatcctccagtcaatgcagctgtcccccttgaaagattgggggtgaggacagagcagagtggtgaatttctctgtttttcgaagcgttaggggggctcggccctcctttttgcgggggcaaggatgtgaaagtgggagaagtacctgctgctgtgggcaaggtgtctggaagcaggtgccgctgtcggatgggggaagggagcgtccaatgttgtgaagttgccagaggagaaccttgtgttgttgctgttggtctgatgagccccctctgttgtcttcaatttaaagtacccagggagaagcccctctggcttgcctggagtgtgtgtaaaagataaatatggggggaagaatcctggggggggggggggaagatgaaaaacatgacataaggagaagcaaatttctgagggtgagatgggaattaagttagcgttgaagaatatgacaggtcttttactctgcggaaaacaatgaaagagaaacaatttatggtttggaaatgaaggttgcagaagagtttgaacttctctagtgtaggtagaggcttaattattttttatttatcagaatctctggcaagaatatggttctgatttgagcatgaaaatgttattaaaatatggctaggacgataatttgaaaaaaatgtaacaacacttgttttatttcttgttgtagaatttctgaagtaatctttttgatgacaaatg

SEQ ID NO: 10265 - DNA, 6000 bp, Homo sapiens
agttctcactttactttaaagaaaccaaaaagggaaatgattcggtagatccatgctcaaggtaatggccttggtcctactttaagaaagtggaaaatgattatacatttatccatattaaatcaaagctggattttaaaggtggcatgtgtcttctttttttaattgttttgcttggattttttttctttaactaaccttttcaagaaatggtaactgtcatgagaaacactgtagtctgatgagtctcaaaattaacttccacatgaggcctcttccctgaattttagaatcagtgttaagtgctagcacaacaggtaagtggatacagcccactgaccctgtaaactcaacatgtctaaagctgaactcatcactttgcctgcatgtctgctctccagtgttttctccaacccttggtaaaaccaaccttttgggcactcagcctagtaccctggaagttggctttgtttttccatctcctttaccttcattacatacaagcccactaacaagttttactaagtttttatcctaaatatttcctaaaaccaaacttttcttcctgtctgtactattacttcctaaatccttactctcattaccctcaccaggaatacggccttctaactggtctccctacattcaatatgtttccctttaaatacattttcaaataacctcaaaaatgttccattaaaaatgcagatcttgagatctaatcctcaaaatggttctcttatcctatgggataaatacatagtttttgttattgtcttgtgtgtttctgctgctcctttttttgacacttccctttctagaaacatcgaattccttgtaattcgtggacctcacacatgcttttgctgaagtcattgtatttccatgaagtgttctccactgttaattccaaccctccacctagctaacccttacttgactcagtttaggtctcagtctttgaagacccttttctgtcctgagctccaagatataatgagcattatagattttttattgctgtcataatattgccttaataatttgtctacctttcccatttcttatttctttcatcacatgatcttcattatttacttacttaaattctgggaacttcataagaaaggcatctgttgcgtttaccattttatccacctatcaagtacagtatttgaaacatagtggccccttaatatattttttgaatgaatgaataaactgaaactctatattttccaataaatatttctggtatagaatggctgtctatagggataacattaattaaaaataatataatcaaagcccttaaacaatcaaaaatgaaaactataattatttttccattttgaacttgattttaaatatatttttaaaaatcttacaaaagcctagctttagctatgcattgtagggtcacaaactttatcttattgagttaatgatttaaaattttgttacaaaaaggtataataaatactatattaatctgaataactattttcatatcattattctttatcttaattaaagaactaaaactccccagagtgaacatcccttttttatttatagccctgagtaattacagtcctcatgtttccttctttgtttcttttgctctgtatcagccaatagaatcttacgtttgaaacatgggtttcttctgcgagaactgctatcctttgccatcttctgctgaaagtaggaggacactcattttttacaaattctgcattgcatattagtcttttagatgtcctacatttttacagtcccaggaaggcagggagtgaactccactttggtcaaactacttcagtaggaactgcagcactgacatttataacttaattttgataataaagtcagctaaaagtttgctctgccagtgatttaaaaactgttaaccaaccacctaactaaactaacaaatgatacgatggatcacattttttatttcttttattttttattgtaacttacaattcttgcagcggaagcaatgaagttttacataattgccaaaattgaacagcagagggcagaaaatagcaaactctgtttcttgtagcacactattctagtcaactgtagatctagtagttttgaagttttcaaaattgattggtgatcaatttgaaatacatattcttgaaataggaagttgctacatgaaaaaatagagccgtgtacattcacaaaataaattccagtatttttccatgtatttgtataaagaaccatttactgtagtcaatttaaatttattacccttatattgacaggattctgtgcttgaaacatacatgctattaaaacattataagaaatttgaaaaagtctcatgagtgataatattaataaaattatgctgatataggaaataagtttccaaatatgtgaaaggtctatacataactaccttgtgaacatagatacatagaatagcagttgaattacaagtaatgcttgctaaaatttttatttccaccttatatataaattgtaattggccactagacagtaatatttttcttgagctcttacatattagttactatactctatgattcagcaaattcttatttttacagcatttgttttttatagaatgtaactcagtcaattttgagttcatatctgcccttgactttgaaataggttaagatgaaaatagtttgaaaacattcttattttttaaaattcaattcacctgaactcacattttaaacatcaaatttttttcatattgaagcttcctctctctctgtcctcgctctctttaattctaagttactttctatgaaattaaagttttcctgtggaaacaagtgaatcgagaaaaaaataactacagaggtattttaaattttgctctgttcttagtgcttttacattaaaaattttaaataggtaataatttccaatcattttgtataccttacatcacaaataatgattaaatatgtatgatttatttattctttatgttgcaattttgaatatatgtaagttatatctcattttttattttttatcgatttattgtaattttaattaattttatatattatttttattattcaattttttaaaggttaaatacatttttatttagaagacctgctttatatacagtgtggagtacttataacatactaataaaattctaaggcataaaattaagagatattttagtctatagtttataagcttaataatagattacagctattctcacttcatggtttaggactacatcaaaaagagggaaaggttataatttgaaatgacagcaatataggatccaagagccatagaagccactttgctcatcatcatttttaaaatggggaaattgaggccaatgtgattaagaagcaagcataagataatccagtcagcaatgaagctgcaagcacaagaaggcagcctgatagactcatggcattttggaatactagcagttctctttttagtactgtaagctccaatctccctcttcctggaaacagttccttgttctcaatctttctttatttgtttaaaccagtaaagacatgcaacttggtggggcttttctgagtccgcagagggaattgtcagagcaggtttccaggaatgagcttggaaaaagcaccatgaagaacataaatttcacacgggaagtccagtcatccatctcgccatcaattctctcccttcaaacttttaatatctaacctcatctttctttccctgtggcccgcgtgttcagtagagcgtggtggcttactttctttaggcagtgatttttcgaaacccccggccaaaacgcgatggggaaacagatttctaagtaagtctctgggaaagaatctgcatctctgtggcattcctacactagcttcatcttctaatcactttcctctaatagcctttccttaaaccagagtctcttgctttcaatctgcataaagcaagggcttctaggaaaccaagtctacatgactctacaagggagggattgcagtgaaagctgcgagaaagacccgtgcgctctgtaactaggcgagtcagcatcacagcccaatggaatatactctaaagatgggattttcatgcaaaatatttaaaagattccatcttgatctcttgtgcggcttaagcatttaaagatataacttggggttctccctggatcctggctacatcccatgaagcccaagtgcacaattttggaatatttcctccacggtgctttgcttgcttgtttgctttcggctgggtcaggtgaggaggatgacagggcttctgtattgctaaatgggttttcacaggagatggaagataaaaatcaaaattatttgtaacgtaagacagcagggcctggtgagaggacgcttcgccgccaacaattagcaattcggcttctacacagcagccggagatcagctttgctgcatttggtccaggttggagcatctccgcagcagctgcaacagccgcacgaaggtagctccgggcggggagcgaggcgctgtcctcggtgctgaaaggccgaggcgcgcggtgggcgcgacagccccggagacccgaggtctcgcggagggacagcggctacgggccccgagctgtgctttctcagcgccgcgcacgcgacgcgtccacggtggtgcggggtgccgggcgccgtgcgggggagggggcgcgcgctcccgcctcctgccgcgagtcgcgcacgcgcgcccgggactgcctgcccctctctgtgacttgcctgtgtgtgtgcgtgtgtgtatgtgtgtgtgtgtgtgtgtgtgcgcgcgcgcgtgagtgagagaggagagagggagaagagagcgcgagagagggtgagtgtgtgtgagtgcatgggagggtgctgaatattccgagacactgggaccacagcggcagctccgctgaaaactgcattcagccagtcctccggacttctggagcggggacagggcgcagggcatcagcagccaccagcaggacctgggaaatagggattcttctgcctccacttcaggttttagcagcttggtgctaaattgctgtctcaaaatgcagaggatctaatttgcagaggaaaacagccaaagaaggaagaggaggaaaaggaaaaaaaaaggggtatattgtggatgctctacttttcttggaaatgcaaaagattatgcatatttctgtcctcctttctcctgttttatggggactgatttttggtgtctcttctaacagcatacagataggtaggtaccctttgtgctatgcttttgaattgtgcataatttggtggtaatctttgttcacagtgtacaaattaattcatgtcatgtagacttatgtcataccttgactgcattccagatttaaactacctagaatatacatgtttttcttaggatgaagcaaaaggaaaagactatgcctttgatacaatagaagaaaaggtcctctcatttcggatccccaaattttattaattctgccttagcgacattttccagtttgctcagattttcttggggtctgaatgcaaagcttgtgattacatggaaaggtgaaggtttctggccgcctacctcgccttcagactctcatctgggtcttgaccccttggctagcttttggatattccacccccgctgtccgagtccgtaggtgtgtttattcggcctattcgcgtgaataagagactcttggatttttgggcgctagcgcgcgcccctcctttccctcccggggcactgacactgttctcttgcttgctgtttgttctttgcaggggggctatttcctaggggcgccgatcaagaatacagtgcatttcgagtagggatggttcagttttccacttcggagttcagactgacaccccacatcgacaatttggaggtggcaaacagcttcgcagtcactaatgcttgtaagtaatgaatattcatgcctttcgggtgctgcacgcggaaggccagcgagtgtgag

SEQ ID NO: 10266 - DNA, 6000 bp, Homo sapiens
gctatgaattatcccaggtttattttatctaaaagtatctttatttcaacttcattctcaaaaacataggtaaaattctgggttgatagtctctgtattcccctgagaactttaaggattctcttccattgttttctggtgtttctgctgttcttgatgaaaaattattcttacattatttgacccttgtatgtacgggtccttttcttctcttttcattttaaagccttttttcatttttgattttcagcattttgcctacagctatgtgtgattcttcttttatttatttatttatttatttattatactttaagttttcttcttttggttcaacagatttcacttgtgttttaaaacatatgtggaatattttggtcattattgcttcaaaattttatctcacctctcattatgttctttaattatacctatgttggactttttgatatgatgcacagatgagtaaagctctctttatttttaaatctttttctattattcagatttcttccttttcatctctattcaagctcataatcctttcttcagtagttctcagtctgctgttaagtccatctaatgaagttttccttttagaattttctttttatttctagaattttcatttagttcccttttgtagtttaatttctcttctgaacttttttctttacttattatgactatctttaacgtcatttcttacaacttccaacatctgtgctacctaatgtctgtttttattgacttctcttttttcttgattatgggtcacatttgttctgctttctcacatgtctagtaatttttttatagtacaaaagatgttattaggatacattgtaaggagtttgggtcatgttgccttcttttaaaatatattgaatattgtttcgaagcattctacagttcagcagctctttttggtctttctagctttaggtctattctttgttaggatcagtcaactttggctattacctcagtgatacactatggcccttactctaggaaattatccttactcccaaagtggtttttctgagttctcagggcaacgccagaggtgctcagtgaagtcttctttggaaggctggcagggctagaactctaacaacttgcagcattccagctctatgtggcttgtgttatttcattccattctcagccctgcctgctaagcattgggaagccttggatatcgtgcatatcccagcccttagtcaataacccacatttaatttcacacaaatttcccacccaccagctacctgcagaatacacacgcatacatcaattctctcttaaccctggcctacaaattccagccacttcaggagcctggaactctaatctctgccacttcagctcagtgactatgagctctacctccctgaactatggaaggaacatgtcaccaggcaggggcgagccagggcatttgtgaagcacacctctgggatttttcttctctcaagcatcacagttctatgttgtttattgttcaattcttggaaagagttccctcatgtagcttgtccagttatatggttccttacagtggtatagcatatccagtaacatttattctgtaaaggctagaagtagacatcttccatcttccatttcagtagggaagacgtgtcaaatatgtaattgtatcatgaattgttttaattatacttgctatggagaaacatagaaaactatgggcatctataataactgttcataatctagttggtttgccctataaggttttcctcaaaaagttattgaactgaaatctgaaggatgaacaggcattaaccagatgaagagaaagtaaagcagaagtttagattcagataatagcatgtgaaaaggccctgagacagtagggaatagggtatactcaaataagtgaaacaaaatgattaatatttgtttggactgcattatgtggctgtcactgtgataagtgctttatatattatttcctctgatcctaactttttgaagcagatactgtaacctgtccaatgggttcattttgcctgctgcccagatagagctgatttatcaagacagagagattgcaataaagagcttaattcatacagagctagctgagcaagagacccggagttttattattcctcaaataagactccttgaaaattcagaggctagggtttttcaaggatagttgatgggtaatggaaagggtgctgctgattggttggggtgcaatcctagggatatggaaaatggtcctcatgctgagttggcttctgggtagggtcacaggactggttggcaggtctgggcgaagccattcattgtcagaaatgcaaaaacctgaaaagacatctcaaaaagccaatcttaggttctacagtagtgatgttatctgcaggagtaattggggaagttatgaatctcatgacctcgagaataacggctggtaatagcttatggctacaccttagcagaattcacgctcctctcatcctcctaacctggtgatctttcattagctttacaaaggcagtttagttttggggaagggccattatcatttaaactataagctaaatttctcccaaagttagcttgggaagcaggggagggaggaggtctttcttcttttaggcaagttggagacacaagagggaaagatggccagaggaaggtgtgtttgaactgagttttaaaagcctcatggggctgggcgcagtagctcacgtctgtaatcctggcactttggcaggccaaggtgggtggatcacttgaggtcaggagtttgaaaccagcctggccaagatggcaaagccctgtctctactaaaaatacaaaaattagccaggcatggtggcatgcacctgtaatcccagctactcatgaggctgaggcaagagaattgcttgaacctggaggttgcagtgaactgagatcgcgccactgcactccagcctgggcaacagagtgagactctgtcttgaaaaaaaaaaaaaaaaaaggctgcactgggatacagaagttgagagttggtgaacagctgacaaaactgagggaacagcacatatcctggcacggaggtttgaaatggcataaaggggaggagcagagtgcctgtgtagggagctaaagtaagaccctcatgtcctggaggagtttgcaaaggagagggtagttaaatcgttgcatccttccagaaatggaaatcagaagcaaaatatagggtgtgttttatgtaaaccagatttattttgcaagtttaaaagaaggggaacatcacacacgggggtctgtcagggggtgggggtcaaggggagggaaatattaaggacatttataacattttgtcaccccactctacacatacatgcggagcttaaaacctagatgatgggctgataggtgcaggaaaccaccagggcacatgtatacctatgtaacaaacctgcacgttcttcacatgtatcccagaacttaaagtaaaatttttaaaaagcttacttagatactaatctaggaaatgaatcaagtcttctttagatatccaaagtgaatttatttactcatttgccaggcatttattgaccttctgttacatgccagaccctcaaccagcagttgaatgagacatttcataccacataagtgtcaaggccagaggacggcctgctttgtgagttctaccaaaggcaaaaagggtagtgtggccaatagtggatggcccagaaagcagagagagtggctgcaaatgctgccagagactcagacagggccagatcatacttggcgtcctcgatagaaaaacaacatgaagcttttagagggcttttaatcagaggaatgatcttatttaatttgtgtatttactacttcattttgtcatcctactctacacacacacatgagttttagccagtggatactgttggtgggtgcaacatatgatttaggaaactaaatcagtaggcttgtggtcaggaatttttttataattccaagataagaactagaaaaggaacaagtgatacatttgccagattcctgttataaagatggtagaacctcgatttaaattgttttctgcgctgatgctttatatttgacaccttgcatgctgatctcggggaggctagttacctattaacatgacatccaagtgtctgagacctcagggtgggtaaattgatgctgacttggatagttggctcctgacatcaaaagttgtttcagcagtttgcaagctcacccgtccagccacttttgatttttcttgagtcatctccaggtatctgctgtcacacatactgctccgtctattcctgggttaatgtttgacaagcttgtctggcttcttccagaattagtctgtttgaaaaagttccattcattagcgtccacatgtaaaaaatgggaaagattgtcacatctctgggcatgtcagtatatgctaatgaagctgcatattaaggacatttattttctcattttcaggaaggcaaaggtactaacaggtgattgtggtgtgaatgatttatgtgaagcatctatctctgctataatcaaagatggggagcaatagcagaaaattgtcatgtgggcccttagcgctggtttgaatattgaaatttcaatccagttaactcttctagtgatacttgttttatccctgatctaagggccaaaaaaaaaaaaaaaaaaaccaccagatttttttggtggctttttttaatcttttgccgttcaatagatatattttacgattctgctttcacttgttcgtcattatcttcaaaacaacatttagaaataaaaacaaaactaaataagaagaaaacaaactttttttttcctttcgggggtcccaacccactgcctgtgattgcctgagtggatggctgcgtccctgatccttcctgcctggcttctctgataaaccctgcagcacgtcccttttctctctgcagacagcattaacagaactgatcctgtatcttctaggtttcctgtacgctcagaacagcaccaagcgcagcattaaagagcggctcatgaagctcttgccctgctcagctgccaaaacgtcgtctcctgctattcaaagcaagtttgtttttttgtttttttttttcctccgaaactcttgtttcgtttctttaggcctgcatgcattgccgttctctacaaagaatcagtatattctacaaaagcaatctattgatgtactcatgtttacctaaatacccaggagaacatttgggcaattaggagtcattttccattttgcagactgacagcacagtcttagtgacaggagcctgtcctgcaaaacactgggacatttttgtttgatgtaagggatggggactggactcaagtaactgtaggaattcctattgcttgccttgttagcagagcagctggacactttaacatatgaccttgtacattgtttgactctcatccactgggtctataatcccagtggacactgcccaaattcagaaatatcactagattagaaaaaagattacaaagtgtcatttaaataaacgtgacttttcttctttgttgattctttccctgtatcagtcaagattctctagaaaaacagaaccaatacatactcatgtgcatacacataagcatatacatatcatatacatacatacacatgcatatacacacatgtacatatgcatatatgtaaagagacttatttgaaggaattggctcacaccattatggggactggcatgtctgaaattcatagaatatgctggcagctggaagttcaggaaggatttgatgtcacagtcttgaggcaggatttcttcttcaggaagcctcaactgattagatgaggcccacccacattattcagggtaatctatgcttaacttaatgtcaactgattatagatgttaagcacatcgacaaaataccttcacagcaacacttagattagggtttgattaaatcactgtgtactatagcctg

SEQ ID NO: 10267 - DNA, 6000 bp, Homo sapiens
gagtttcttggagctataaaatttaaattagatggtttggtcatatggtatgaatatgttaaacttaaatatattggcaaactgctttccaaagtggttctattagtcccttatcagtcttgaaacaagacatgacattatattcatcataaaataggcacttggcaacaaatttaacaatgtttaaatggccatcaaatgaatcatacctccagtatttacatctttgtgtatcccctctaaataaactatatgggttaatttggggcactatcggtaatgcataaattatccttgcaaaccattactattaggtgctgaaaataaatgtgtttcttaacaatagtatcatctttttcagaaactaaaaattcgcacataccatacatatacactaacataattaaaggaatgtttcttgtagtaattagtacagagtactaattacacacgatcacacacaccatctcacacacacaatcactgctctttggagtagcacttctaaacttattctgagagcttatttcagaattcaagtctgatgaataaaataatgcttcacacattattaggcattttcaattgagcctaaaagtagttattaaatgtattacttggattgtatccccttaaattgtattctttccactttttttttttttttttttttttagacagagtcttgctcagtggcccaggctgcagtgcagtggcacaatctcagctcactgcaagctccgcctcccgggttcactccattctcctgcctcagcctcccgagtagctgggactacaggctcctgccaccacgcctggctaatttttttgtatttttagtagagacggggtttcggcatgttagccagggtggtctccatctcctgaccttcgtgatccacccacctcggcctcccaaagtgctgggattacacacgtgagctaccatgcctggctggcctccacctattttaaaacttcagactttcaaacaaaacaaaagctaatattgaataactaatatttctgaatgtaattcaaattaatgtgagatcttggagactattaaatattgatacattgtcttaatgtccaacttgatctcagaaaattataaaaaaataattaataatctaaaatacatactataataggtgactttccaaatttcatgtgtaaagtttattcagataatagtattgtcacaattttgtttttttcaaataattgcactgaaatatctaaatctgcattaactatatggcaaaaaattcttattttgacagcagtattaactggtattatgaaatgtttactcaaatacaatatgttaaattcccccagattaggaaacccttgtacactgttggtgggaatgtaagctggtacagctattgtggaaacgatatggaggttcctcaaaaaactaaacatagcaccatcagatgacctagcaatccctcttctgaacatacacccaaaggaaataaaatcagcatcttgtagagatatctgagctctaatgtttattgcagcattattcataatagtcaagatatggatacaacctatgtgtgtccatcagtggatgaatgaataaagaaactgttatatgtatatgtgtatatgtgtatgtgtgcatatatatgtgtgtgtatatatatacgtgtgtgcatacatatatatacacacacatctatatgtacagctttgtaaaagaagggatactgccatttgcaacaacatggatgaacctggaggacatatagtaagtgaaatagaccagacacagatagcacagaaaaataaatatgaaatgatctcacttatttgtggaatctataaatagtcaagtacatagaaactgagagtagaatggtagttaccaaaggagggatggtaggggggaatttaggagatacagcttgaagcgtacgaagttatagttatgtataagaaagttattattattatatattatataataatatgttatgtataataagatctaatgtacaacatgaggccacagttaataatatttcattgcacactgaacagtaatttgctaagagagtagattttaggtactcgatcctcacacacaaaaaggtaactatgtaaggtggtggatatgttaatttgactgtaaaagtcattttgctatatatttatatcaaaacatcttgttgtatacctcaaatacatacaataagaaatgagtgaagataaaaagtctataactagacaatgatagtaggctggtatacaggtaatatttcagtggaaacactgttttaatacaaatgagaaaaggcattaactaagagactattaaatcaattcttcccacctatgcaaaatacgagggacagagaaatacattaacataaaattgtcaatagcttctaaattcttggaacaggagcatttcaaactgggcctatatctacaagccttcagaatttaaagcagtaattcacatcagtaccctcctcaaatggttacaattggttcaatttttaccagaaagaattaatgaaagaaaagaggaacaggttgaatcctttcagattatttaatttattaccactcaaatattttgcataccaagctctttggacatatgataaattgacaatagatgggaccaagtacctgcaagagacttacaatctacatgacagtctatagaaactggcaatggggaagcttataaaatgggatagagatttttatcacacattaactacaaatattcattcgcctgtttggtcaaatgttctaatatttgagttatcttttatattaaaatgttggtccatactacagttgtccatggcctataagaacttgatgagagataaagtctcacaggaaaatgcacatacttacataaacacaagattttgtgttcatttccagggcatttcataggcactgtgggctttaaagtgtccatcctaagacgttagcagttgggttatctgtattatttgcatcttattatatccaaagtaaactcatttgttaaatttataaaatgtgactggcttaatataatgatatttggggatagtgtacttgggcccaattcaaattctgctaaacctagtaatcagaggcttatatcaacttaaagaaaaaaagaggtataggtatgattttaacaccttcctatttctgcacagctacacagacaataataataattcactgacaatcctgggctatcacaaataggagtttacatgggaaacaatagcatatttatattcataagttaaagtaaattataacttttcagaatgttagatttctaaaaaaaaaaaaaaaacctcaagttagcaggcaatatttttttaaagatttcaggcagtgaaattcaacatatatcttcttgaagtaatacaaaagtggcataaataaaagactgtgaaataaaatgagaagagatataaatgcctttagtattatcttcagctgaacttaaatactataacccaattaacaaaaatataactggaagtagctactctgaaagaatgttcttttaatttgaatataatagtttcacagattttaagtttgaattttaaagatacgatatgtaactgtttccccaaagccattattttggtttcttaattttttgatatgtgtatttttaaaatgaaaattgcaagggaaagtggtttagaaaatacaaatttaggttttagaaagtataggaaaaggcttacaaatgtaaggcggtggcttacatctgtcataccagcactttgggagacagaggcaggaggatcacttgagaccaggagtttgagggtagcctggtgacatcgcagagcccccacatctctacaaaaatataaaaatatattaacagagcatggtgacacatacctgtacttccaactacttagaaggctgaggtagaaggattgcttgagcccaaaaggtagaggctgcagtcactatgatggtaccactgctctccagcctgggcaacagagctaaattctctttttaaaaaggtaggaaagtattaagattagagaaataatataatatgtggagaatctgtggtgactaatgctttcatggcatatttggaggatacactagttcttccgctatttttcccaaacgagagagcttgatagtcatccacatttataagatggatctgagaacaagcaattcattgctttgtttaattgttcattcaataaatatttattgacattctatgtgccatgcactgtaacagcagataaaataaacacagatgagcaaaaattacctagcccaggccctcagagagaccacagtctatgagaaaagaatgatagagatgggattaggatgaagttaacaaattccatgaagaaagcagtacagaatacagagcacggagctctagctactgcccacgatgagcactttgggctttcccttagaaagaaaacttgaatccagacgtttaaaacacacaaaaaaaccaaaacccctgtctaatacaatgcgttccctcttcatacccgtccactagtcatctcaatttgaacaaatcatcagagttccgactagaacctaattggtgtttggttccaaggtatgggaattacttagctcattgatccatcatatgaaaatttccacatgcatcattactaatttgaaagacgcttttcccccttggagccaataattaatgtttccaaagatctattgggaatgcttatctttgctcagtaaaacagtaaagatatggagcttagtgttccctttcatgtcacaagggaactaatatttgtccccctccattttaatttatgtatcctttctctccataccccaccttctgcctctctctctctctctctctctgtctctctctgtctctctctctctctctctcacacacacacacacacacacattttctctttccccccccactctctctccagccgtcctttccccctacctaaagcagtcaacctctggaagtaagtcaactccattctgaaaaagaagagtgtcgcaagaagtgaaagtgattttgaccagaggtcgcttgtctccacctctcccctcctctccagaaaaggatggagcagcaaagcggagggtgtgcgcgtgtctggtggaggcgggtaaagaaatggggtgtctttaaagcaatagcttagcaaatactgggactagagtgcggctcgagtccacttcccaatagtttggcgagagtccgccgggtgagctgcaacccctgttaccaggaagaatctttctgctttcattgctctccctaccgccccccataacacctgaatgggagggtctcaaaggtggtttgagcccggacttgatcccctctcctcaccaccgctaccacccgacgcccagcagtccccgtcacccgccctttctccacctccaaccttgactctgggtacaaacaggtcctcgcacaacctgatgacagaggagcttcattggttagatccaaatcccagcggaagggagggggccaggaggtaggaggacgaacactgctgtgggcggggagcccacttggggtcgggggctgcgaagccggaggaggggcgagagaccccgttcctcatccccggagttacagtcggaacaaacttgccgagtcttgcagcgcaagcgcgcggatacgaaccccagaaccttcagcgcgcgggcacgaaagggtgtggagcggtatacatagctctacatacacattgagcgctgagcgagaaaggagggggcgaggaaggcaggttccgcctcccctggccccgtgcacacacacgcccaccgcggctcgggctggctgagcgcgggcgagtgtgagcgcgagtgtgcgcacgccgcgggagcctctctgccctctcctcgcaccctgctcagggcatctgaagagcctggaaacgtgaacaggcttgaagtatggcatgttgcaaagatggtttctgccaagaa

SEQ ID NO: 10268 - DNA, 6000 bp, Homo sapiens
aaaagtcagaaaccctacaggggagttgtaggcagctcctagtatcttcccttcccctaaaagcatcttcctttcacttgactttaatacacagctggtagttccattaaatggacagttactgttgtttttgaaaaatgtaaatcccttggagcattaaggacttttaggggctcacacacattagtacaaacttgtataaaatactttccctttaacagctaactgagactgactgccctgaaggaatagcagtttttgactggcagggaatagaaaggtcattgagaagcatggagcccttttggggtaatggcaggccagagataagatcctggaaggatgaaaacaatacgatgtcactgagctcataggtgctaggaaacaaggcattataaggtagacaaagatgtagagaaagagtagagagatgccaaagaaaggttttgcccattctcaaattttacttgaggttggcactgtacccaaagcagaagaagaaaagtcgctccctccccctcctcactatgggatctcttcatttcacaaatagttattgaatggctgctgttccaactaccacggctgtttcaattgccactactgttattactacttaccatttattgaacactcactatgttgccagctttatgattacactggtgtgacaatgtcaaataagactctgtccctgcccctagaagaactgacagcccagtgttacaacttagcaaatactattatagaatggcatctaaatcagatagggtagatccttgctttaggaaacagacttctgatttctattgttagttctataattcacatactgaactaatagtagctaatacttactagtgcctactatatgccaggtacagttttaagtgccattaacacagaatccttataacacccctatgaagtaggtacaacgactatatcttcattttactgagggaaaaactgaggctcggagaggttaagtagctttctcaaagtcacacaacctgtgagcagcagaggtgggatttgattccaggcctctggccttatgttcttaaatacctccctacactgttattgaaacaagttcaagctaactttccaggaaatataaccataatttataacttatttctatgttaaagtaagttttgagtcctgatatggtttggctgtgtccccaaccaaatctcaccttgaattgtaatgatccccaggtgtcaaggatggggccaggtggagataattgaatcatgagggcagatcccccatactgttctcatggtggtgaataagtctcatgagatctgatggttttataaatggaagttccatttataaatggaactgcacaagctctcttgcctgctgccatgtaagccgtgcctttgcttctactttgccttctgccttgattgtgaggcctccctagccatagggaactgtgagtccatgaaacctctttcctgtataaatcacccagtcttgggtatgtctttatttgcagcatgagaacagaccaatacaagttccaaacttctgactagaggaaattttcaaaacacattgagtgaggaaactgcctgggaactccttggactgtaagagaacagcaagcattagtgaaagacagtttatgggacattataagttctgtgtaaaaggcactagaatgttaatgaccacatcataagtttgggaatcctaatttgggggggttgattgttctgatatgcagcttttatcttcttaatttatactggtaacaaaatcaatcagttaagtttactttaaaaagcaagcaaatgcatttataggagaacttctactcttttttattttctttttgagacagagtctcgctcttgcgctcttgtcgcccaagctggagtgcagtggcgtgatcttggctcatcgcaacctccgcctcccgggttcaagcaattctcctgcctcagcctctacactgggattacaggcgcctgccaccacgcccagctaatttttgtactgtttttttagtagagacagagtctcgccatgttggccaggctggtttcgaactcctgacctcacgtgatctgcccaccttggcctcccaaagtgctgggactactggtgtgagccactgcgcccggccaagaacttctgctcttaaggaggggaaagaaatgtacactgttaggaacactttacctgtttctgtgctcttgctaccttcagaaaattgctaagtctaacttctatgctgtgtctaataagaagacactgttgagcagtaattcttacagataaccttatttatattttaaaatttttgtgatacattgaagtgtttaatctttgcttttcatgtctatttttttctttgtggtttcttctattccttttgagatcagaaacttctcctctgttatgggctgaattgtgtactgccagaattcacatgttgaagtcctaacccccagtacctcagaatgtgccagtatttggagatggagtctttaaagaggtaattaagtaaaatgaggtgatcagggtgggccctaattctatatgagtggtgtccttataagaagaggagatcaagacacaggcacagaaggaagaccatgtgaagacagggagaagatagccatctataaaccacaaagagaggcctcaaaagaaaccaaccctgtgaacactttgaactcagacttctagtctccagaattgtgagcaattaagtatctgttgtttaagccacccaagccacccagtctttggtactttgttgtggcagcctcaggagactaagacattgtgtaagagtaaatcctggtgactccagcattgctatagagcttctatccatggtcctataagggcagtttataaacatactaaagtaattataaagaaactataaacttcataaattcatccaacaaacatttatttagcttgtcctgcacatcaggtactgatctaaatagcaaggacaaaaagatgagcccctaatagctcaaaataaataagatcccacatcaccctcaagggattcatagtttagaggaaacaggcacatacagagtgaatttcagtatgatgtgatcactggtaagactgtggtatacacagtgtgggtaaggaccagagcctgtggaaaatccactgggacccaagagggctgtcagactggaggccacagctaacctagttctttaaggaaaagtcagtgtagcagatgaatgaagagagacatttcagtgacaggaatgccatagacaaaggcagagaaatgggaaagtatctagcatgtcagttgatgactgagcgttcagggtaactgcagttagaatgtgtatgaaaaaggatgggaggagagattgaaaacttggattttaacctgaaagtagtgggaagccaccagagatttttatagagaaaagtcgtgatcagactttgctttaagcatggtctttccagtagtacaaagaatgaaacagtatggggagaggtgggctgcagaaaggctggatagcagggagaagcaggggagcctgaattgaggcggtggtaccgggtggagaagggcagtcctgctttagagatattccagaggtgaaactgaataggtctgctaacctacattgtgaaaccgttaacacttgcatatgtactaacaactgaaaagcacttccaaacataaagcactatacaatatttacttgtttttgtttttcctatattagatgtataaatgctattgcttctttcaacatatagacttgccaatttaatacacaatattttatttactttttaagaattaaattcaaaggagctacattttcttgtgttttgcttaaatttgggaagaattgttcctctaaaaagtacagtataattggatacagttaaataaattttatctcatcagagcgtgtccagtatttttgtgatttttcctagttggacttgctagaaagccgtctatttgaagcaagggaaagtctggaagaacacactcttctggatctaatctaagttttctcactacccacctatcatgagtacctttttcagtctctctaggccaagggtttcttatttaaaaggaccaagagactccttgatccctaagattcctgctaagattctgtacctctttcctcccaaaagaatgactggtcttgaattctaaaatgcaatttttgtgagtgtgttttaaaaagaagactgcatttcgctgaaaaatcttccttggaaagtatataaatcttattagacgcctttgagagtcattaaaagaactgaagcatcatgcacgtttaaaacattaccaggctggatggagtacgaaggcactcaggggaaggtacttaaacctccgtaggttcaaccaagtcttaccgggagtaacccaacgaacaagtgatgctttttgagacaaatttggagagttggctgcaggaaaattaacaagccagtggatttccttttcccttccttaggaaacttgtttctgtagatgcaaaaagggccctagatcctctggaagagaaagagagtggggaggggaagtttctctttctttactccccacctgcggtctgtctgatttcctctccagctctgtctgataaggaattgattctccccctcctcttccccctcccgccctccctctccttctccctgagtaacgatgctgtcctagcaagtgatgctgtcggagacaggagacgggcgccgaggaggcatcgccgccgccgcggggctggagagcctctcccagcaccagagccccgctcggccccgggcttcctcgtcgcagccacggccgcggcagctgctcccacggtttgatggtgggcggcggcagctcggcttcggcgctagcctctaactgctggatcgcgggccgcgacgctctccgctcctgccttcccgccctgggccgcccggggccccggaagccgcgggaggtggtgaaggggcgccgcgggaagactgcactgccgcgaaggcggaggaggccggcagccggcacccccacactcggaccgcagccggcgcgatgtccaccaaggtcaggaagtgcaaagaacaagcaagggtgaccttcccggcgccggaggaggaggaagacgagggcgaggacgagggcgcggagccgcagcgccgccgccggggctggaggggcgtcaacggggggctggagccgcgctcggcgccctcgcagcgggagccgcacggctactgcccgccgcccttctcccacgggccggacctgtgagtaccgggcccggccgcggcccgcgcctcggagggcggtgccgggcggggggcgggaaggcgcgcgccgggcggctccacgtcgagcccgggacctccgagacccacatggtacggccaggcagttcgatttggagtgatttggaggggacagacctcggccggaggctcgccccctcggtcccgcgcggtggagggacacaggggctgccgagtgcgtggcaggggctctgtccaggctcaagcacacggaacagcccgcaggcgggcacactgacttcagacaagcatcctggcgagcagccactccctgtattagagccgaggagctcgcacgactgctgccagggctgggcaccccttggaagacggaccccggggtcccgagcttacccagggaggccgaggaaggggaagatgtgcacagacccaggcgcgcacttgaaccctgaactcctcccgggcgtcccagcgtggacttgggtcccctccgacgctctgggacgtcgggggcgggggcagagaagtggggagtagggaggggacagtgcgatacagggtgtgggttgaaggtttgcccaggcgcctcgtctctctgtggttcagtcacatttggggtaaaactggaaccgaagccctatagggtcccctgagggagagagtgggcatcgggcagccggggaaccgctttagtgataactttgactg

SEQ ID NO: 10269 - DNA, 6000 bp, Homo sapiens
tgggttaaagtcatcatttgttctccatcaatcagttgtttgatgcttatcaacatttctcttgaaatgccacatcaacatttggacagaaaagataaggtaactaaaaggactattaatgaatccctgtttctaaaagttcagtatcattgccaatgtatagacagtaagaaaactttaaaactagaagtttttcacttgaatcaaccttaaaaacagataagtttggtaaagcattcatatttattaatcatttaaattgcaaaattatattagaatttatatctaattgagttagaagataatatggcattgtctgatagggcatatagatttacagtttcatagatttacagaaagctttgaaaagaagaaagagattatgagtttattttagaagggagggaagagggaaggaaaaggaaaggaagggaagggaagaagaaagggagagatgaagagaggaaggaaggaaggaaagaaggaaggaagggaggggaggggagggaaggcgaaggaagggaagggagagatataagctattactgaggataagattttcactagtgtcacagacaaaatagtttgacagagcggtaagtggtaagtcagtgtgaagttgacctgaaaaaaatgaggtcaagataaggccagcgtaaatatgttatacaggaatatgtaatttaagtattttttcaaagcttatttaaaagtcaaaacatgtgctttctaagtttaagccttccaacaaatattagtacaacttctggaactcaattttcccatcattgtctagaaaaccaagacactgaatgagaaagcccctgaagcctcaatgagctctgaacttctttgatgtgctgagtacaaaagttactctttcagtccctcaaccaaagggaatttatgtttttcacatctgcaaataaatatcccaattacaattttacagccatttatcacaactacttgcatctatagatgatcagtctttgccttttaacagttttcctttcatgctcatattaaggttgaaatgtacttggaatcttttgtgtgactagccatatttgtaatatgaataatataatcataaataattagaaataatgatcagaatttattgtgtcccattttgatgatattattttaaaaaccaactcttttaagtttcaaataagttgactcataaattcatagatctttatactaaaacaaaataaaactcatgagtcattaaaatataattgaacagttcgttaaaattgaccaatgtaagttgatttactgctgttataacaatgagcagctgatttttaaaatttaagcattggtattcttagcagttttaacagtgaaaatgaaataattatatgttccaagaatttctattctattaccttgctttctttccacaattgtgcatgattgaagcagtcagcatttgtagtttcccctccaatgcaaatcagtttttctcaaaaattctgcttttcaaagaaaaataggcatattagtttaaatcttggggtagttcagataatctatcatttcttcaaataattgatgttcaaatcatgatcgatgcctgaatgaagtaacagtctccaccttggaagaataaactcaacaaacatgatttacttacattttattttaaatagttaatcatttgttataaaactttagttaatgagggtattttcctgccaatacatgccagaatttcacaaggtttgaatttaagtacagtgggccaggtacatcacttatttccatataataaggcttgaattaaagttaagcagccttaatgagaccaacagatagctgtcattaaaacatttaatatgcacagctagtgaattcatattttttcttctggaatttaacatctaactcacacattataaatatttgtatccagctaactacatattacattatgacagacaattttctaaagtagtagaaaatatagttaatatatatttattatatatttattaattaggaatcattgaatgtagaaattatttcaacagtaaaaagactgattgttattcttgaaaaatcaaacagccaatgttaaatttatactaactttcttgtgtaacttttggaaagccaaaacttgttgttctactgtttcttctgattggcaggagtggtcattataccttaagggctttttttgatgtgtcacccagactcatttaaatgtctgagtattagaacagtgattctgaactatggctgcatagcagagccctgtatagaggcttttagaatatattacaggctgtgtcccaaactccagagattctgattaaattagccttaagtgaccattttaaaaagcttctcagattatttcaaagtgaatctacatttgaaaactactaaactggaggatttgggaataatgaaaatgctttgctcacagtacactaaaacatttccaagaggggaaatagtatgaatatgactatacaatatttgactttctccaggacagatactcattagccaggactggactagttaatgctctgaagttcttcctagttatcttattctaagatatcatggtgttctttccatgttaaatggttataatttttcttgatagaatacataatgacttaccaatttttagaatgtcactgtaaataatatttgaaggaagctatggggagtgcatctcttctttcaattcattatctgaataagcaaagtataatctatggaattgcatcaaaacactttataaagtaaaatgacattaacaccaacattaatataatcaatattgagtcaatgtctactaatggaaacaaaagataagagaatgatcaaaattgagagtaattaatcagtgaatgcttcttggaagcactggtttgttccagattcagaaggaagtgatgaaattcaagtcaacaaaggggttctctgtaaaatgctgtgttgaataaaatgtgaatgagctttggttttcactctcaaggcatttatgatctaacttagtagtagttctgtctaactctaatacaaaatagggtgtgttacgacagcatagaagatagatggatttattccacattaaaggactggacactacttcatgggcaaaaggaatttgaactagcccttgagatggtgaaggagagtggttgggaggacaaatacgtgctttccaagcagaaatattaacataagtaaaaatatggcagcaaaacattttctggaatgttcaggaaaaagtgtacaagatgaatgaaaacagccagaagtgagaatgtacaactgtgtctggaaaaatagtaacccaattcagaaggctagagagaagggctcaagtgagggaacgggaggaaaagaggtttgccaaacttggaggtaaggctttgaaaggttgtgtaatgagcttgacatccacacatccaacattcctaaagaattccaattataactgagacaatattatgacattaatacctgacctcgactagtcactcgattgtgttaacaaatcttcagtttgcaatgaggccagattgacataagtcaatcattataagaaaagaagtcacaatgatcaggattttatcttaaggaataagcttgcagaaaatcctttcactggagactgagaggctgtcattcaggacttcctcagctttttccatggaagagagtacccaacttcctcattcggaatttatctacataggttattaagctactcaatgaaatattttgaccaaatgtttatgaaaaatttttctgttttatttaattattctgcttttttattttaatttcaagatcttttctatcctgatagagaagaatttctatcaatagaaaggatttcaggaacctttctctatcctgattgcctaaaaaatacactggagacagaaaaaaaaaatcattgtataaaaggtaattagcacgttctctcctttttataactttataattgaaatctcattaaaagctttctaggtctgtatttccctaagtgaccaggtgtccctaatttgttttcaaccaatgtgactaattccaggcaaagactagaaaaagtctgatacctgttagagaatagcaaggttaaataagtggggtggcttttttaggttgcatttaacctcgtaaaataaagaaaggaaaaaaaaagcttcaatgtctttttacagtcctgcctttttctcagtcccggttgaagattccatgggaaatgagagcactattttgtttctcccttgtattgcagatagggggaggaggtggttattagagagaagctcttcctctcttggtttccccctctctccgcctgacagcaccgctctctcgcaggctcgctccttctcctaggtgatccatttctaggcaacgtggggctggtgctgaagctgccaggctcgctccttgcttcctgcatcccgccaggcgaaacgctccaaaagcatcctgcagcctgcggcggcttccctcctctggcccggccccgctgctcgcgcccggcgcaacccccccgccaccgcgccccagcaaaccggctccccgggcccgcctcgccaagctgcgttccgcgcctcacgcagaaagggaattttctctgcattactatctgcattaccttgaagttcactttttctacccctcttggagagggcttttttcccccctccctggtggaatctggctgctccgtttggaatctcctaatctttcctttccacttagattctggcagcgaagaccagtgattctctgcgggctgtaggggcgggggcgggggtcttttttggtccgagagggtgcggggaagggggcacatccggcgtgaggggggtgttggaagttgcagcggagctgggaccggagacccgcggcccccgcgcagcgatgggtctgatctgagccccagcctctccccctgcccaagagcagtagaggctggatatatttttcaaaagccaaactgcaaacaactctggcgatgccaaaattcccctccaagtgacacggctttgcgaaggaggtttcctcaggctgggctctttctgtcattcccttctgcctttctcggcgacgataaaaggctttgctctggcaataggaatttagaaaaaaagaaaaagctgcgctaaactccaccgtgacctcaaactctttggactgtttgaaaaaaaaaaaattggaagaaaatccatcctccaagagaatcggcataggaggagatggaagttttcccctttctcttggttttgtccgtctggtggtctcgaacctgggactcggcgaatgcggattcgatcattcacatcggtaagaaagtgttggtgcagctcgtggttacttttaccgtttcagttctcaaatgtttccccttcgctttccccctctccggtctctgtgtgtcttgttggaggtggcttcagttcattgccccttcccgctacccttccctcacacttgctcagttttctgaaaggatgtggatgctcgaacctcgactgacttgtgctgttgttttgcagtgattcgtggaatgtggctggatgcgtgggggtctcgagttgacctgagtgtgagtgtgtgctgggaactgcagggggattctaagtgtgtggggaaagggagtttaattgactcttatcttccatattttttttcccggatgtacatttgctccatttaaaaatttatctttgggggagcagagaagctgtcacctgtgagatgaaaagaactgggctggggggtagggggagctcccttcggatcgaacaggtggttttgcaacgtgagccggctgagttcgccgcagcttagtgcgatggtgacgggggtgccggatgcgcccccagccaccctctcttctcacatcttcttggctttatgatccttgcgtgtagtctttgagacggtggcaggaggggctggcggcagtgtcgccaaggactgattgtcgcgtgcctc

SEQ ID NO: 10270 - DNA, 6000 bp, Homo sapiens
gcaaaggatatagtggtggagctttccaagcagacaagcagaggaagcaaaatgtgtgaagccctaaggtgatgagaagaagcttccctgtgaacaaaaaaacctaaaagggccaatgtgacttgagggtacagaataggaaagttgagcctcagaaacttgcaagatcattggactttggaaagcaaaactcaccaaaaccatttaatcagagaaatgatttggtttgaatttttgtctatagccttaacatttcatgctttccactgttgtgatcatctccttaaaaaacatacattacattacatttgaatgtccctgtaccaggactaaagcatggccagtttgcctatttctactctcttcgtaattgatacagatcattcaaaagtcaaattgatcaataatgtccaaaaccgttgtcagcattacaacgatgaccacttgtttcatgctgtgtttatcttgacattcattttagatttgggtttgtggagaaaaattagcttctctgatactttgctctctagagctggcaataatgtccctttggactaaattataaacatttcacggtccttaggataggaatgttattttacatatccatgtaagaattcttttatatgcttttaaatattcttttgaaatgtatgtagtactataaactctaggtgtatttatttgaatatagacatatgaatataaaatctcagatgttaaacagtttgagatgtttaatgttttattaaaaagacaaaaacatagcctttgtaggaatagaattctgacttgtcatggactaaagatactttggtttcatgcttcttaacattctgtggttttattttttactattgacaaaaatgaggtaataatttttgtttagtgacttcctgaaagagaatcatttattaagcgttaatatgtattattactttttatgagagaaatattatctaattttgataattatattttatcaaaaatgacttattttggcacatcaacaaacctagcagataaaattccacgtttttccctgaatcagatcataataccattaattttacacttgcattatttgtattaattaaataattacttatttgtgcttattaggttattaccattggaaaacatgttaaagggtaccactacatcattgcaaatctggtaggtgaattaattggtatatattattttactagatatgcttatttattaaaaatttaattttgaatggccagcatttatcagtggtgttttaaaaaatacagtttgattgtaattagccaggtgtagtggtgggcacctgtaatcccagctacttgggaggctgaggcaggaaaattgcttgaatccagaaggcggaggttgcagtgagctgagatcccaccattgtactccagcctagtgacaagagacaaaccctgtctcagaaaataataataataaatatagcttgattatatttgatatattagatatattgctgcaattatgttttagaattgcttcccactttgcatcttctaatcaatttcttattattataaatgatataagaatttatagaacaatatttgacaagcttcataaattgtcttagatgctgtattttaagaaaagggaaaattctcaaaaatatttaaagtttaattgtccacatattcccttgtctctgtttttcactgtctctattttttataaactctgccctctgcatattcctttaatttttagcatatataatatctgaaataaatgtaaatttgtgagaatatgtcttagtatgaaattaaacctgaaaaaatctagaatattgagatattatgcattatttatgacttcctacttactatgtaagcaaccaaatgaaaattaaatttctgtagccaatcatctttttattatgattcctgtcaaaataaggaccacttaatcacggcttcttgggtttgtgttttctctgggccgtggtcactcatattggctcagaataaaccttttacaattaaaaaagaaggtagtatactgaagcaacagagtagttaattctatttccctcttttaagcatcatcagagtcaatttagaattatcactagaaatttcttttttcaaaataatttaagcctttactgctacagagtttaatgttatttaaataattaagatgctatgtgattcaggatcactatacctctacacccctgtctcacccaagaacaagaaaaaaaggtgagagaaagagggagagaggcagagagcttattttaaatagcataataggactttgaaaagcttttgacatatacaaatttaatgattcctagtgtatcacattgttacatcagaagacattagttctagtggtgacagaaagagataaaacaaaacaatacaacatttacagccttccaactgataaatgttgttttcactagaagttgaaggaatttagaatatgaaatctcaaaactgcatgctattgggttgctcaagacaaaatttctgtttggcaatgaaatgggtaactactataaaaattctctaggactttcctttagagtgtattaagatgctaaggactccctgaagagaaacaagagttaaactagatgaagctctgtattcagtctctccagaaccacattatgtgcaggaaacagcctggacagtcagtcccctgtgtgaatcgtgccatttgatgaacaacacagagccacattgaaagctgtgatctttaaaaatgtacagatggagaagattatatttgaacattgagaaataatgacagaaggtggctcctcaatttgagagctgatatctgatgctattaaaatgaaaataagtgtttgaatgaccaaattaaaaagaaaaagaaaaagcaagttcatgctgctgtcatgcttcttgagagaaaatctacctaatattttatctgaattcaagtcttgtttttctttttctcaatacttggtttctttgccatatggaacttctagtgaatcaataagttcgaaaggctgtatagtgttgcaatttctgagaatttggaggacacttggaaattttactgacattcaaaattaaacaatgccacccgaagttgaagggctttcatcttccaaactcttgagactttccttttcttccccctgtcaggttgtaatgagttctataataggtgtttatagaagattttttaaaaatctgcagataatattattgattaatttccttaggaattgctgaatgcttgattgggctcctaaaacacagtgtataattaagtcccttacaacagcactgaaaagggtaacttgtaaataaggtgatgaagaagtggtcataaggaaatccagttctcatttctccaaccttactacccttatagatttaattctttaaaaagccatggttccataatgaattccagcattaagaaaggggtctcctagaaattaaaaattcaagaaaaagttgaaacaaattacctgatatgtttgaatattttattttctaaaaagctttattcataggcatgaaatgttttcatggaagcactggaaaaaatggggataagcatatagaaatctctagcattgaaaaaatgggacatgattataaacatgggctgagatcatgttcgagaaagaaaatgcaattctagtacactatttggctttgctctgaataacatttagagttataagtactgattaaaatgggtgagaagataaatggttttgtcatgtaagcaaattacatactcatgtgggatacacaaaaactcaataaaatttcaaaaattgataaattaagaaagagcagtaaaagtgtcatgcagaagtaagaggtaaatatgtgaaaagcaaatatattaaaattgaatgttttgaagcaacttaactggaacatacctacggtaaaacagaatatatgatttttgttatatacctttttgcactatttgcattatcttgataaacagaaacaaaattgtgagccaataaaaagtaattaccttctccttcagctaaataatataataatatgcatgttttaatatcaataacaaagaaaagattctcctaagttttggggtgtggtaattcaaaattaatttaggatacttttaacttttgtgtacaataagataaatatttgtgaaatgtgaaaacatttataattgtgatatatggaaattaatttcatctttgagagagatatactatcaagttgataaaattcatgtcagcacaatatttgaaatcaatgtaaatatcacataatagttttagtaatgactgaattcattgcaataacacaagataaatttttttttaagatttaatatattctataaaattagcttctggctgaatgtgaaattgtttaattgttctcaaataatgactggacatttagtacctcattttgaagatgttcctatcacctgagtgaagaagtaattcaaacaggagtaacttgctcacaaggttgtagttcttcgagaactactttaatgttattaagtgtctgtaaccacatggtggttctccgctgtagaccaagtaagtaaaacctagtccttatcaatggaagatttctcaatagagtggagaacatttatgtaggtacaaccatgagtgtttcatgagatgatccatcagtaaacgtgtattgattagggaaccactatgatgctaatgtggggttaggtgctgatgaagaacactggctgataaatacatgggacattttctgcaggcttattatatctcatatgttctttgaaatatctaaaaccacaatgtatagagttatttggtaaatgttaagtagcattttgttctcaaacaaaaagcgtgatatcaatgtgttctatgtttagggatttactgatggagacctattaaaaatccagtttggaggtgcaaatgtctctggatttcagatagtggactatgatgattcgttggtatctaaatttatagaaagatggtcaacactggaagaaaaagaataccctggagctcacacaacaacaattaaggtttgctttggtttctgtcttttctttttctttcatatgtgaggagagagaagagtcttggcaaataaggaggaaggagaaaataataaagggagtagagagcacgtttcaaaatatggcaaacatattgactgctaaatatatttttcacatttttatggtttaagtaaagctattagagctttactgtattactcttgtgttttctacttccgtacacctatgataatttataataaataaattcattcatttattaatccatttggcatttttattgagtggattctgagccagacacttttttggcaaataagacagggataatgtccctgctcacagttgaatggaataaagacaaaagcattgacagaagaatgccacgagggaagagaacagaaaactcttagcgacatggagggggtagggaatttttaagctgagacctgaagaataagggacaattttaccctgactgctgtttagaatattatgtttgcaaataaattaaagaacaataggtgtcagtttgttcctaatcttcaaaaagccaacttgcagacagttcttagttcagtcaataaacgtatggccacaaagagagagagagagaaagagagagagtgagaaagagagagagagagtgtgtgtgtgtgtgtgtgtgtgtgtgtgtgtgtgtgtgtataaaataacagttgatgagtagcctggtctcttgaacactttaaaaagaagataaaaatctcaatttgccttaataattaaaacataactgtaatgctttatgcaatcaaacaaaaaattcttgaacgctaaatattatttgttcctcaggtataagagctacacagactgatctttgttctccatgggtttggacacaatgagatcttcacttgtttatttgatgcattttattgggtatacacatgcgtg

SEQ ID NO: 10271 - DNA, 6000 bp, Homo sapiens
ataaaggaattgctggggctgggtaatttattttaaaaaataaaaatgtttagttgggtcacagttctgcaggctgtatgggagacatggtaccagcatctgcttggcttctagtgaggcctaaggaagcttttatttaaagcaaagggggagcaggcatgtcatatgatgagagagggagcaagagaaatgtcaggctcttttaaacaaccagatgtcacagtaagtaatagagtgagaattcactcattactatggggaggttattgagccattcgtgagggatccaccccatgaccaaaacccctcccaccaggccccacattcaccatgggggatcacatttcaacatgagatttggaggggacaagcatccaaattgtatcaggtagttatggtatataggtcatttgacttttgtgaaaattaaaatgagctactatgtgtctggcaagtagtaaacatcatataattgtggctatcttgtgtgcttgtgattagcatctattattggaagaaggaatgtactgcatggtatttctagagaccattgcttctcaactaggagtgcttttggccccaggggacatttggcctggtctccatttttgatagtcccaactccagactaggggactgcttctagcatctagtaggtggaggccagagattcttctaagcatcttatcatgagtatgtcattccccacagtgaagaattacccagtcccaaatatcagtagtgtggcaattgagaaaccctgctctgtatggaaaaaataatttgaatcttaagtatgaatttaaatttttacagaatgcttaaattataatttataggtgagagagggtttcctcatttcaaccacatgcatataagctatccctccatggtaaggcatatatgtaagatttatgcattcatatcaccttccccattctgcccaagtaattggctcttgtgatctaagcaattttaaaccatccattttttttttgtatatgagaaggtatacattattagcactttatgtaatgagtattcaattggattatgtagatagtttgctttttttttttagacttcagagtgaatagaacaagaaatcttatgatcagcagtcattatagacatatttgcagatacattttatatgcaacagtgatgtgttattacaactattgaaatagaagactttgtggccaactttcccaaccatttacattgttttcagtagtgcattggaagtgttcttcccatcccagtggtcctctttttcttttgatgttttattgatgcaaagagacagttctgaccttcatataatctgcaaggatttttctttttatttaacaaaagaaatcacaaaattaaatgtactacaagttgaatatccataatctgaaaacttaagatccgaaatgctgcagaatataaacatttttgaataagtgaagacttgccatttttgattgctggtgtttttaaacagataacaggtattctggtgacactgctgtgctccttggttaccctgaacatattatgttttcactgcattaacaatatgccatatattttactgttaagtacttatgtgtgaataaatgtaagaaaataaatgcttattaatagcatataaattcagagtcaggaatgataatgatgccaaacaaccacagattgtccacatgggtggttgagattgggacacctttgctttctgatggttcagtgtacacaaactttgtttcaggcgcaaaattattaaaatattttataaagtcaccttcaggctatacgtataaggtatatatgaaacataaacaaattttagatttaggcttggaactcatccccaagctataaaatagcttctatctgcaaatacgtatgcaaatattccaaaatccaaaaaaaatctgaaatctaaaacacttgtagtctcaagcgtttcagataacagacattcggccttatgtatctgagattgtttagaaatcgtagccttccccaaaagcagttttgtgcatatgcttaagtttatagggtaatatggtccctttaaaattctgaataaccaagagactacagggactgttgcccaaagaggagagataatgcttccagctacacagttgttacatttcattgtgagcaatattatcatataagagcctcttttaatgaaaatattaacacaaaactctgccaaaggagctatttttaaaaagtgcatgtgtcatatatatagatataatctataaatgtacagacataaatatgtatatatttagtttaattaaatttaaacataattctgtatctgaagattttttccttcttttctttgttgtattagtcagctatggctgcatcaatgctgtgtaacaaactgtcccaaaacacagtgggcttgcaattccaagtatttatcttcagattcacaggtctgtatgtgacttggttcagctgatctagactgggttctgctgggagactcagttgaacagcagattttggcatttctactccacattcatttgtcctagtgcccagtctcaggggcatggtttgatcacagtggatcaccacagcacaagagccaagccaaacccagcaatatgaatgtgatgaggaaatatttttttccgtggtagaaaggaagagaaattggagtagatatttgtaaaataacatttcctattatcataccttctctttatttcagataagaataaattttctctttcttctggagtttttagttctgccccttgaaacctccagaatggagaccagttaccagaaacgtcaacccagatctgcagagccccattcagcttgatgttctatggtacacatctatgttttcccacattataatgatatgttaatgtatgcatggatatggttaacttgttagagacaataatttaattatagactcagacattccacaacataaacaacttatcatggaaggaagacataagaatggctcaaacattcagatttagtatgagtataattatgaaataatatgccaattaggaaatgcaaataccttttaagaaaaacaaacattttagaatatgttatgtcttctcctagaaagcatacattagtgaatcagagaggaaaaagaatatacaatctttcggttcatggcaagttagtttctgtttctctctcttcgaattacatctatctgtcttggtctcttgctatctctgatttattttctttgctttatatgaactagggctcaaactccctgtgaagagtcaactttttgcttttccttagtttagactacccattcaatataaatcttgtaatcctgatagaaagtctgtgagaattctaagaattctaagaatggcccccaataacccctcacccttgcaaaataattgtgggtagaacctaagaatatggtgaaatgtcattgctatgattataggtccccaatgattgaccttcaaatagcaaaattatgtgagtgggtctaatctaatcttgtgattaaatctagtcctataattcctttattatccaagaagagatcctgatcaaaaccccaataaagggttcttaggtctcgcataagaaagaattcaaggcaagtccatagagtaaagtgaaagcaagtgttggtgggagtgtacattagttcaaccattgtggaagacagtgtggcaattcctgaaggatctagaactagaaataccatttgacccagcaatcccattactgggtatataccttagagattataaatcattctaccataaagacacacgcacacgtatgtttattgcagcactattcacaatagcaaagacttggaaccaacccaaatgtccatcagtgatagactgaataaagaaaatgggcacatatacaccatggaatactatgcagccataaaaaaggatgagttcatgtcctttgcagggatatggatgaagctggaaaccatcattctcagcaaactaacacaggaacagaaaaccaaacactacgtgttctccctcataagtgggagttgaacaatgagaacacatggacacagggaggggaatatctctcaccgggcctgtcgtgggtttgggggctaggggagggagagcattaggacaaatacctaatgtaggtgacaggttgatgggtgcagcaaaccaccatggcacgtgtatagccatgtaataaaactgcacgttctgcacatgtaacccagaacttaaagtgtaataataataaaaaaagaaagtaaaggaataaaagaatggctactccatgggcagagcagccccgagggctgctgattgcccttttttatggttcttgattacatgttatccaaggggtggattattaatgagttttccaggaaaggggtggttaattcccagaactgagtgttcctcccctttttagaccatgtagggtaacttcctgacattgtcatgacatttgtaaactgtcatgggagtgtcttttaacatgctaatccattataattagcgtataatgagcagtgaggacgaccagaggtcactctccttgctatcttgcttttggtgggttttgatgtatatcttgtgctgacctcctatttcatcctgtgacttagaatgcctaacctcctgggaatgcagcccagcagatctcagccttattttacccagcccctattcaagatggagtcgttctagttcaaatgcctccgacaacttaaaagtataaagctttctccaaccagtggcagaagaacaagccagaaagatttgaagcaagtttattatgaaagtaaaggaataaaagaatggctactccatgggcagaacagccccaacagctgctggttgcccatttttatgattcttgattacacattaaacaagaggtgaattattcatgagttttccaggaaaagggtgggcaattcccagaactaagggttttgcaaaggacttgatgcacttgaaggtttgaagatggaggctctgtgtgagaaggaatgcagggcagcctctggttgcagagagcagcacccggtttgacagctagcaatgcaattgtgacctcagacctacaatgtcaaggaattggcttctgccaacaaccagaatgagcatgaaagtggattagtccttggaacttccagataagagcccagccagctatacttggatttcagcctgtgagattctcagcagagaacccagtcaagtgtgtccagacgtccaacctacagaactgtgagataataaatagatacttattttaaactactcaatttttggtaatttgttatgtggagctataaagttaatacaatgtcttaaattttttatgtatgtgtttgtgtgtgtgtgtgagagagagagagagagagagaaagagacagagagagaatttctcataggctgactctaggtcagtggtactctatttttcaatgctatgtcagcctgaaataattgaaaggaccagaatccaggtttgaagagtttattcatgcaaaaagctgggaaagaccatccggaaaatatgaactccagagaaatgggatcagtactcagatgttaaaagttaaggtcttgcttatataggcagaaaataaatcaatttaacagtattataacattttttgtacaaggctagtttaggagtcacaacaatttaataaattatggttcgttttcttatccataaaggttatttttatttcctttccaatttaagagtatatttaacattccatcgtagacaatgcggtagtcatgaagtatgtgtgagagaagaaagatggaaggtaatctataatgaaaatcaacacttaaaaggaaaaaggtcttcttccctggcaccctttagtcatttgcaacattttacaagacaatgtaggtaaggaaaaggctaatctgtaatcggagaaacaaaggttacacctgctgactttacaactgtctgcttatgagatttagttca

SEQ ID NO: 10272 - DNA, 6000 bp, Homo sapiens
aggactccccaaaattgctttgaagaaacttctttaaatgggggcgcctgaaacagcctctcaccctcctcagtagttacgtgagaatgcattgcagagaagaaaattttggcaaactgtcacaacagtgtcccttttctctcactgccgcttcatacttatctgctacacacacacacacacacacacacacactcacacggcaggggcacagaactttcttgtatctaacattaatgcagaaagggcgagaaatcttttaaaaagtcactatcaagtgttgggttacttatgctggtgatgtttgtttcattgaatgctttgggtattcctggccactgttacatgagacacatgggaaaatgttatgaccatcagcaagcagctatcagccccactggcttcagatgctttgggatgtgggggaaattgactagtccttcacaagcctttgtttcctcatccataagatggaaatgtaaacccctctcttcctcaaagaggggtatttagaaaggaagattctatgtgttaggcccactgcttgaaaacgtatgtgctccacggagattaagtatcatttagaaatattattgcacctaatcctcacaacacttccctgaaggagggatattggcctcattttgaagaccagcaaaccaaagcttagcaagtttaagtaatccaaacgaggacaaagatttggagccagtatttaggtttcctctttctgttggatgctcttaatatttctcttttaaaagggaattcaaggccctacaggaagaaaatatattggattaatattttagtttgaatccacgctgcgacttgaaggtaagagttgcatatgtagttaagtaactttacttatttagactgcagtgttcttttagctgaaaatgaagggatgagagtggatgctatccaaggtacttatcatccacaccagtgattttaagatattttgggcagggcaaccttcttggctgccttccttgtattgctttcattgttcacgtgggcaggaaccacaaatcatattcacattaaatgctgaagatagagcacagctaatatgtgtgagcatgcagtgctcatggctcaccttaaaaagaagcagtaggaataggacttcctaaaaaaaaagtatggaaatctctcaggctccccaggcagaggaggcatgctggtaacaggaaattgggctctgccagatcagtgagagagcaggtagctttttaggtgagaatatcaatcagattattcattcaacaaccactcactccctcttattcaccaggcaccattctgggattgaggatattatattgaacaagacaaacaaaaatctctaccctcatgggtaggagtttatattgtagcaattctggcagaaggagacacttaataaacaaatatacatgccaggtggtgacaatgctttggaggaaaataacactggttcagagggtagtgattccagggccaggtgagggaggtttttctatatagtacagttagaaagggcctctctgtgataggaattttggaactaagacctaagtcaagtcacttactcatgggaagatatggggataagcactgcaagagagggaaatacaaaggctggagctaatgacataaacatttaaaaaaagaaaaaccctcaggccttgggatgaaaaacataacagcaaaggaacccgtaattttgacatccagaccaagtggaaggactctcactctgatgctcttcaatagttcctgccggcccggcacggttgccaggcacagttgctcacgcctgtaatcccaggactttgggggtccaaggtgggcatatcacctgatgtcgggagttcaaaaccagcctcaccaacatggagaaaccccgtctctactaaaaatacaaaattagctgggtgtggtggtgcatgcctgtaatcccagctactcaggaggctgaggcaggagaattgcttgaacccaggagacggaggttgcggtgagccgagatcgctcaccattgcactccaatgtgggcaacaagagtgaaacaccatctcaagaaaaaaaaaaaaagttcctgcctacatatgtttctcagccccaggtcatcaactttaaatgtgaacacaaagcacttgactatggacattcatatataaggcaagctgaagggctctgcagagttcactgtactagaaaaacaactcccttttgagttccgaggtggtgtgtgtttaagtaatattaatcctgtgaatgaggaggaagaaagatccttgagtttaattaactactagtttggatgcttttcatgttccaaagttaccggagttaatggctaaaacagtgtgtcagccagttgcggtagcccatgcatgtaatcccagcactttgggaggctgagacaggaagatcacttgagctctggaggttaaggctgtagtgagctgtgatcacaccactgctctcaagcctgggctacagagcaaaaccctgtctctctctctcaaaaaaaagaatgtcacaaaacagtgtgggggatcattttgggtataaccttcaccccatgctgataagcacttgtgccaatatttggatttttaattcatttaaagccctgttggataatgggatgaagtaatgggttttgcattaaacacatcagaatttgaagcttggttccgtcattcaccagctgtgtgaccttgagcctgctacttaggttctctgaggctagtgttacacctgcaaatcatcatccctacttttagaatgtctaggaaggagcaatgcattaaagcatctggtgtgtagtaatcacctaatcattgatgacttttattatccagcaaacatctatgaagtaagaagtgccctccatggaggcacagtagtgactatctagattagcaaggcatgatctctgccctctggcagcctaccctttaatggagagaatgtatacccatatggctatcatataatacatcataagtaggaaaagtaccgtaaaaacacaaaaaagagagatttgatccaattctggttgaagtttccatgaaagagttttaagagcttgacaggcagagatggtgtaagaaggtttttctaaatagatagagcaattttagcaaagtcctagaaatggaaaagcccagaatgagtttgggtgaaggaagctgagctgtcaggtagagtgtatcgacaggagtaagaccactgaggtgcaatcctcaaggaggtaccggatcacggagagaaaaggatgctcttcaaaggagcttcaactttgttctgtaggcaaatagggagccatggaaggtttctgattaagagaatgataagaggaggactgcacttcctccagattgattcctctggcaacccagcaaagtctgagtagagcatggagacacttgtgaaaagcacccgaggtggtagtgattgagcactcactcttttctaaaagtgtcactcattaattccctcaacagagtgatgagctaggtgctattatgcctctcttcatagatgaggacattaagacactgagatgttaagtaacttacctaaggtcacacagctagtaagagatcccagcagtctgtccctggagtttatattctaaacttatactccactgcctcaaaagccaaccccaagtgaaggatgccttcattctatcctgctctgcctttttgcctcatttcttttgctctcttcagtcctcagcttgttcatctatgaaataggagactttaattggctttctaagatgctgtctctctcttgtagtttttttaaattctgtatttcattgtggagctaatctatttgggcagtgttaggaggaaagaaaaagatgaaacagtttgtgcaagagagagacaaaaacttccgctttttttcagattttttttttttattctcaaacttttcctggctccaaatttacttacatcattatttataaaggatagaaggacacattaaatactgtatatattttggtgtattgaatggtatgaagtagtgcagaggaggtagctgctaaactctaagatactatgcaaatatgatgaatacttattagtttattattcccatgcttcaaaaagatatgatagttactactcaaaccagaatattagtgctcagtgactgagctttcggataaggtgactcatgggaaagaaagtcaatattgaaggactcccttaagcctcgttgcaatctgcactcagctagttgggacaaaatacacatttggattttccttactggtcaacaatgtttctgaaacagctgaatgcaagttgtcactccacctctcagcgttttcaggtttttctccgtatttcaaggtgcggtgctctgctccctgtctgcagcaggagtccagcccttccttgggttctcttgtttccaaggcaactggccggcccaacaaagccactggtggcggcggcgcggcgcgcagagtcccggggcgcagagccatctcctccgcgccgggcctcatgtttcctcgggacgttcctggtgacctcctgggtcctcgggtgatctgcgccgcgacttcatgcgtggctgtctctctgtgcaagagtgataatgaggaagccgataattccgacaggcccgactttatccggctgctacttctggcctctgctacagcagacaggatgaatgcattttctgtcactcacgccctttttctcagcctctccatctccatctagtctcttttcccttctctctctctctccctctctctcctctgtctctctctctctctctctctgtctctctctctctctctgtctctctctctctctctctctctctctctctctctctcatacgctctcctcctcccctttctccagcagtagccttcttaatgtagtttaatggctttacaaagaaagccaggcagaggagcacttctcagtggctgtggtcggaccatgacctagctgaccatgaacttggaagggcttgaaatgatagcagttctgatcgtcattgtgctttttgttaaattattggaacagtttgggctgattgaagcaggtttagaaggtaagggagtgctttttagtgacttctaaaaattctctgttttgcaatgaaaatgtcttaggtgaatgtaagaggcacctgaaatgagatcagagaaatgttactctgggatggacatgaaggaagccaggtttttcagggtaggaaagattaatgaaataaactttttgtaagttgcagtaatgttttcacaagagaatgttaaaactaggagaaacactttggatcaaaaatgtcagaacaaaaactgaagtaattaagggtttgtaatggatctacctgcttattttgagagtatttagtccatactgatgcttgattattttatctagtacctccttttattgtatcggcaaattttatttgggtatattgtgagatcactcatttcttgctatgcaaatacattgatcaaatggaaataaatagacataatttcttatggtctaaggttggagcctgagaatgacaggcttttcataaagtcttctggagaagtgtttataatgttacctattttacatgctaacagagattctaaggggaaaagactctaactcatataacagactttaacatagattccaggtagccaattgtttttcaagtattgctgtttatgttcattagaggcttgttctcctgttctccttatcaatcacctctttgtttaaacaatacattttgtatttgtccttattgtttcctaaattaaatgtttctctgggaatctgagtaaatttacattataattttctaactgctcagaacacattttgagagtgtgtttgcatacagccagtcattgtttctctaaagttggcagagcaatttttaaaagaagctctagatgatgtttgacgtagttatgtttagatattttccttgcttcaaatttta

SEQ ID NO: 10273 - DNA, 6000 bp, Homo sapiens
aattagtgttaattcttcttttcatgtttgatagaattctccagtgaaaccatgtggtctgaagttttttttaatggaaaattttataaattgtaaattaaatttacttacttaacaggtataaagctattcaaattatctatttaatctttggtgaattattttagtttgtattttttaaggaatttttccatttcatctaattcatgaaaattatgttgtagggctgtttgtagtattcttctcttacggaatgaatatttgtttttcctgctcacaaatttatatgtaaagtcgtaacctctcaatgtgattgtatttggagctgtgacatttggaggtcattgggttttgataaggtcatgaggatagtgtgctcaggatagaattagtgtccttataagaggaggaagataccacctctctctctctttctcctccacgtgaggatgcagagagaagacagcactctccaaggtagaaagagggccctcaccaaaatctgaatattctggcacctcgatcttggacttctcagtctccagaattgtgagaaattaatgtctgttgttttagccacccagactatggtattttgttgtagcagcctgcattgaacaacatatctattatccttttgacatttgtaggttttctagttttatctctcattttaaaaagtatttttagtaggccgggcatggtgactcactcctgtaatcccagcactttgggaggccaacgcaagcagatcatctgaggtcaggagtttgagaccagcctggccaacatggtgaaaccctgtctctactaaaaatataaaaattatctgggtgtggtggcgggcacctgtaatgccagctactcgggaggctgaggcaggagaatcacttgaacccaggaggtagaggttgcagtgagccaagatcatgcccctacactcagccagggtgtcagagtgagactccatctcaaaaaaacaaaacaacaacaaaaatgtatttttaaatgaattaaaacatccatcttaatttttgagtacattatagatatctacattctaatatatctaaagcagatcttttgattctcttaaccctagaagactacagacagtattaatttgtatttatttatatttttaagtttttaattggcaaataatacttggcatatatttatggggtacaatatgatgttttgatatatatggttattgcagaaagattaaatcaagatgattaacaatttgattacctcacctacttatctttctgtggtgagaatggttaaaatctactcttttcacaattttgaaatacacgttattagcagctgtggtcatcgcgttgtacaattgatcaataaaatgtattcctcccgtttagctgaaactttgtaacctttgaccaacatttttactttttccatcagcccttccctctcatcctctggtaaataccattctactctttgttcctatgagttcaacttttctagattccacatataagtgagatcatactatattcgttgttctgtgcttggcttatttgacttagcatagaacatccttgagtttcttccatattatcacaaatgatagaatttcctaatttgtataaggctgaatattattccaatgtgtatatataccacatttttttattcattcatttgttgatggacacttaggttgcttctgtatcttggctattgtgaatcatgatgaaatgaacatggaaatgcagatatctttttgacatactaatttaattttttatatatatccccagaagtagttttgacaaaggtgcccagaacacaccatggggagaggacagtgtcttcaataaaaagtgttgggaaaactggataaccatatgtagaagaatgaaactggacctttatctcacatcatatacaaaaatattaactcaaaatagattaaatacttaaatgtaaaacctggaactgtgatactactgaaatataggagaaaagcttcaggacattggtatggacaatgatttatcatataggaccccaaaagcacagacaataaaacaaaaatagagaaatgaaattgcagcaaactaaaaagcttctgcacagcaaaaaacaaacaaaaaaaaacaacaaaaacacagtgaaaagataacccacaattgggagaaaatatttgcaaaccatacatctgataaggggtaatatccaaaatatgtaagaaactcaaatagctcaatagcaagaaaacaaataatgcattttaaaaagtgggcaaaggacctgaacaggcgtttatcaaaagaagacatacaaatgacccgcaagttcctgaaaaaacattcaacatccctgatcatcaggtaaatgcaaattaaaatcacaatgatctatcactgcatatctgttagaatggctattagccaaaagacaaaagataacaagtatcctaagggtgcagagaaaagggaacctgcatatactgttgttgggaatgtaaattataatagtacagctattttagaatacagtatggagtatctcaaaaaactcaattatcatacgatccagcaatcccatagtatttctatgtcatcaactcattaaatttacccattcagttattcatgtcccaaactaattcattcttaattcttttctttccctcatgtccctattcagtgtaccaaattgtactgattctgttttcaattatatccagaaactgactacctgtatttccactccaggccatgccaccattgtttctcacctgggccactgtgatgccccctcacatgtgttccttcttccactcttgctccctggcagttcatccttttcatagcaggcagatcacacaagtcccctattccctagagtggctttctggcaaagagactgaaatctaaatcccttaccccagctataaggcttcacatactgtagccccggactttatccatgaaaatgtctcccagaagtctctcctggctcagcatgtttcagcagccacacccttctctctgttccttaaggatgccaagctcattcgcagcttggcgtatttgcataagctgtttcctccacccaaggtgccctttaccctaaacatctcacggtcagttccttcttgtaatttaaactcctacttaacttcttttcttagagacctctttcctgacctctcaacctactcactttctattctgccagctggttttaatgttctctcctggttcaacagcacttactcatatgggatatgttcttatttattatttgataacctgatgttttctttgtttaggtgtaagctgcatgagaacagaggctttgcctttctcagttaccactgttttcccagcacatagaaccatgtctggaacataataggtgttcagtatagaattgctacatctatgaataaaagtgctgtgcttaaggttgtccattccctatcttattttactctccaacaagtaaataaaatatgcattctattcccacttttgtagataaggaaatggggtgttcaactaattaaaccaactgttgaactacaattgtgtatttcttctgcctatttcaaacttagggatgccatcactcatggtaaatgtgtaggagaaagaacttcagaaagcacgttgctgatttttgtgtatgagtctatttatatcttaaataatttcaattaaagttctgaaaattcctagaatgcatgctttgttattccatttaaatggttagaatggttagaaccctgagactggtgggaatggggaagagttctagaagagaatgagtttccattcaatgtgtttcagtctatgagtccaggagttctttctttagtgtagaagaacataatttcttatgtagtactgttgggaattatcagtttcaactagaattattgcaactgtcagaaaaagaagccaaaaggcctgtctaggtatttaaaatatggccccatctgtgctaaatctcacagatataatatttatatttattcagaataaacaaaaataaacaaactctaggagtataaattaagagtgtagacaaatcccgaaaactgcctaaggcacttaagaattcaggaaaaccactttttcagagaaggcaagcctgtagttttctggctttcacagcaactgcctctatcccaatgtcttaaaaggaaagtactttgtgaaaattgcaaatccttgcaattgttctggctattaactttaaaaaagttgattggtagggagatggttgtgtttgcctttttgaaatatgaagaaactgaggcacttctttctcttaggacaacgcagtaaattagttttggagctctgttgcctggaggcaatgtaaagggcttaagatttctggtttctaggctactgtgttttaaaggagacaattatgtatcctaatttccaaatacctgagcccgcgctgtgcagaaaatgtagccagttttaagaaacagcttgttttctccctctaagcccatgaagaagaatacatttatccctgacaaaatagcattgtccccatttggtggtaaatcgtcaagtctgtttagaatcagggtcagcttctcaaatgagcctttcccccatgtagccttcctgaatctgattaacactgtgtcaagggagttgtctgatgtctgaccttgagcagcatgcttccctctccccacctcctttttttgggaatcattcattttgtacagcctcgggccctgagattcctccccagcaggctggagtgcactcgcaggttccctttattggtatcggaagggtttcagacccagtgacctgtcatctgtcttctcacctgcttacatgctgattcactgatgagctggcatcgcaggccccgcctccctctgaatggtctgtgaggttgcaactgcttctggagaggggatgccgagccgaaccagagctgggttactacaagtgtgaaccggcagcctgtctgttgccacagaagaacttggtcaccacactgagaagccgtgttttctcacctccctgttactgttgtagctgtatctggcttctctagcattttaaaggaatttctgattgaggcgctaacagctaattccacaggagttgtaaggcagcctgtgcataaactgagacagaagtttctcctcagagactctctttttattattattattattattattggcaaagacttctggctctcctcagaggaataccttgttgcttaagatgagtggctgtagaaagcggtgtaaacgtgaaatactgaaatttgcccagtaccttctcagactattaacaggttctcttcatacaggtaatgactttttttttttttttttttttttttagtagaggctagtagagcatggtaatgaagttgaaatggaataggaaaggctatttctttgttgtgattatttttaatgttgtcaataaaatgcaactgtatttgctgagatttatgtttctaaaaatgtgtgcagtgcagctcttttgggggtagaactgacttctatggatgtattttttttatctcttcaaggcagtgttcttggtaaatttcaggaaacagtatctgcagagtagaaagattttttttttaaatacatgattgtgcaaggggtttttctcttctttcctgattgctgcagtttacttgaaaagcacacagattttcttcctgcagatatttagaaattctctagaactgtttgattattgtaatccatagattatttcccatgtgtttgatcatagggcttggccgggaaagagttaaggatatttcttttggatctctgggttccttgcaaaatgtgagcaaaatatgaaaacagctgaagagtaaaatgtccatgtgaggtttcatatttgtttcattgcagtggatttcaatgtttaaaaattttcatgattgaaatagaaattctatttaaatctaagtgttgatagcaagaaaatattttta

SEQ ID NO: 10274 - DNA, 6000 bp, Homo sapiens
attctaaaatttgaatgttatcattaacgtgttcctcacacatcatttaaggctagccatccattgcatatacagtttaccttgaacaatgtaggagttagtggtgccaatccccaatgtaggcaaaaatccatatataagttttgactccccctcaaaacttaactactaatagtctactgttgactggaagctttgcagatgacataaacagttaattaacacatattctgtatgttatgtgttttatatactgtattcttacaatgaagtaagatacagaaaagaaaatattaagatgatcataaaataatatatatttactatttattaagtggaagtggatcataatagaggtcttcattctcactgatttcatgtcgagtaggctgaggaggaggaagaagagaagaaaggattggtcttcctatctaaggtgtggcagaagaggaagaaaatctatgtataaatgcactcatgcagttcaaatttgtgtgttcaaggatcaactgtattaactatgatctaaggaagaagggagactaaagcagattcctattccatgttgggatgtgacaatatcaaaactatatctcaagtccagaaaccactaagtattatcctttctaccctatgatatatgatatacatatgtcaaaactatacattctgagtgaaataattttctttgtaatttaatgtatgcatatatgttaacgttaatacaatttttatttatttatttaacttaccaaacaccttggccagtcatactcaatgtaaacctagcttttagggaaatatttattcctccagttttattcctaaattttacgtaaagttttacatatatattacttagttacagaagcaatattgaagaaaggcttcaatttgctaaatttacccttgattgatgatgcatgaggatctaaattttatttcagtaactcatggatgcaattagttttatgtgtaatgaggattagataggtcagaaattttgtcccattaagtggactgctgagtaatagagaattttaattccaatcgggcaatgaaggaacactgacactaatgcagtattgtcatgacacattgtggaatgttctcatcaaccttaagccacaggttattaacatgttttctgggaacaactcatgtgttttcagaacttgaaagaataagttgttgatgaatcaataagtagccattaacgtgtattgattatataggtaaccataatttaatttattgatatgcatggcaagctgccctagattgagtgacccctcatccttcttatagattcacagattagatggccatgtattaacacgcatgccatcaggtagctggccttcatggagatgtgtaaattaccagatgcaggacagaattggacttttaatgcaggggtccccaaccctcaggccatggacgagtcgcagtctgtggtctgttaggaatcaggcagcacagcaggagatgagtgtcagtgagcaagcgaagctttgtctgtatttacagctgctcctcattgcttgcattacctcctgagcaccaccttctgtcagattagtggcagcattaaattctcatagacacatgaaccctagtgtgaactgtgcatgtgaagggctctaggttgcatgctccttatgagaatctaatgcctgatgatctgtcactgtctctcatcacctcaaggtgggaccatctagttgcaggaaaacaagctcagggctcccactgattctacattatggtgagtggtatgattgtttcatcgtatagtataatgtaataataatagaaataaagtgcaataaatataatgtgcttgaatcatcccacaactatcccatccaaccctccttgtctgtagaaaaactgtattccactaaaccgatccctggtgctgaaaaggttgggaactgctcttttaatgtctatagattcctattcatcttcatggaaaaatactttagccatgcatatttgatacttctcatatgttttccctttcaacttctgatttgtttttttaaaaaaataattacttgtttaatgtctaacccaacaggtcatgaactttgagaagttaatagtgtgcatttatgcacagttgtatttcagtgctgaatacagtgcctgaaatgtgacaggtagtctacatatttattgaaagagtataactaaaatattaatcagtcatctccctcttttgcataggttgtaacaagattcttctatataaaagtaatttttgctggccttggtgacaaatttttagtacaattttctcacacttttttacttctgagtacacaagtaacattaatgtaataactacaggtcactgttgaaataattcaaataaatacagaattgtaaacggcaagatggaaagacatagatcttcttttcaggcaagtagtaactaaatactatatggggtgctatattgtactgaataacaccctgtgatgctacatgacacaatgtatgtattttattgtcccaccttaacttttgtgggactgtaccttaaaaaacattgacctgaagcctctaatgcagcttcgtttggaagaggtccagagtatataatgttttggtaacatttaagcatatgaaaggcagaaaaaacccttaactaccatgctgttttattagtgtcacttgtctcctattttatatgtcagaagaaaaccaggatacaattgatgtgtccatctaaacagaaaattcctaaaggaaaagcagctccatttgtaacctacattcttgacacattcatttcatcatgcctaattcttaacaccactactatgagttactgagttgcttaatatgtgccacacctgtatcatgccctgccaagcacagggcctttggatatgaagtccacagtctggatggttcaagtgttcaagtgagatgaacttgcttactggccagggctcaggaagggtgtagctggaagggtgagattttccactcccattttgcttgataaatcttccatagaggggaaaattcatggaggcagagagtatagagatattacagatgaaggtgttttaaagagtgagactgcaggatatttggtaaacagcctcgggttcctgttaggtggacatacaggtattagtccattttcatgctgctgataaagatatacccgagactgggaagaaaaatgtttaatggactcacagttccacacggctggggaggcctcacaatcatggcagaggatgaaaggcacttcttacatggtggtggcaagagagaatgaaagcagaaaccccttataaaaccatcagatctcgtggtgctctggtagtgcaccagagcagtctgggggaaacagcccccatgattcaactatctctcaccaggtccctccctcaacacatgggaattatggagagtacaagtcaagatgagatttgggtggagacacagagcccaaccatatcaatacatctagatggagttccaccaacttttgtttggtaatagctttattgaggtataatttacataccatgaagtccacccattgcaaatgtaatatccagtgattctgtatagatttctagagtagtgcaaccattaccacatgtggatgttcaaaaggctgtatgtccttctgccttctcagccctctgttctgcaatgagagtgaactctcacagtgagatcctaatctctacctcttaaaccagtgaaggaatatttttaatttgtggtctttttcttctccattgaattgtagtcatttctctgttgtcaggtaaacattataaatttgttcttagctttgtataaatttgttcttagcgttctaacatttcaggtttcaatatattgtttgttagtgagtggaatggcagtggaatgtgacagaatgaaattgtatgtttaggaatgtaagtgcctgtgtggagggagataataaagttttcattaagtcacaaaattctataacttagttttccttttatatttatgataacatatctataggctgttatatgaatattcaagtaaattttgaatatcttagaattataggtttttaaagtggcagtggtttaaagtcattttctggtctaatttgagcaggtgaaatgttatcccccaaacatgaagcagctgatgctaagagtggctaaatttattcattcaggttttcatcaattatttgatgaatgacttctacaaccaagtcacaggattatttattagtgaggaaaaagaaaaagtgaaatttctgtggtcaactgagctggcttggttgtaactgctaattcagtgtttgttcatcaaatatataatttcacagaatatctacatcacacaaggtcactgtatgatcatgatggagtgagacaaaaacaagaccactctataatcatgtctgatcacaaacaaaacaagaacacaacccaagccatgaaaatgaccatgtgtgctcagctaacatgactgctgtttctttaccatcattttagccttgcattgtccttcttgccttctaaatgaaaactactaagatacccagtcatagaattggccttgcttttcagcattcaacagaaaaatccaattcacagtccccagttgagaggaaaattagatttgtctgaatcttccacaaaatcttctaacacaaagccaaatcttgtaccaagcccctcttaataacctctactgagacctttccttcatggttccacgtggttgctttctcccttgttgcaatgagcctggctttgtttgactgctgatctattccccgtgatctttgcctggagatcaagtactttatgtttggaggtaaaatggatataaagagactttgtctcagttctcatggagcttttattctgttcagagagacagacataagtaagataatttgctaattagtagaaaattgccaatgaaatcagtgctctggagacaggaattgcctgtttgtataacaggggtctggaagcttcactggggaagtgtctattgaactgagaggtaagaaggacagacaaggggaaaggtgggaagggcaaagggaaaggacctgagacagcagatagggtagcattttggagacattgagagaagaccagtagcaatagagggcagggtaatggtgggggttgggcaggtgaggtccagtgttagaggctgaatgttgaaaattgtgatctttttttcaaagagctgaaagaaagccattgaaacatttagggaaggtaatggtgttatcacatcacagtgcattgtacaaagatttttggatgttgtgtgaagaacatattggggaggatccacgttggatgtgggaagactggcccagagggttgtttagatgagaagtgataaaagcttgggtgacaacagaggaagtaagaatggagagttgtagactcttcttggatatattttatagctaaaataaataagactgtataatggattaggatcaaggaagtgggagatagagggaggtgttctggcttgggcaactcaagagatgtcgtgacatttaccggcttgatgcatggcacgtttactacctttactaacgtcaaaaacctgctatatactggaactaaaattcactttgtctgtcttctggagcaggccttcatccctttacttttaacctttgtgtcaaaaatgaagtactagggaagacatggaactgggagaatttcaggaaggttggttcaggaattgatataaggaaattttgaaatataccatcctgttgtgataattggccattttaaagcccctttaaaaaaattccaggatcagtaattttaaagctgactctatcagttgaataggaaggctgttttctgggaatgaaagttggggtgcaatttttgagagagaatgtggtttaggaaatgtgatgatatgtatgatatcttttttagatgttattggaaccgtgtctttatttttgtgcttttt

SEQ ID NO: 10275 - DNA, 6000 bp, Homo sapiens
agggcaataattaagatatgctaagattagggtgccactcaccttctcttccttgccaagtgagagctttggcccctcaatgctctcagtgaggcagagtagtaaggaggaacagatgttagcaagaggcagcaatattagtgtcaaaaatggctcgactttggcaaaaaggactacatttccaactgacccatgggacaagggattggggtcctagtggctctgggatgagaggagctgactgttatccttagacccttctctctgagtctccaatctgtagtcaagaagaaaggatagaaaggggaagccaaggcttcatactgagcctggatgtttttattcctgctaagttcctcatctgaggtgtggattggtttacacaacagagagaattcctataggccactatctgaccccacttcaaaggagctggactgaaggatgatatttgagacacaagcacctgaaccctaatatatttccaaatcctccagacttgtgcttacatgaccctagggcaaatgtgcagatattaccagatgttacttgggccaggaaaggttctatggacaaatacctttggggtcagttgggttacgcaaagttaaacaagactccttgttacaggtcttcgcaaacctatataatttaatattttgtgacaaaactacattaaagttcacagcattttccaaacatctatgggcacaaaattcctttttgcataaaacatctttgagaaattatagcgtaaacataattcacaaagcaaagtacaatattttaaagcttctctatacctattgactctattgactacaaaatggacctaaatagaatatcctctaggcccccaaccatccagtatgtacccatgaaaccaactggctgctggttactttacccttgtcagcacctaatatgaacattttattttgtagcccaaggcaaaatatctgatttcttttttcactttacttgtaaaatgaacagatgtccttcaattctttttttcctcataaattattggggtacaggtggtatttggttacatgagtaagttcttcagtggtgatttgtgagattttgatgtacccatcacccacgtatacactgcacaatatttgtagtcttttatccctctcctgtctcccactcttccccgcaagtccccagagtccattgtatcattcttatgcctttgcgttctcatagcttagctcacacaaatcagtgagaacacacgaggtttggttttccattcttgagttacatcacttagaataatagtctccaatctcattcaggtcactccaaatgccattaattctttcctttttgtggctgagtagtattccattatataaatatatcacagtctctttatccactcattgattgatgggcatttgggttggttccacgattttgcaattgtgaattgtgccgctgtaaacgtgcatgtgcaagtatcttttttgaataatgacttcttttcctttgggcggatgctcagtagcaggattgctagatcaaatggtagttctacttttagttctttaaggaatctccacattgttttccataatggctgtactagttgacattcccacaaggaatgtagaagtgttccctgttcaccgcatccacaccaacatctgttttttgattttttgattatggccattgttggaggagtaaggcagtattgcattgtggttttgatttgcatttccctgatcattagtgatgttgagcattttttcatgtgtgttagccatttgtatatcttcttttgagaattgtccattcatgtctttagcttactttttgatgggattgttggtttttttcttactcatttgagttcgttgtactttctggatattaatcctttgtcagatgtatagattatgaagattttctcccactctgtgggttgtctgtttactctgctgactgttccttttgccatgcaaaagctctttagtttaatgaggtcccagctatttatctttgtttttattgcttttgcttttgcttttgggttcttggtcatgagatccttgcctaagccagtgtctaaaagggtttttccaatgttatcttctagaatttttacagtatctggtcttagatttaagtccttaatccatcttgagttgatttttgtataaggtgagagaagaggacccagtttcattctcctacatgaggctagccaattatcccagcaccatttgttgaaaagggtgtcctttcccccactctgtgtttttgtttgctttgtcaaagatcagttggctgtaagtatttgggtttatttccaaattatctattctgttccactggtctatgtgccaattttcataccagtaccacgctgttttggtgactatggctttatagtataatttgaaatcaggtagtatgatgcctccagatttgttctttttgcttagtcttgctttttctatgaggccatgcgggctcttttttggttccacatgaattttagaattgttttctctaattctgtgaagaataatcatggtattctgtggggattatgttgaatttgtagattgcttttggcagtatggtcattttcacaatattgattctacccatccatgattctacccagcatgggatgtgtttccatttgtttgtgtcacttatggtttctttcaacagtgttttgtagttttccttgtagaggtcttttgactcctttgttaggtatattcctaagtattttatatttttgcagctattgtaaaggggttgagttcttgatttgattctctgtttggtcactgttagtgtatagaagagctactgatttttgtacattaattttctgtccagaaacttcactgaattcttttatcagttctaggagctttctggagaagtccttagggttttcaaggtaaacaatcatgtcatcaacaaacaatgacagtttgacttcctctttaccaatttggatgcccttgttttctttctcttgtctgattgctctggctaggatttctaatactatgttgaagaggagtggtgagagtgggcatccttatcttgtttccattctcagagggaatgctttcaacttttccccactcaatattatgttggctgtgggtgtgtcatagatggcttttattacattaaggtatgtgccttgtatgccaattttgctgagagttttaatcataaaggaatgttggattttgttgaatggttttcagcatctactgagatgatcgtgtgatttttgtttttaattctgtttatgtggtatatcacatttattgacttgcgtatgttaaaccatccctgcattcctggtttgaaacccacttgatcatggtggattatctttttgatatgttgttggattcagctagtgagtattttgttaaggattttaacatctatgttcatcaaggatatcagtctgtagtgttctcttttggttatgtcatttgctggttttgttattagggtgatgcttcatagaatgaattagggaggtttccttctttctctatctccttatatctttcttcagatgtccttccattctgagagtctaaggttctattttttttgtttgtttgattgtttgtttgagacagggtctcatgctgtcacccaaactggactgcagtggtgccatcactgctcactgcagcctcagcctcctgggctcaagcagtcctcccacctccgcctcccaagtagctgtgcaaaatatctgatttcattggaatccttagtgaacattatcagaggctatcttgtagttgcattttacatagggcacaaaactgattattattaaatgacaattccattgtttataactagtggttgttatatagaaacaaattccaggttggactatttgtgatcttctatgtttttctaactataccttaaaaatgctagagatgctggtgaggttgtagagaaaaagggaaacttttacactgttggtgggagtgtgaattagttcaaccattgtggaaggtagtgtggtgattcctcaaagacctagaggcagaaataccatttgacccagcaatctcattaccgggtatatacccaaaggaatataattcattctattataaagatacatgcctgcatatgttcattgcagcactattcacaataggaaagtcacagaatcaacctaaccgcccaccaatgatagactggataaagaaaatgtggtacatatacaccatggaatactatgcagccataaaaaggacagagatcattttatttgcaggcacatagatggagttggaagccattctctacagcaaactaatgcaggaacagaaaaccaaacactgcatgttctcacttgtaagtgggagctgattgatgagaacacatggacactgccagggaacaacacatgctgggcacctgttgggggagggagaggatcaggaagaacagctaatggatgctgggcttcatacctgggcgatgggatgatctgtgcagcaaaccaccatggcacatgtttacccatgtaacaaacctgcacatcctgcacatgtacctctgaacttaaacgttggggaaaaaagaaatatatgttactgttagatttatagagtaatatatattgctacttaaactttttgtttgacgtaatcatataatccactgattatctgaaataaattcctgtgctcttttttgttgtcttaaaacaatgctagggttgtaatatctacattaatgacaagaatatgcaaaaaaatcatatacaagtgttttagcttaatacgcttaaactgggaaatgtaaaggccttataggcattgtgagggtccttcctctgtggacagtcacagacattagcagacatgttcttccgttttcctttgttgctctgtgtaagcatcggtgagcagtggctggtcctaagactctttcttgttttcctccacagacagcgtggaagatgaactggagatggccaccgtcaggcatcggcctgaagcccttgagcttctggaagcccagagcaaatttaccaagaaagagcttcagatcctttacagaggatttaagaatgtaagaactttctttttgactttaccttcacacaattcccagaggagcattgagaaatgagaggaaaagggggaaaatatcccattctatgagagccccatcatatgtatatttcatactgatccttcccagataggaatataatcagtatctgtggactttgattctctgtggcacacccatgctggcatactgtgattgcccattaaacaaagagtttctgagaaagttttattcaattcagttcttggttgaaatattttctcttcatcaactataatgacataatttcattaaacttccattgtttccttagtttttaaatacaggctggtgcttgacttgaatcttgaatgtagattgaggcctatcaagggattccattcctggaattggaggataattactgtaacttttatagtttaaaaaaccatgctgccaatgtctgtaaaccacaggtgtctgtaggtcatcactgtacctggttctctgcaatccaggtgtgcagatgaccctccctcctgggtgaaccatcttcaaaagggaatgagagcccagaaaaccccagagggtggggtgagagaaagtgagtggatccaggctgactatgagacacagtctcttaccaaatactttgtatgtgctaagggttaaactagatgctgcaggttattcaaaagccagagaagatacacttctatccttaaggagcttatggtctgaatagggagagaaaacttgctgtcatgaatctatctgaaaacagttcatccttaaaggcatcaaatgtttatgtatcaaatagcatacacatcccaacatatagtttgttcttatacatatggaaaccaaagtagctacaggcacccctggagatccaaattaaat

SEQ ID NO: 10276 - DNA, 6000 bp, Homo sapiens
ccgactttctgcccagtgattatagttgtttcatccttctcatacaggagagcagaagggaatactttacaaagagaaattcatacatctatcccctgccttgaggcagagagggggaaggtagagagtttttcctgagtctcctatttcagttgccttcaatcgaaaataacccttatgccaaaggacatattttggagtaacattttctgattcccttcataggctaataatcttacatttaaatttgacttaactagtttctatatacattgtgattctatgtatttgaagagagaacaggtagattgtaaatatatcgaattttaacgtttttctcaatcttgctacacttatttttgcatttattataatgtcaacaaacagtatgaagaatatttcttaaccgagactatcacgtggtgaaatttcaaactgaagctataaaaaacaaggaaaaatgatcaatttcaggttttagataaatcatcccatttgagattatttaaaggatcacaatggattggggcaaggaaatgtaaagtctactgaccctctctctttcacagactggtcaattgatttggacatgcgtccttggagtgagtttttactttcctaagagtttctgtcaatactttcctttcagagtctctcaaccagttaaacggccccagttaaagaaccattcaacatggtgcagaggggcctgagagtgaggtggtgaatgataaagtaggcagaacctggtaccgagtatacccacattcaaatcccagttctaccaagtgccatatatgaggcttcaggcaagtggattaacctttgaaagcctgaattttctccttgaaaccaaattatttcagggaactataaaaggattaaattagttaatatctataattttttttttttttttttttttgagatggaatctcgccgtgtcgcccaggctggagtgcagtggtgcgatctcggctcactgcaagctccgtctcccgggttcacgaggtactcctgcctcagcctcccgaatagctgggactacaggcgcccaccaccacgcccggctaattttttttggatttttagtagagacggggtttcaccgtgttagccagtatggtctcaatctcctgacctcgtgatccgcctgcctcggcctcccaaaatgctgggattacaggcatgagccaccgcgcccggccaatatctataaatattttagagtagtgcctgacacttaaaagttctccataaatgttggtagctactatttttggagtaaatcaggtataaatcctggttatgtcccttgttgaatgtaattttgtgaaaattaattaatcccaatgcgccttagtttttattcttctttgaaatagtgataataacacctaacctattgatttggggtgagctgaaactaatttatacatgtaaactacatagtatggtgcctggcttagaatcaatgggtaaaagcctttagtgtacctttggtattcccttctttggtatgaaagacagacctctgctggaggactcattacaatgtaaagaaaggggtgagtcagtgaatgagggagaaagccaggatgttttaatataacaaactgggttggggctagcaagttactgcagtaaaatggttgagccgtgatctggagttacttttttaaatttttaaacattaaaaatagaggtagagtctcactatgttccccagactggtctcaaactcctaagttatcctcccacctaagcctcccaaagcgctatgcaggcaactcttctttccaagagtggcgctagataaacatcattccccagatgtcccctgcttccctagactttttagatgaagcaggaaactcctcttatggtgctgtcaccttacaaaatctcacagctgggggtgcatgtgaaagagcccccgcatacttgggagccagcagattcgatccggtagccacagctgagagacagctcagaaagcatgtggtaaatgtaactaatgcagataggaaagggctggacctccaatcagctggcacattctaagtagagaatgctattgtcctgaagggaaattctatctgaaaccaacaaaatcatattcatgggactttatgtgaatttcaaaaaagataggaatttcaatcctggaaaatgagatgtggcaattttaaaatactttaccaactctctaaactaagagatcaattggcaaatatttgctgaaatctgctgatagaaataaagggaaaagcgtgaatttggaagccagacaaagcaatgattgaattctgggttttctaaccatgtgaccccctctcagtactttagttgttttcaactacaatatggtatgatataggattaaaagacatgtttacatttaacttgacctaattaatttctgtaatttttttttaacttttgactttctgtagctaaacgttggtggaaatttcagaaaatggttacctaaaatattttttttcctactaattactaaaacctgcttccccgccacaggcttgctgatataatggagaagaaaatgtttggatggatgggtgattgggcaggtggatacaaggatatctcttataaatatgttattcaaaatgaaaagcacctttggcaggaccaacttatttctaggactcaagggaaagaaaccacactgtgggttgagatgatcagcaggtcttcatgggaaaaacgctgaaactagaccttggagcaggggtggcaggaccagggaaaagcaaagtcgtttcatccaaggagaccttgcagagcctctgaagagttggaacttccgtcataaccccacaactaccatatgtgagcaggggaccccagggactgggctcagctccccgcagacttagttaattcttacatcaaccatgagaaaggggcagtagcattcccattttaaaccaagattcagagacggagtgtattcttcaaggtcatggagcaagcaagggtaaggctaggattgtacccaggtctaccaacctcaaaacttgagcatggtatactataatacttctagtaatgattcaggttaccattatggacagttaccgcctctataaagtctccttcctgataccactaaaccctttcccaattagagttgactttccctccttgttttcccactgtaccgcgcagacatctgttcaagtgttggtgtatttattggtcacattttacttcatgcctgcctcctcattaaactataagcccccaaaagacagagctgagtattattcatcatttgatcattcatgtaccatttatagctcatagtagcagcttaataaatgctaatgaataactgaatgaatgaaagcctgttgccttccagtcactatgcccactgcttggcaagtcagttaacctcttcatgctttgttttcctcacctacaaagttaaaatgattagaattaacttataatctgccacttatgtggtagattaatttgtctaccacgtagagatgtagggataagtaagttgttgaaaagtcactacaatattgatgagcacatagtaagtgcttagtacatgttaactattattgtgatcacatttaattcccataattccctttaaatggagaactttaaatgaagtattatgatcttgactgcatagaataggacctgttattagagtggttaagtgtcttgcacaagatcacatagcaagaaagaagcagaacttgcaaatgaccctggaggtctgagatattactcacaaacccttatatttccagttcacctacagagtccctgttgattctcttcatctccgtttttaggttgggcttcagtagactggagataaccaacaaagtgattcagccagtgtggtcctggcacagaacagggtctgtttggagtggtttggactagcacacctcatggcatctttgcgatggtgctgtccacacttcccagttgataagagtcacctgggcttcttaataacacacactccaggctcctctgatgagcgtggttttaataaacaaccccaggttgtttttatcatcagggaagtttgtgaaactttgagaaaggctgaggccagactttaaaggacgatggtggtacacaccttccagggggcagttatgaacatcttagttgttaccgggtactgctccgccacgccctccgtccacctttgtaaatataatataaggactaaatcaatctccctgataatgcgcccgacgtgacagcggagaccagaacaaggagtggcgtggcgggggaggctcaggtgttctcgtttgacaaagtcattgaatcacggagctttgctcctgcacttttctccctggaaaagctgcctctagacttccacgggggctttcaggaagggcctgtaggcaccagccaccagaactgattgtttcctagcattcagagagggagctgagctctctgccagaggcggctctgggaggagagagcagcagctttggcaaaaaggggccattcgcaagcttctcaggcagaaaactagcgcgcagacagatctgcccagcctcgcgtcctcagcgagggaagcgcgcggtgttctcccgggcaagtttcctaggagtgtcccttctcgccacggacactgcaaagtctccagttctccgacagacgtttccctcgcagctctgaagtcgaagtactcgcccgctggctgcagcatagagtggagaggtccgtgcgctgtggtagcaggggggaagccccgccagccaaatgccaggatcagcatgagaagctggactttagcccaggtctgtcctcaccccggggggccgccggctttgcagggtgcatctgccaggagctgctcactttttccccttgcaagtctttgttccaagcctgacgttgctacgattctgtaattaactccctccactccaaaggggtctggaggctgggatgctctgccagctcagaggatgttgactctggagtgggagtccgaaggactgcaaacagtgggtattgttgtgattatatgtgcatctctgaagcttcttcatttgctgggactgattgatttttcggaaggtaaagtggtcgctccagtctgtgctgttgggcaggtctggtttagaagtagatacagatgctgcagaagttaagaagccttaatactcaaagtaaaagttttaaaatatgcatgtttggcatagagcatcctagtggctggacagttcattttggtttatctagatatttgatattagaagggaagggatattgtaccattatctttctatttgaaatctacttgggtttagtattttgtgggttaaatatttttctaaggtggggagttaggactctctcctatggggtgataatatgggttggtatttggttgtcaagttcatgttggttaccacaccttaatgtcattagtgatttcatcctatgaaagagtatcttgatttgtgaagagaatatctgtgtgtccctcattagttaggaggtgtgggggtgaacccgggtggtttattatgatataaaatgggtaagcttttgatatgaaattgagttaatgggtgctcagcaaaaatgtgctttgaacatttgatttgcaagtgtttcatttgcattccccagtgagtctcattgctcatgtgtgtcctgagtaggaactcatacacacgagacaggactgttgctatcaataaaaattagatccatctaacataaattttactcttgctatccaaaatgagttttgttattcaaagattggagagttttaagaagttaattaactttgctttaactatttgaatgtatatgtatgtatcaaacacacacacatattgtttatgaaataatgcttttactaaaataatagcctttgaatcatttaaacctaaatcatttgatatcaattctacatgcaatctcctctttcttcctaagtgaaagaatgacgtc

SEQ ID NO: 10277 - DNA, 6000 bp, Homo sapiens
cttttctcttaggtgtatacctaaaagtgtaattgctagaccatatggtaactccatgtttaacatttaatgaattgccagactattttctaaagcaacttcaccatttacattccaccagcagtatatgagtgctacaacttctctacattctctccaacacaaaattatctatctttttgatcatagccattctactgagtatgaagtggtatctcaggtttttgatttgcgcttccctaatagctaatgacattgagcatctttttatgagtttataggccatttgcatatctgctttggagaaataactatccagatcctctgctcattgctcatttttaaattgggttgtctttttattagtgaatcataatagttctttttttttcttgagatgggttcctgctttgtctcccaagctggagtgcagtggcgtgatcatggcttagctccctgcagcctcgaccaccccagcccaagtgattctcccacctcagcctccaaatagctggggccataggcgtgcaccatcacgcctggctaatgttttaattatttgtagagacaaggtctcaacattgctcaggctggtttagaacttttgggattaaatgatcctccttacttggcctcccaaattgctgggattacaggcaagagccatgtcaccaagcctcataatcgtttttaatataatctaggtacaagtcgctaatcagctatatggtttacaaaagttttctcccattctgtgggttattttacaatttcttaatgatgtatttggaagcacaaaagtttggttttgtttttttgtttgtttgtttgtttttgagacaaagtctcgctctgtcacccagactggagtgcagtggcacgatttcagctcactacaacctctgcttcctgggttcaagcgattctcctgcctcagcctcccaggtagctgggattacaggcacccaccaccacgcccagctaatttttgtatttttagtagagatggggtttcaccatgttggccaggctggtctcgaactcctgacctcaagtgatccacccacctgggcctccaaagtgctgggattacaggcatgagccactgtgcccagacaaaagtttttaatttgatgatgtgcaatttatctattttttcttttgttgtttgtgcttttgatgccatatgtaagaaactattatctaagttaataaatatttactatttttctctgaagagttttatagataatttaacttttacattttgggtgtttgatccattttgagttagtttttgtgtatgatacaaggcaggggtccaacttttttctttggcatgtggatatccagttgtcccaacatcctttgttgaaaagactattctttctcctatttaattttcttggcatgaaaacttgatttccaatctgtttagttccagtagtgacatcctcttagttcttttattgtatttttttcctttgtaatttcaactatcatttacccaactctgggtacctgacagtcacctctgatttgaatgaagtttaaacctgagtctgtaggccaatgaagttccattgatgtccacaccctgctgtgacagtagaacagagtagacgtatttacacatactttattttctctaatgacttaaaacagccatcctaattcaaagagaaagctaaggacatgttttcccatttagtcctacatggcacagttattgggaatgtaatgaacatctgccactcaatgttcattatattagaacataatttacttagtaaagttgaggaaaatttgtggcaaaattcaagggaaaaatgtcaaaaaaaaacccacaaacgcttaaaagtgggcatattgggattcctagcatcattcatttagaaggctcattaggaaacaaaagtatcctaagatgacattgcagactctcccaaatctggcacctttagtctccatacatggattcccagtgaaaaacctttactgtagtcaagtcagtctctttgttcctgccaaatatatatgctcctctatcactccactgaccttaaacattcattaaacaatgactaccaagcattcccactagaaagaggtctcctttttatttctatagaattaacccctactttaagatctagctcaacaatgttgatcaccctagctcttagaaacttagctttctctcaaagtccatagttgctgcttgtctatttggcatgacatattagccatcttgttgctactgctgtttagctttcattaagtgcctctataacctagttctctggctcagcacctcacacgtgttacgtattcaatgtacattttgtggaggataaaacctggatcttagggaagttgtccttaaataaccctcttccttctaagtctatcagcagtatagtcatatgacctgaaagattttaaatgatcttgctgacatctgaattctactacagattccgtgacaaagtcatgtggctggaaccggagttccctgccaggggctggcacattgcacttctcacacaatagaaggtgagacgatctgagagccttaaaatcaagcagatgcagattaatgcaatcctcaacttcaatcaagttctgaaccaataaaaatgtgtgatttctagcagtcaggaatgagtggtttttaagaaataaggtagttgggatacgcttgccattatggataaagtgataatatcagggaaaggacacacggtaatctatagactatatcatgcaatattcttctctgtataagtgacttgtttcctgtatcaatgacgttttcaactttgctgatgagttaatgggacacacatgtaaaaaatggattgctctatacaaaacagaggtaacttctggagttccttcagttattacttgtaaataagcagaattgaacctcaaccccatctgaggactaattaggaattacaaaggtgattgctcataaatgaactatcgtcatgctgctgcgcactgatttttaataagaactggttatggcttcatatagaattacacctaaaatgttaatcagaaaagcactgcatttcctccagtttctgttcgctaacttttaaagctgattattatttttactattttccttgctatgttagccctttaattttgtttcagactcatgttcattaagccagagcaagcctgctttatacaaggagaccctgggccttggaagaaataaaaatgcccagtgatgacagtccagataaagctgtgttcattttttacgtttagaagaccatactttaaatcatgactatcactgaaacagatagattcatttattgttgagtcctgctttaccctgagatgttccatgaacactgagaatacattttctttgttctaattccagcctctgaatcagagccaactagagtgggctcttcataaatatgcattgactgcctgagtattaatgtagggcagggctctgattagcaagtgctacctgcaggaagcagaagaaataccacaaatggagataggacgctattagcagattttatttcattttttcctgaggcttggaaataatcacttctctctcaggtcaaacctctccagctctctcccttcaggatgtgaaaagatctcaaataaaaggcctctatgtgaggatctctttcgctggttgctggaggaagagcatgaaatgagggaagaagcaaattgcttctgatttattgtttctggtttattcctttcctgccagttcagcagctcgccagaaacagcacaaaaccttacatcttaacttgaaggtgaagtatttgttttgacaactttttagcatagatctcggtatacaaaataaaaggtaatgaggctatgatagtctgaaggacatcggcaaattaaaatttaacatatttatggattttatacaaagactcctctcccctttgcagataaaacgactgcatccaactttatgcagatttaactaaaagaaaaaaaaaaagtcttttgtgaaccacctgggccaatacttagttggcttaattgctatttcagtgccttgtcaggctgcagagcctgaactagggagatgcaccgggcccacttgcaggcggggcccagatgcacccaagccccatggacaagagcaccatgggcaccaggggcctcccgacctggcagcctgttgctagtgggcgaggcaggaggacaagtgcggctcaggccacgagtcgggctgggcgtgcagagaggttagaattacacccagatggcgaacagtcagtcgttcctttcctgctctggctgggagctaaaccttgtagtcccagaccctttcgccttcgcctgccggctcagacccaacagctctttccggacgacgggcggctccactgcgatcaaaagccaggggtagcgggaggggattcgtgagaatgcagcagccagagcagtctttcctttctgagcaagatgtgagagagtccgagtggcctggaggaggaaccgggtcaaccaactccacagggcggagcgaaaacgctggaggactaaggaggctaagagttgatcccccctttgagtcgtgatacggtccgaagcggggcggggcggggcgaaggaggctccccctggctctccccgcccctcacccgccttccttgctgagcggccgcgggagggggagcgcgagccccgcaggcccctcccccggcgccggcgcccgagctccgcccctcgccgagccgcccctccgcggctgcagcaagagctcgcccagctctgcgggcgccgccaccttcgccgccaccgctgcctttctcctcctcctgtcggcgtgcgggggccgcgcccggcggcagctctgccctaggtgggcggcggcgcggcccaggctgcagctgagcgctctgcgcggcgcagccgggtctcccgcgtgtaccacgccgtgacaggtgcagagtccgggctgaggacccacctgcagccgccgccgcgatgcccaccatgcggaggaccgtgtcggagatccgctcgcgcgccgaaggtaaggggccgccgaggctcggggctagcccggggtcgggaagcgagtgtgtgtgtgagcgtgtgtgtttatcctggaagagaccgcatcctacctcttccccggcggcagtccgactgtcgcgcccggcccctaggggacccttccccccgcgctgcccccagtgtactcgcagaccctttccaggctccagtaccctcgaatgggtgttctccgcgggagccccgaggcgtgctttgcaccgcagtgtgaccattaggtcccagtcactgagctcactcgccctgcccacctccctccccaccagttcgatttccactcagcagatccccagcccgccgcccctgcctccggcgcccaccgttttgcaaccccctatctgagctcccagcgaagcgagtttgcttttccccggctgcaggatcctttgatccgtagtcccttggctctcgaagcgcggggagccttcatcggggtcgggtgccgagtgggttccctgcattacagcttctgcaattctgcctcctgcagcggagtcccaccggctcgcgtctgaggtttcgtttttgtgtttcccttttgcccgaaaccctcacttcggccagctgagctgacttttcagccaggtggaagctgttttctttgctccacctggggccagctcttgaatggccatggttgtcaacactgagcaacagatgctccggggtagaagcaagtaagctttccgagggcccagactcttcatcgtctccgaggagccctcaacatcctgcctgccatgtggcaggcactctgtaaatattatttgattttgctcgcgtcaaagccaagactgtaaatatcccaaggtttgtttgtcctctcccataaacctgtacttgaatcctgcagagggtggaataacatgtttttcagaaatctatcttgccatc

SEQ ID NO: 10278 - DNA, 6000 bp, Homo sapiens
gcaataaaaaatgataaaggggataccaccaccaatcccacagaaatacaaactaccatcagagaatactataaacacctctacgcaaataaactagaaaatctagaagaaatggataaattcctcggcacatgcatcctcccaagactaaaccaggaagaagttgaatctctgaatagaccagtaacaggctcctaaattgaggcaataattaatagcttaccaaccaaaaaaagtccaggaccagatggattcacagccaaattctaccagaggtacaaggaggagctggtaccattccttctgaaactattccaaacaatagaaaaagagggaatcctccctaactcatttcatgaggccagcatcatcctgataccaaagcctgtcagagacacaacaaaaaaagagattttagaccaatatccctgatgaacatcgatgcaaaaatcctcaataaaatactggcaaaccaactccagcagcacatcaaaaagtttatccaccatgatcaagtgggcttcatccctgggatgcaaggctggttcaacatacacaaatcaataaatgtaatccagcatataaacagaaccaacaacaaaaaccacatgattatctcaatagatgcagaaaaggcctttgacaaaattcaacaaccttcatgctaaaaactctcaatatattaggtattgatgggacatatctcaaaataataagagctatctatgataaacccacagccaatatcatactgaatgggcaaaaactggaagcattccctttcaaaactggcacaagacagggatgccctctctcaccactcctattcaacatagtgttggaagttctggccagggcaatcaggcaggagaaggaaataaaggacattcaactaggaaaagaggaagtcaaattgtccctgtttgcagatgacatgattgtatatctagaaaaccccatcgtctcagcccaaaatctccttaagctgataggcaacttcagcaaagtctcaggatacaaaatcaatgtgcaaaaatcacaaacattcttatacaccaataacagacaaacagagagccaaatcatgagtgaagtcccattcacaattgcttcaaagagaataaaatacccagaaatccaacttacatgggatatgaaggacgtcttcaaggagaactacaaaccactgctcaatgaaataaaagaggatacaaacaaatggaagaacattccatgctcatgggtaggaagaatcaatatcgtgaaaatggccatcctcccaaagtaatttatagattcaatgccatccccatcaagctaccaatgactttcttcacagaattggaaaaaactacttgaaagttcatatggaaccaaaaaagcccacattgccaagtcaatcctaagccaaaagaacaaagctggaggcatcacgctacctgacttcaaactatactacaaggctacagtaaccaaaacagcatagtactggtaccaaaatagagatatagaccaatggaacagaacagagccctcagaaataatgctgcttatctacaacgatctgatctttgacaaacctgacaaaaacaagaaatggagaaaggattccctgtttaataaatggtgctgggaaaactggctagccatatgtagaaagctgaaactggatcccttccttacaccttatacaaaaattaattcaagatagattaaagacttaaatgttagacctaaaaccacaaaaaccctagaagaaaacctaggcaataccattcaggacataggcatgggcaagtacttcatgactaaaaacaccaaaagcaatggcaacaaaagccaaaattgacaaatgagatctaattaaactaaagagcttctgcacagcaaaagaaactaccatcagggtgaacaggcaacctacagaatgggcgaaaatttttgcaatctactcatctgacaaagggctaatatccagaatctacaatgaactcaaacaaatttacaggaaaaaaataaacaaccacatcaacaagtgggcgaaggatatgaacagacacttctcaaaagaagacatttatgcagccaaaagacacatgaaaaaatgctcatcatcactggccatcagagaaatgcaaatcaaaaccacaatgagataccatctcacaccagttagaatggcaatcattaaaaagtcaggaaacaacaggtgctggagaggatgtggagaaataggaacacttttacactgttgaggggactgtaaactagttcaacccttgtggaagtcagtgtggcgattcctcagggatctagaactagaaataccatttgacccagccatcccattactgggtatataaccaaaggattataaaacatgctgctataaagacacatgcacacatatgtttataggggcactattcacaatagcaaagacttggaaccaacccaaatgtccaacaatgatagactggattaagaaaatgtggcacatatacaccatggaatactatgcagccataaaaaatgatgagtccatgtcctttgtagggacatggatgaagctggaagccatcattctcagcaaactatcgcaaggacaaaaaaccaaagaccgcatgttctcacttataggtgggaattgaacaatgagaacacttagacacaggaaggggaacatcacacaccggggcctgttatggggtggggggagggggtagggatagcattaggaggtatacctaatgttaaatgacgagttaatgggtgcagcacaccaacatggcacatgtgtacatatgtaacaaacctgcacgttgtgcacatgtgccctaaaacttaaagtgtaataaaaaaagaaagaaagtgtattaggttgatagctcccaagtgatacagttttaattctttgaaaaaagattaaaaaatcacaatgtacctaattttgaaagtaaagctaaattatgaatgtaaaggacttcccattatgacctttgtccccaactcatgagtgtgtatatgtgttttctttccttttttgacatttaaaaaattatttattttttagagatgggatctctctgttgcccaggctggagtgtactggcatgatcacaactcattgcaatctccaactcctgggatcaagagatcttcccgccttagcctcccaagtagctgggactacaggcatgtgccattacacctggctaatttattttattataattgttacagccaggctctccctatgttgcttaggctggcctcaaactgctggtttcgaactcctggcctgaagtgattctcctgcctcagcctctctaatagctgggattacaggcaagaaccactgcaccaggcaactctttttcttttttgtttttttttgttttttgtttttttgtttttttgtttttttgttttttgagacggagtctcgctctgtcgcccaggctggagtgcagtggcacgatctcggctcactgcaagctccgcctcccgggttcacgccattctcctgcctcagcctcccgagcagctgggactacaggcgcccaccaccacgcccggctaattttttttgcatttttagtagagacggggtttcaccgtgttagccaggatggtctcgatctcctgacctcgtgatccgcccgcctcggcctcccaaagtgctgggattacaggcgcgagccaccgcgcccggcctctttttcttttttaatgaaataatagagctagtagaaaatagtttgctttttaaagtgcttacttaataaaataaaaagtgggcaactcgaaataaaaaatcaaacaatatctaacatgtttaaaagatttttaaaaatcaaaatataaaataatatcaaaatttaaaaactgggattctgttccccaaagttctgttcaaatctgttagatttatcttcccttgaccctaagtaatatcttgggcaagccctagagcttctttcctgacccttagttaataagatgttatctggtcacattcagtcacaataatagactcattttagtaataaacatcttaagactagtaattaaaactctttacttcacaccaagtttcctccccaagcttggcctgttcctggctggcagcctgaagtagggaaaggagagatatggtgaccttttctttgtacctttctagctaccctctataccctgaccctacatacataattgagctgtggcttctgactctactgggtttggggatgagaggcattgagagtaaaatgaaggagtggttttaattaatggcacagctaaaactggattttgttctctctgcacatggcagatgtttaaagctcattctttcttttatgcaagtttttacaccatccagcctcatttgtacctcttgaatttttgctcagtggcctatcaccattcaggatcaagacaaaaatcaatgagcacttattgtgtgtcatgcaccctacaaagtgccaggatatttatccaaactcctggcaatgctaaacacaatgcaaaaagacatattagaaaacgaatcttattaactttaacttttcaactgtatttcatcataaagtcttactttacaagataattgctgttgtgaaaaagggaaaggtcatggtctcatttcccagatgttatttgatatatgctataaattatattacctccaacatagtctgcactttgaacttagaaaaacaatcttcagacggcatgcattctaattcttgaaataagtatgcccacaaactgtaatttaagacagaataggtatgcttctcatgttttaattcagttgaatttcagaagatctcaggaatgtacagaacgagaattaagaattaattaataagaattaattaattgcttgacatagttaggtgatttcctgaactttaagcttccacatcacagtatgaagttggttctaagataagaaatataataaattctcgcccaaggacagacctgaatctctagctgcctagaggctgactcaactgaaatcatggcgtttgacagcacttggaaggtagaccggagtgaaaactatgacaagttcatggaaaaaatgggtaaagactttatttctttgtggctcattctttgctttcttacaaacatttttctttctaactcctaaatctctaggagattacagatagcttacagatagctcctgatgtggtagagaggatccagaagatgttcagaggagggaaaccatattctcccttcttacattaggaagaatccactatctcactaatggaagaaaagattctttgagtgctgttctctgaaacacaccaaaaagatccagaaatgtttccttccctctttaactgaaaaatgactttttttgttgtttacagtaagaaaatggcagcgtgtaatgataacttccagatctgaaaatgttaaattctaggagatggaaaaacaaagaccatataagaaagtaatggaaaaggttctcttaaaatttatagcgctgaataagttagatttaattctgatttcttctaacttaaaaaagttttggaataatcttgagaagctgtgtagttttctccagggcgtttaatttaactgatttataatttgataccaatactctggcagcccatatactatacaagataggcaaacaaatttgtgtcattcccctaaaagaaaaatctgcatcaattatagcttacagtttaggaactctaagtttaaatttataaaagttgtagattcttatagtgattttggcttaatatttgctaattttctcatttttgtgtcagaaagaaatgccacaagaagcaaatagaactataaagttcaaaatgttaaagccactaagaaaaacaaaggggcatttaagaaaaaagaatactgtatatgtggaattaaagatgtgcttccttataaatatatgaatatacattttaatccttcatttgatatttctagaatttgatttac

SEQ ID NO: 10279 - DNA, 6000 bp, Homo sapiens
gtattattttaaaatggcttcatggaattctgttgaattgatacgccataatttattgaactatttttgtcattaaccaaacatggtatccaaattttcactataccacaaagttccttgtgacaccatttttaatgttttttttttgtgcactttatgcctaactccacaagacactgttattaagagccagtgtgtttctccaccatactttctttgctcttcatcccttcttgcatctcagattttatctggggtcaatttttttctaattgaagcagatttttaaagatgtcatttggaggagtcctttactggtaaattttcagttttagtttttctggaaaatctctatttcaagtttatacttaaaagacatctttacagaatatatatagaatacttaattcacaagtattttctctcagcacattgaagacaacattctaatgtctcctaattttcattgatactgttaataatttagtagttgtctgcttctctttcttcttgaaaataatctgtcctctctatctagttcctttaaatatcttctctctctctctgatattctgcagtttaattatgatgtatctacttgtgtgtatgtgtgttttaaaaattatcctgcttaagacttattgagcctcgtgaatctgtggattggtatctgtgataggcagacaatggctccccaaagatcttaaatgtcttaatctccagaacctgtgatagtctaagttaaggttgtagatgaaattaaagttaccaatccacagacctcagggtaaaaagattatcctggattatttaggcaggcccagtataatcacaaggattcataaaacggaagagggagacagaagagatggtcagagtgatatgaagtaaaaaggattcagcttactcttgctggatttgtaaatgcaggaagggaccacgagtcaaggaatgcaggtagcttctagaagctagaaaaggtaagaaacaaattctcccctaaagcctccagaaagggatacacctgccaatactttcattttatccctgtgagaccagtgttagacttctgacctccaagagtataagacaataaatctgctgttttaagccactaagttttgtggtaatttgttatggtagctatggagaactgatacagtgcctttcaatagttcttggaaattcttcaaatatattccccaaatattgcctttgcaccactcactctatcctctatatctcttgacctctctttaacattttttattttcttattttggtaattatttaaaacaattggcttcttgttccacttcaaataaattcatatttttatatctacatattaagaattagttcataaatgtaattgttgtatcgtatatactttaaaaggaaaattgcatttatacttggatattattatattttaggttttgaaatttctttttttaaatgtctgataaatttattctgatcaaaattaaaatcttattgtatttacagtagtctactaaaagagtttacatcaattctctcctttaaatgctagcaattcagttttgtgtggtcaaagataatttagaatccttttatggtaactgatatgatacaaaggatttttttggttgttgtcaaatttgtatgtgcgtatatatgtatagggggtagaaaatttggttagtgactctattttggaaaaatgaatgttctttttggagttttagattcccagtgtttcaaaccaagtttgcttttgataaggaattcagtgaatctttattttctcgtagagaatttttaaacaatacctttcaaaatattgtatgtattcctatataattttgccttggaataaaaaaagtcatcacattaagaatatttttaacttaagaaattttttcaagattctttcaaaatgctaactccctcattgatttgaaaatacttttagagtttaaactattatgaccatgtagggataacttaaagtgtccttctaaatttttttttcattaatgtcatgcttctttctaagaacaaagtgtttcaatgttataaacagactgttttttcacatagctttcatacatcctgactttctatatctagtagggtaatacatttccttccaacctttagtggggtgaagttcatttgtcttctaatctaagaaaatacgttaactcctgacaacctctgacactcaacagaaacacaactgtactttggaattaatcatccatctttatttcatagtctccttatttatcaatgcaaatggaagtatagcaaatatttcacagtgtcatgtactacctaaggaatttcattgcaatagcattgttttgaaatgtatcatttgattttgatctaactatcatagatcagttttacccctgtatgttcagcctgaatgtctaaccacaatttcacaaaaatcaagggctctgttagttttcatacaaaattgtgatgacttattatgaagacagtcccaattaacaattgcatgtcatctgtaagaaatcaatttttttctcactccccacctgtaattttttttaagcaaagaagaatacttgggtctaggtttcaaggtttatttttctgtagtcctaatatcacttcagtaaattaatctgagactcatttttctaatatgtcaaatgactgttgtaaggattattataaaaacgtaaggtgattaacaaagtatgtaattgttccatagatggcagctcttgtttttttactgtgctttgcttctgccctgcttcacatattatgtaaaatagctggtgagttttaggaggtagtgctcacatgtttgcacagtgtttgctgtggacgatcaacagtaacagaagagcatacttcttcgatacacagagtttactgaatttggaaaggctttggcattcttatgtcatctgtaatgaaacaatctccagaagtcttttctaaaatgtccttgtaaaaagaaaaaagttatgtttatattttataaaaggatgatgttatttataaccagcagaagcagccttatttgaacatcttatgttgaaattgctacttaatacagtgactcataggagctttctagtggaaatcaaatgctcaaatgaaatagaatttagtttgttaggcaatagtgatatgtcttttattggttggactctggaaaacacttgacaacgaatagtactttacccgaagggcacgtatcatgcaccacatagcctaaccacaaacattaaaggtcttgtaactgtgagcctcaaatgaaaatacataaggacagctctcatacaatcaaatacaatacaaactagcttttaatttaaataaatatgtaagtaaagttcaagtgactataatgattttatatccctatgtatgtatcacagaaattgtggcaaactgtagaaatctattcaaatggaaagtaacaaagcactttcacattgccttgtattcaaaatccctactcttcataaaaacttatatttctttaacaaagctacttttctgtttaactcccggaaaacttcgtatttataacttaagggggtttctccaaccaaacaatttatttttgctaggtactatagctatattttttatacaaaatttgtgacagcaaatgaaattctaatcccaatagaagaacaaacaattttcatgtttcgatcttcatatatataattcaagaggaaatatgcttaactttgtagatttttacattttaaattgcattgtgtctgtatcaagtctactatcttttacctagattgtctggaagatttaagctcaaggttacggtttgagaaaagggttttgagagtgaccaggatagatttaagaattcattttatactaaaatatggccataaatatttttaaatacattcaaatagccctttgctggcacattttttcccttctttgccaaaacattcccacaggcggcctaagtcacctcattttataggtttagtaggtttagcaggctttatgtgctctagtagggttagtaggttttgttcatatcaggtctctctcatgggagtttccagggacaaggattgcttcagttagtatggccttagccatactagggtatttgctttaattctacagaagttttctaattaatattctgtagcaaaagaactaagatctggaattccccctcttaatctcttcctagaaatgagattcagaaaggacaggactgcatccagcctgtttgggaactcagacaaatgtgtgttgtcacagacacaaatagaggtctactatgaaataattggcttgctagtgtgctaatgacagacaatgctgatttgctccaacctcatacagtttcacacataaggacaatcatctatgtttcatgaaagttctatctactttaacattattttgaagtgattggtggtggtatgaattaacagtttaaatttaaatcctaaaattcagtgtgaattttttataatagcataaaaattcaaagatgtccatacaagaaaaattaaaatttggttaggtttagcagagtttgagaatccttactaccctcccacatagtattgtaatgtgaatataggcagttactattacaggcataatgatgattatgtattaagcagaaagaagtatcaccaccagtttttttctttgaatgcccctcagtacttctgcatttataggatggtagactggtttggtttagctctcaaaagtgaaaacatttaaagtttcctcattgggtgaaaaaaattaaaaagagtgagagactgaaaactgcagcccacctacgtttaatcattaatagtgagcccttcagtgaacttaggtcctgattttggagtttggagtctgacctttccccaaagataaacatgattgttgcaggttctgaagagggtcactccctcactggctgccattgaaagagtccacttctcagtgactcctagctgggcactggatgcagttgaggattgctggtcaatatgattcttcttgctgtgctttttctctgcttcatttcctcatattcagcttctgttaaaggtaagtttgtgttgccttttgctaaactttaatttccatctttggagttggaggcagatacgtgcgtgtgtgtgtgtttgtgtgagtgaatagtgaaagagtttctgactaaactatcttcaaaaccatgtaactttggaatgtttgtgaaagcatggctgagttgaaatgaaaaccaaattcaaatccctacaaacattaagaaaacagatatttcttttagtttcagttcctcagaccagtgtgttcttgcttcaatttctcattcatggtctgtttttaaaagaaggaaaaaagatacccactattgttacctgctgttgttggtcacattgaatgcagctccttcatttgaattgtaaatgaggattttttttaaaaaccgagttcttaaattttcttttagttgcttagcaatgtgacctcaagaagaattagacccaatgaaaaaggcatttgatttgccaaagaattatgaatgaaatggcacaacatatatttaattccgttacaattaaaaaatgatagaattcatagtgaattaaagaaaattaaatttcctgatacagatttaagaaataagacattatctttggaaaaataatgttgctacttacagtttctattttaagatgaaattaattttaaaaatacatatgaattaataccattgaaaaggcaagtgaaaaaacattttatgaggaatggtttcataaaactgttgtgaagtgtattaatatagaatcatgtttcagatcagctacattataaacatcggttttccaaatgctgcattgtgtaaaatgatcactttttagtttcttaggaagacacactgttaaaaaccaattgatataacaacatagcgttatagggaccaattttaaaaccatgtactctaagtaattgatagaa

SEQ ID NO: 10280 - DNA, 6000 bp, Homo sapiens
agttccagttattaaaattgcataaacatttgctgcaacacatatggattacttatttgtttctcatgcctattatgttctttaatatcaaaacaattttataaaacaatgaagaaatggcatgatttggaagatggatgatgtctataagtacatttcagaattattactcaacttcacgtattcaacaaatatttgagtttctactgtgtgagacacttttatgggaagttgggggagaagatgccttattttttacaatgtgcttttagaagttacataattatctggatttgtatctgaggagacaactattctaaacacttcctgaaaaatactttccttgttatttcacctaccataattatttttctgaaaatagtttattttaaaataaaattaaggaacacatgtcataccatattagtggtagtgaacttctagttaaaaagtctatgaaatgtcttctttgtgtaatgttagttaatatttactttaatatttttaactaaaaaatagtttataccaaaacgtgccaaatgtgaaaaaaatagtaataactaattttttattctaaaaattgccatgcttagaatatatgtagtcagtttttaaaagtgaataacactactgttgttttgtatttttttattttaattgtgttatactggctctgtgttgccatttgacttaaatataactgagtggggggtggtgaggagatcctactttttactgggagaaggattattggggaccaaactccttagggagaaaatggcctcaaaagtctgtctaaatacttgaaatttcattcgctatctgagaaaatgtgtaaaaagaatcactaggctacggatttctcgagcaatcttttgtttaagtctaactctctttggtggtcctgtgggcacactggggtctctgccgagttgataattcatttcacacatttgcacctgctctgcagcctgaccgagagggcgcaactgctcaagaacgtctttaagaagaaccacgtgaacttgtaccgctctgaatccttgcaacaaaatctgctccgtgagtatttgagtttcttatttttaaataaattctctgccattgctgtatcatagcatttatacagtatcctgactttagggatatttatttaaaactaatgtctaaaataagttttgcatatttgtaacctgtaaataacagaaaatccattggtcagaaccatttcactttcaacagaagagatagttaattttaaaatcttgctgtttcacttaaagaaaaacagtatttccacattccttgcttcctcaaatctttttctttaaagccagtaaatcttaattcttaaaagctgcccctgtcttgttatcttttctacttgaataactttgcaagagcctttcagctttcatacaacacaaggaagcatatattttccccttcagaaatatttatgaatatttagagttgtaagacattattagatattgtgccctcttaacatttcaagatctaaaaaagaatataaaatgtaaagccctgtagtaaatgtatttgtgtgagtaatatatcttttgtttcatgttgtttccacttataatttattttcacttacgtatactcatgtctaatgcttttgctctttatacttcaagaggccttttctaaagatgtgatccccttgggggccattccttatgcccatgccatgtcggggcgtgagtgagtttatttgtgatgctgagagccaaggggaatgtcctctgaaggaaggagaccacttgccaccatgagcagctatttgtgtttatctcctcctcctcgcctttttaaattgacaaacaataattgtctatatttatggagtacaaggtgatgttttgatgtacagttggccctttctatcagtgggttccacatctgtggattcagcccgctgtgagtcaagtatattcaagggggaaaaaaaaattcacaaaattcctaaaagcaaaacttgaacttgccatggacgaaatactacattgaatccactagaatgaactgatgtgagggcattgtattaagtattataagtaatctagaaatgattttaagtctacgagagaatgtgtgtaggttatatgcaaatactgtgccattttatataaaggatttaagcatccgtggattttgatatttaagggggtccctgaagccattcccacagataccaagggaccgtacatggtgggatggttgaatcaattacattattcaccacctcacctacatatcacttttcctttcctctcatccacctgacctatgtggaaatatgtgagcccacttgactcaactccctcaccccctccagaattggggaagcaaaaattagaagagttggagttgacttacgggacagaggatttaggggaattgagggtgcctactcagtcttctagagagaagaatacctagaatctaaactggcaacctaagatcatcccactctttattttgaagttaagtctgtatcttttctaggcattaaaaatcagtgtctccatgcttttgaatgtgggaaggctgcatttgttccccaggctagaaaatgaatacccaaaagtcagaataacggtggtttccagtgcctttgtgagaatttctgttttatcattaacctacagatgggtatgcgttctctcaagatgaaaatggaatcgtttcacagtctgaagtgataagagcatatgataccacgaaacagaggcccgacgaatggtgatggggagagcctgaaaggcaggctctgttacctctctaaggagagctaccaggttgtcaccgcagtctgctaaccaattccagtctggtccatgaagaggaaaggtagatctgagctcatctcgctgatggacattcagattcatgtatattatagacataagcactgtgcaactgtactgtaacaccatctcttttggatttttttaaggtatttgctaagtctttgtaaacggaaattgaaaatgacctggtatcttgccagagggctttcttaaacggagaataagtcagtattcttatgccattactgtggggctgtaactgactgtcagtttattggctgtaccacaaggtaaccaaccattaaaaaactctaaatgatatttagttaaagggactcttggtatccagacttagatttcaggatatgctgaaacaaaccagcattcttaaggaactgactcaccttcctgagcaaaatttctaaacaagcatttgtgtccaaaattgtcttgataaatgtttgccaaagaggttcagtaagtgtttttctagttcagtagtcatatgcccagaaatgtaagagaaagtttacttccagttccgctgtaagatctgcatgcctgactttccaaatgtaagagtgatttacaaaaatgaatatttcaaggcatttgctactaaaatcggtgatgttgcacctttggccttacaaatgcttctttgttgtttgtcgtgtttatttgttagaggacacacgtgttaatgtgactctgttgttatgacactgatttttcaaactatgtatgtttcaggtatttctgatgaagtttcatcatcatttagatttttctaaaaatctggctaatgcagtagattgagtgatgtcattttgtcttaaagtttttcctcttaagaaacatatgctacgtatttacgtgggatttccaaagcttctgttgcaatatttggaataacatgtcagataaatgcatgggcttttgtcctgtgttccagttcccactagagatgcctgtgtcttgtgtagcacacccagtgttatggtgactgccccctatactgaagactgaaaattatttcacagttcactcatcaaatagttcccaaaattcgtcacatgctgcttattgggacaaataggtagtacattttccccatttaaaaaatgcggattttactcaggccggtaactttacagtcagaggacacgttcatcatgagtagcttttgttagtatgttttaaaatgtatcttcagttcaattattttcagcatttacaagacatctgaaaatggctattttgctaccaacagtaaatgaaggggctgtttaaaaaccacaaccagttttctacactattttttaaataatactttcatttgaaaaaaaggaattagttttcagatacacttcagagattgaagcaaactatttgccttttactcaaaagcctgcttgcctttacatggacttaccagcaaaataggtagaactttctcttttaaaaaaagtcaactagaattgagaagaggtgattttttttcagatcgcttctcgagtttaatattttcacattcttttcaccctttttctcaatctagatttaaaattaggatatatgtcatttccttgtctgtatttgtagctccttagttaccagtatgcctctccattttctacaaataagaggttataacacatatacataattctaaccttaagggaacacacgtttacatactttacttcccaagcccttcctgtttggggtacagattgagagagtcatgaatcaacacatctagcaagaccacaggtgtaagagtctaagatcgtcttcaaaattctgaagtcccagtctttacctgtccagtgaatgaatattcagagcagcttttcctgggcttcccagtggtgatagctgaggtcaaaccacaaaaaataagaaagcaagagtgaaatgcacccctccagagaaacactttgtagtgtttaattctgttaatagagaagagctgcttctgtttgcgctcacttcatcagtggcacccttctgcagaattttaatataaaaacattatggatataatagaactggattttctgacttaaaaatgtaagttttattttaatcttgaaacgtggattgtttctgtggagctcttaaacatgagaagaatacttacggttgataatgtgtaacatgatctgaaatgtgactaatttgagcctctttgtcccatcgtcctgtttttgaattattgacattgtcagtctctttgcttcctgggtgagacttggggtttgagggacagggaatgaccttcttggtgaaacttaaaatataacattgcaattgcagtgactttacagtgttaaattagagaaaatagtctgattttttaaaccttccttaactggaaaaaagtcacatggttttaccaggattgaaataaacagtcaatgtgacttttaacatgtgtttttttgaaataaagggcacgtactcttcaattaaaaagttccttatagggactctggcaaatgctaacacagttgctttacaatgtttacaattcagacaatacgacttataatagaaaatcctcattcatttagcattgaaaagctggaagttgcttctttaatgttgaatagtatacagtggtattgagcatggactttctaaatgttttatatatacatataaaaatatattggtgtctcacacccagaaagatgttatattgtagatattattaggaaaacagtgtttctcaggaacgttgtaaattttaaatgatatatgtacttcccgtcctcccacctccactctgtgctctaatgtgagactgcttcagcagtgttgctaagttaatggaaaactttttctaatcaagtcaggtgaatgtgtattctgctaaataatgttagccatttacatgaattgtatggtcattaaatggaatcagtgattcctctttaatttccagaggggaaatgaattatggaaatcagtcagcattctgatcattaaattttatactttaattttgccgttcagcattctaaatatccaatgtgaaagtcacatgataatttgttttgcattgcgtgcactgtacaacacttacaacttgtcatttaaaatgttttctcgggaaatgaatgctagtcagaaagtaatagattgtattattcat

SEQ ID NO: 10281 - DNA, 6000 bp, Homo sapiens
gagcccatgatctttcctgagtaatgtgcttctttcttaagaaagagactttcttactgctttgttttaatgctgtacgttaacttgatataaaagaagagctaatgagagcctttatatgaactgtacaaaacggaattatgttaccttatgtatttcagttgctgtaatatgaaagactaaattctcatgtctgccttcttaccactttaatattgtaatattaaagtattatgcatttaggaaggccagcctgaaacctggaaaatgtcttttgggaagaagatgctgcataatgatacattgccatcctctagtctcccgtagtcatttcggtttgaaacaccaaagactttccagcaccccatccacaaggctctgctaaggaagtcagaccacctgctgctaaagctgcgacttcctcaaagcagttacatattttagtgtccctcagggtccatgggtctgtaatgctagatcatttaaagagtagagtaagaaagcaactctgtaaaaatggccctttctcatttctcatatctgtttatttcactgacagaaacaagttttacaactatttgcagaactgctggagttttagattaattagttttcttgccttcatgtagctaatttccaatgacaataaaatatgtccaataataccagttaacctccctagactttaaaatatatatgtggaagattactacaaatgttaacatttctaaatattttttcttcggtttttgcctaaatgtttgcataattcatttacacaatgagttcattttgcagaggatcctttttttgtatatgatattgtttcatttcagggtcttagaaaaattggcaaaatacagaactaacataacacagcaatttaactaaagcttttatagtgggaaaaacacaagatggaaatttttcagctgaatcagttccagttattaaaattgcataaacatttgctgcaacacatatggattacttatttgtttctcatgcctattatgttctttaatatcaaaacaattttataaaacaatgaagaaatggcatgatttggaagatggatgatgtctataagtacatttcagaattattactcaacttcacgtattcaacaaatatttgagtttctactgtgtgagacacttttatgggaagttgggggagaagatgccttattttttacaatgtgcttttagaagttacataattatctggatttgtatctgaggagacaactattctaaacacttcctgaaaaatactttccttgttatttcacctaccataattatttttctgaaaatagtttattttaaaataaaattaaggaacacatgtcataccatattagtggtagtgaacttctagttaaaaagtctatgaaatgtcttctttgtgtaatgttagttaatatttactttaatatttttaactaaaaaatagtttataccaaaacgtgccaaatgtgaaaaaaatagtaataactaattttttattctaaaaattgccatgcttagaatatatgtagtcagtttttaaaagtgaataacactactgttgttttgtatttttttattttaattgtgttatactggctctgtgttgccatttgacttaaatataactgagtggggggtggtgaggagatcctactttttactgggagaaggattattggggaccaaactccttagggagaaaatggcctcaaaagtctgtctaaatacttgaaatttcattcgctatctgagaaaatgtgtaaaaagaatcactaggctacggatttctcgagcaatcttttgtttaagtctaactctctttggtggtcctgtgggcacactggggtctctgccgagttgataattcatttcacacatttgcacctgctctgcagcctgaccgagagggcgcaactgctcaagaacgtctttaagaagaaccacgtgaacttgtaccgctctgaatccttgcaacaaaatctgctccgtgagtatttgagtttcttatttttaaataaattctctgccattgctgtatcatagcatttatacagtatcctgactttagggatatttatttaaaactaatgtctaaaataagttttgcatatttgtaacctgtaaataacagaaaatccattggtcagaaccatttcactttcaacagaagagatagttaattttaaaatcttgctgtttcacttaaagaaaaacagtatttccacattccttgcttcctcaaatctttttctttaaagccagtaaatcttaattcttaaaagctgcccctgtcttgttatcttttctacttgaataactttgcaagagcctttcagctttcatacaacacaaggaagcatatattttccccttcagaaatatttatgaatatttagagttgtaagacattattagatattgtgccctcttaacatttcaagatctaaaaaagaatataaaatgtaaagccctgtagtaaatgtatttgtgtgagtaatatatcttttgtttcatgttgtttccacttataatttattttcacttacgtatactcatgtctaatgcttttgctctttatacttcaagaggccttttctaaagatgtgatccccttgggggccattccttatgcccatgccatgtcggggcgtgagtgagtttatttgtgatgctgagagccaaggggaatgtcctctgaaggaaggagaccacttgccaccatgagcagctatttgtgtttatctcctcctcctcgcctttttaaattgacaaacaataattgtctatatttatggagtacaaggtgatgttttgatgtacagttggccctttctatcagtgggttccacatctgtggattcagcccgctgtgagtcaagtatattcaagggggaaaaaaaaattcacaaaattcctaaaagcaaaacttgaacttgccatggacgaaatactacattgaatccactagaatgaactgatgtgagggcattgtattaagtattataagtaatctagaaatgattttaagtctacgagagaatgtgtgtaggttatatgcaaatactgtgccattttatataaaggatttaagcatccgtggattttgatatttaagggggtccctgaagccattcccacagataccaagggaccgtacatggtgggatggttgaatcaattacattattcaccacctcacctacatatcacttttcctttcctctcatccacctgacctatgtggaaatatgtgagcccacttgactcaactccctcaccccctccagaattggggaagcaaaaattagaagagttggagttgacttacgggacagaggatttaggggaattgagggtgcctactcagtcttctagagagaagaatacctagaatctaaactggcaacctaagatcatcccactctttattttgaagttaagtctgtatcttttctaggcattaaaaatcagtgtctccatgcttttgaatgtgggaaggctgcatttgttccccaggctagaaaatgaatacccaaaagtcagaataacggtggtttccagtgcctttgtgagaatttctgttttatcattaacctacagatgggtatgcgttctctcaagatgaaaatggaatcgtttcacagtctgaagtgataagagcatatgataccacgaaacagaggcccgacgaatggtgatggggagagcctgaaaggcaggctctgttacctctctaaggagagctaccaggttgtcaccgcagtctgctaaccaattccagtctggtccatgaagaggaaaggtagatctgagctcatctcgctgatggacattcagattcatgtatattatagacataagcactgtgcaactgtactgtaacaccatctcttttggatttttttaaggtatttgctaagtctttgtaaacggaaattgaaaatgacctggtatcttgccagagggctttcttaaacggagaataagtcagtattcttatgccattactgtggggctgtaactgactgtcagtttattggctgtaccacaaggtaaccaaccattaaaaaactctaaatgatatttagttaaagggactcttggtatccagacttagatttcaggatatgctgaaacaaaccagcattcttaaggaactgactcaccttcctgagcaaaatttctaaacaagcatttgtgtccaaaattgtcttgataaatgtttgccaaagaggttcagtaagtgtttttctagttcagtagtcatatgcccagaaatgtaagagaaagtttacttccagttccgctgtaagatctgcatgcctgactttccaaatgtaagagtgatttacaaaaatgaatatttcaaggcatttgctactaaaatcggtgatgttgcacctttggccttacaaatgcttctttgttgtttgtcgtgtttatttgttagaggacacacgtgttaatgtgactctgttgttatgacactgatttttcaaactatgtatgtttcaggtatttctgatgaagtttcatcatcatttagatttttctaaaaatctggctaatgcagtagattgagtgatgtcattttgtcttaaagtttttcctcttaagaaacatatgctacgtatttacgtgggatttccaaagcttctgttgcaatatttggaataacatgtcagataaatgcatgggcttttgtcctgtgttccagttcccactagagatgcctgtgtcttgtgtagcacacccagtgttatggtgactgccccctatactgaagactgaaaattatttcacagttcactcatcaaatagttcccaaaattcgtcacatgctgcttattgggacaaataggtagtacattttccccatttaaaaaatgcggattttactcaggccggtaactttacagtcagaggacacgttcatcatgagtagcttttgttagtatgttttaaaatgtatcttcagttcaattattttcagcatttacaagacatctgaaaatggctattttgctaccaacagtaaatgaaggggctgtttaaaaaccacaaccagttttctacactattttttaaataatactttcatttgaaaaaaaggaattagttttcagatacacttcagagattgaagcaaactatttgccttttactcaaaagcctgcttgcctttacatggacttaccagcaaaataggtagaactttctcttttaaaaaaagtcaactagaattgagaagaggtgattttttttcagatcgcttctcgagtttaatattttcacattcttttcaccctttttctcaatctagatttaaaattaggatatatgtcatttccttgtctgtatttgtagctccttagttaccagtatgcctctccattttctacaaataagaggttataacacatatacataattctaaccttaagggaacacacgtttacatactttacttcccaagcccttcctgtttggggtacagattgagagagtcatgaatcaacacatctagcaagaccacaggtgtaagagtctaagatcgtcttcaaaattctgaagtcccagtctttacctgtccagtgaatgaatattcagagcagcttttcctgggcttcccagtggtgatagctgaggtcaaaccacaaaaaataagaaagcaagagtgaaatgcacccctccagagaaacactttgtagtgtttaattctgttaatagagaagagctgcttctgtttgcgctcacttcatcagtggcacccttctgcagaattttaatataaaaacattatggatataatagaactggattttctgacttaaaaatgtaagttttattttaatcttgaaacgtggattgtttctgtggagctcttaaacatgagaagaatacttacggttgataatgtgtaacatgatctgaaatgtgactaatttgagcctctttgtcccatcgtcctgtttttgaattattg

SEQ ID NO: 10282 - DNA, 6000 bp, Homo sapiens
tagggagaaaatggcctcaaaagtctgtctaaatacttgaaatttcattcgctatctgagaaaatgtgtaaaaagaatcactaggctacggatttctcgagcaatcttttgtttaagtctaactctctttggtggtcctgtgggcacactggggtctctgccgagttgataattcatttcacacatttgcacctgctctgcagcctgaccgagagggcgcaactgctcaagaacgtctttaagaagaaccacgtgaacttgtaccgctctgaatccttgcaacaaaatctgctccgtgagtatttgagtttcttatttttaaataaattctctgccattgctgtatcatagcatttatacagtatcctgactttagggatatttatttaaaactaatgtctaaaataagttttgcatatttgtaacctgtaaataacagaaaatccattggtcagaaccatttcactttcaacagaagagatagttaattttaaaatcttgctgtttcacttaaagaaaaacagtatttccacattccttgcttcctcaaatctttttctttaaagccagtaaatcttaattcttaaaagctgcccctgtcttgttatcttttctacttgaataactttgcaagagcctttcagctttcatacaacacaaggaagcatatattttccccttcagaaatatttatgaatatttagagttgtaagacattattagatattgtgccctcttaacatttcaagatctaaaaaagaatataaaatgtaaagccctgtagtaaatgtatttgtgtgagtaatatatcttttgtttcatgttgtttccacttataatttattttcacttacgtatactcatgtctaatgcttttgctctttatacttcaagaggccttttctaaagatgtgatccccttgggggccattccttatgcccatgccatgtcggggcgtgagtgagtttatttgtgatgctgagagccaaggggaatgtcctctgaaggaaggagaccacttgccaccatgagcagctatttgtgtttatctcctcctcctcgcctttttaaattgacaaacaataattgtctatatttatggagtacaaggtgatgttttgatgtacagttggccctttctatcagtgggttccacatctgtggattcagcccgctgtgagtcaagtatattcaagggggaaaaaaaaattcacaaaattcctaaaagcaaaacttgaacttgccatggacgaaatactacattgaatccactagaatgaactgatgtgagggcattgtattaagtattataagtaatctagaaatgattttaagtctacgagagaatgtgtgtaggttatatgcaaatactgtgccattttatataaaggatttaagcatccgtggattttgatatttaagggggtccctgaagccattcccacagataccaagggaccgtacatggtgggatggttgaatcaattacattattcaccacctcacctacatatcacttttcctttcctctcatccacctgacctatgtggaaatatgtgagcccacttgactcaactccctcaccccctccagaattggggaagcaaaaattagaagagttggagttgacttacgggacagaggatttaggggaattgagggtgcctactcagtcttctagagagaagaatacctagaatctaaactggcaacctaagatcatcccactctttattttgaagttaagtctgtatcttttctaggcattaaaaatcagtgtctccatgcttttgaatgtgggaaggctgcatttgttccccaggctagaaaatgaatacccaaaagtcagaataacggtggtttccagtgcctttgtgagaatttctgttttatcattaacctacagatgggtatgcgttctctcaagatgaaaatggaatcgtttcacagtctgaagtgataagagcatatgataccacgaaacagaggcccgacgaatggtgatggggagagcctgaaaggcaggctctgttacctctctaaggagagctaccaggttgtcaccgcagtctgctaaccaattccagtctggtccatgaagaggaaaggtagatctgagctcatctcgctgatggacattcagattcatgtatattatagacataagcactgtgcaactgtactgtaacaccatctcttttggatttttttaaggtatttgctaagtctttgtaaacggaaattgaaaatgacctggtatcttgccagagggctttcttaaacggagaataagtcagtattcttatgccattactgtggggctgtaactgactgtcagtttattggctgtaccacaaggtaaccaaccattaaaaaactctaaatgatatttagttaaagggactcttggtatccagacttagatttcaggatatgctgaaacaaaccagcattcttaaggaactgactcaccttcctgagcaaaatttctaaacaagcatttgtgtccaaaattgtcttgataaatgtttgccaaagaggttcagtaagtgtttttctagttcagtagtcatatgcccagaaatgtaagagaaagtttacttccagttccgctgtaagatctgcatgcctgactttccaaatgtaagagtgatttacaaaaatgaatatttcaaggcatttgctactaaaatcggtgatgttgcacctttggccttacaaatgcttctttgttgtttgtcgtgtttatttgttagaggacacacgtgttaatgtgactctgttgttatgacactgatttttcaaactatgtatgtttcaggtatttctgatgaagtttcatcatcatttagatttttctaaaaatctggctaatgcagtagattgagtgatgtcattttgtcttaaagtttttcctcttaagaaacatatgctacgtatttacgtgggatttccaaagcttctgttgcaatatttggaataacatgtcagataaatgcatgggcttttgtcctgtgttccagttcccactagagatgcctgtgtcttgtgtagcacacccagtgttatggtgactgccccctatactgaagactgaaaattatttcacagttcactcatcaaatagttcccaaaattcgtcacatgctgcttattgggacaaataggtagtacattttccccatttaaaaaatgcggattttactcaggccggtaactttacagtcagaggacacgttcatcatgagtagcttttgttagtatgttttaaaatgtatcttcagttcaattattttcagcatttacaagacatctgaaaatggctattttgctaccaacagtaaatgaaggggctgtttaaaaaccacaaccagttttctacactattttttaaataatactttcatttgaaaaaaaggaattagttttcagatacacttcagagattgaagcaaactatttgccttttactcaaaagcctgcttgcctttacatggacttaccagcaaaataggtagaactttctcttttaaaaaaagtcaactagaattgagaagaggtgattttttttcagatcgcttctcgagtttaatattttcacattcttttcaccctttttctcaatctagatttaaaattaggatatatgtcatttccttgtctgtatttgtagctccttagttaccagtatgcctctccattttctacaaataagaggttataacacatatacataattctaaccttaagggaacacacgtttacatactttacttcccaagcccttcctgtttggggtacagattgagagagtcatgaatcaacacatctagcaagaccacaggtgtaagagtctaagatcgtcttcaaaattctgaagtcccagtctttacctgtccagtgaatgaatattcagagcagcttttcctgggcttcccagtggtgatagctgaggtcaaaccacaaaaaataagaaagcaagagtgaaatgcacccctccagagaaacactttgtagtgtttaattctgttaatagagaagagctgcttctgtttgcgctcacttcatcagtggcacccttctgcagaattttaatataaaaacattatggatataatagaactggattttctgacttaaaaatgtaagttttattttaatcttgaaacgtggattgtttctgtggagctcttaaacatgagaagaatacttacggttgataatgtgtaacatgatctgaaatgtgactaatttgagcctctttgtcccatcgtcctgtttttgaattattgacattgtcagtctctttgcttcctgggtgagacttggggtttgagggacagggaatgaccttcttggtgaaacttaaaatataacattgcaattgcagtgactttacagtgttaaattagagaaaatagtctgattttttaaaccttccttaactggaaaaaagtcacatggttttaccaggattgaaataaacagtcaatgtgacttttaacatgtgtttttttgaaataaagggcacgtactcttcaattaaaaagttccttatagggactctggcaaatgctaacacagttgctttacaatgtttacaattcagacaatacgacttataatagaaaatcctcattcatttagcattgaaaagctggaagttgcttctttaatgttgaatagtatacagtggtattgagcatggactttctaaatgttttatatatacatataaaaatatattggtgtctcacacccagaaagatgttatattgtagatattattaggaaaacagtgtttctcaggaacgttgtaaattttaaatgatatatgtacttcccgtcctcccacctccactctgtgctctaatgtgagactgcttcagcagtgttgctaagttaatggaaaactttttctaatcaagtcaggtgaatgtgtattctgctaaataatgttagccatttacatgaattgtatggtcattaaatggaatcagtgattcctctttaatttccagaggggaaatgaattatggaaatcagtcagcattctgatcattaaattttatactttaattttgccgttcagcattctaaatatccaatgtgaaagtcacatgataatttgttttgcattgcgtgcactgtacaacacttacaacttgtcatttaaaatgttttctcgggaaatgaatgctagtcagaaagtaatagattgtattattcatagttttaaaattatgacaatgtcataattactacaaagctaaataatcgtgtttatttttgtgcagttgccctttgatagttcctggttttaaaacctattaagtgtataatcttacaaatagtcatctacaaaatttatggagaaagtgcccagcccattcacatcacatggaccaggaattcttttgtaaatgacttaaggtaacatcatgcagttcagtgcctaataaatgctttttaatgatgaacatttctataatgactcgtaagataccatagtctgatttttctcacattaaaataactgaagtcacttgtgtaacgtagttatactttgctgcattttaattaaccttcaacagctattaaagtggaatgtaagttaaattttgaaggaaaggaaataaatgttttccatatttcgtcttgatttactttctgtatgagaacagctgtgtttttgataggtttatggtttgcatgagttcatatttaaagtgatccaggccaatgcatggctattgctgtaaatcttgatgtttatttctgccttgtaaagttctatcacggcctacctggaatttaaaattcagtagacaaattaattggtcctctgcacaacttttttaataagtagattattttacaaagaaatttgaacaaatttaattgaatcttttgtttagcttgcctctaagaacttttcttaataaagctcccaaaacttctcagcaaataaatctcccttaagtaggaaagctagatt

SEQ ID NO: 10283 - DNA, 6000 bp, Homo sapiens
catattttacttccaattcatatagtgagactaattacatttgcttaccactaattcctttaaaacaaaaatcttacaaattaaacattgtcttctaatgaaatcagttctttaacatcaaagattaatttgtttataggacctctaacatggcagttagtaggttaagtcataatttaacaaatgttattcaggtgtttattcttttcagccttcactttcaaaaggtaagcaattattattagttctcccttagttctggaagaaggtttaaaatctagtcatccacaaatgaatagctttggtaacttggtaaaagactttttggagtctgagccacccttcttagggcactttatttcctgggattgccaggacattagaggtgtatctcacaggacagtattttgctaggacaatcgaagtgtaaccaacagtttatttgcactccagtacttcccagctagttgaagtccatgcccttgattctaccttgtcatggtcatcttgtatttctgcaggggatatcttgtaccccccaattaaaaattaattaaatttctgttgattttcaatcagtggctagaatagagactgacatctcctctttcatatagttgaaaatttacccctattttttctttggtttttgacatgagagcaacaaatgggaaaataccttggttgtgttttatttatttctgtgataggaatctctttttcagaagaacaaaataaaaatgctaaaagcaatttcaaaataagtttcttttctactcttttctggcacctatggaattaaacattttagaaagaagacaggtaggatataatcaagtatgataagatgaattttattacaaatattattttacctagggttgtcagtgtagttaacataaatatgcatgctaataaataacctaggctgcttgctcagaaaataaacagaaagtcaggagataataatgtactacttcactctaaacctttaaaatgtcttattttcctaataaacaatcattatttcaagattgtgctaacctacctggattattgtaattcttacttttcctatttttgacagacaaatcaccagccaggattacccataataatagcattttcagtcatctcacaggtcaatggcacacctaacctaggcatcccattttgagataaagaaggacagaatttaaagtgttgccaaaagtcatccagcccaaaagagctgaagttatttaataattagaattatagaagtaattagaatcactaaaagttggttcagtgatgaaatcatgataaatattcaaaaattaacatcattcttaagttggcagtatcaagtttgaaaataaagtgaagaagaggtctcattcccagtggcctatgggaggcctacaagtaaatttaatgtatgtgtatgacctttgtaaagaaagcatccaaactttgatattcaagattcatacaaatttacaagtatgtcatattcccagaaaaattaaaagtgaaatatcacttgttccaaattatgaagtaatataatcccagggaaattattatattttcctcaagaattgactaaatttttcatctgatttgcaaaaataaacagttaagaaagtagaatatattttggaaaaatgaacagtgtgtaaagattacaggtgaaatggaaagcaaaagttattaaaacactgtggtttgcaaaaatagacattgatgagtagaataacatggagcagatttaagtagtatagaataaaatatagtgccctgaaataaggcctgtttaatatttgaaaaaggaggcaaaaattattttttaaagaattgctatcacagattagcagttttaagaaatagcatttgaatatttatatctaagtcacaacctatgctaaaataaatgtcaactgactaaaagagttaaatgttaaaatgttgtttttagaaaacgtacaaatagaataaaggccttaataaatatttgaagaagagcaatatctcaaaatctatggaattagattatataaattttaaaacaaatacacaacaaaaactgccacaaataagtaggcaggctatgtgaaatatttgcaccaaataggacaaatgattaagatcattgttatataaataggaaaacttgacagtaaaccagaaatatgataattgaccagactcagtataatattcaacctaataaaatttgcaaatttaaaccatattgaagtttcatttgctacctattcaataaataaaaacaaacatttcagatttatttttatgaaatattttatttacatactattgtgaacgagcagtttggctatttatattgagaactgtgaaaacgggattctggaaatttatcccaagaaaagaaaaagttggagaatatctccacgtgtataaaaatgtttattgtagcattatttacttataatagcaaaaaactagaacatatggaaatgcaacaatagggacagttttataaattatggcattttatactcatattttgtgacaagtaaaatctgtaatgtcacatggtgtagcaacacagaagaaattatactattcattcgacaagtgtttattgagtgcatatgccaagcagtgagcttaaagcagcaagcaagacaagtaagggttcctgtatcataagatataatcataggtgaaaaaaaatagtactatgtacactgaaatactggctttgtaaatcgtttattgaacaagcgaacaggcacaaaagcagccttacttgttgggataacaagattttgaggcaagtcttttctttgccttatatgatatttagtccaattaaaaataaaatcaataaaccaaaaccaagagtgtcgtctacatgccaaggtaatatgatagaccttagtgtaaatgggctttacttcagggctctttctctgcctttctaaatgtgtggctactgtggttgctctttaatgatcctcaaaggacctacaaatttgcctagcatgcatctaatcattcacagctgggcagacttcagctctcagatattagtggtttatctctccagttactgccctgaaaccttttccctgttgcaaaaggttaacttgcagatacatagttttaaaagaaagtatggtaatcacaaagccctacacaaggaactacattgtgactcctgaacggtaagctgctggcttcattgctcttgccacagattatttctttacaatgaggtgcagctaacactgttcacaggtttttgagatgtatgcaggtggagaatttagccaaagaatcttggaatcaacgtattcttctggcttattaaggaagcatggtgggctgtatgcatgtgtaaaagttactctgtaaagccacttttgtgcatgaagcttccaccacaatatgtatttcttttttcttttcttttttttttttttttttgagatggagtctcgctctgttgcccaggttggaatgcagtggcgcaatctcggctcactgcaacctccacctcctgggttcaaacgtttctcctgcctcagcctcctgagtagctgggattacaggtgcctgccaccatgcccagctaatttttgtattggtagagacagggtttcgccatattggccaggctggtcttgaattcctgacctcaggtgatccgcccgcctcagtctcccaaagtacggggattacaggtgtgagccaccatgcccagctaatagttggatttttaaatcaggctattgcagtctgataatcttactattttacataatccttgatgttgcaaatatgagtgacttcagaaggctgtaggtagtggactgaaagccctaaacatttccttaactttggcattttggggactaaaattgctttatcatgacattcctccaattagaatatgtatgattaaagcatttttgtcatcttgactttttcttctcttggttcctcttatgcacacactaggctggaaggggaatgccgtattaggagctcagaatccaaaaggaaagacaggtgtttggatgtcttttgagaaattgatcttaaacatagacattctaaggagttaagttccctactttccttacagtaaagaactttagcagtcattgatttagcatgctttagtaagaacttcagcatttagtaagcccctggttttcccaggccactggggtaccatataaattgttactattttattgagtttaggaaccacaagcccttcttttgtcttacaatgagtaaagatgttggaaagcagcacaatcaattagggatttgtttaagtctgactgttagactctaacacgatagtgtagaggacgtgattctgattttgtgaagcacacagttgaatttaagaggaaacattaacatacaggagttgattaaagaaaattaaatggtaacctggatgcattctaagtgccatgatttcagagaatttacattttattatctttctcagtgagtgtaatcacagtaccatcacagcacattattttaaggaccagtttacatttatacttgcagtttttaatttttcctctttgcccttttttgaggtagggggtgtttgattccaagatccctggtaatttgccagtttcagctagtccaactttcagatttcagctgaattattttttgaatcaagggacccagaacttaagcatacgtgtcataaataaaaagacaatacccctgccccaaccttttctaacctcttcttttggtaaataatagactgcagtgggctgcctctgcagtaatttcttattatgattcccacaaaagacactattctgttcttaccctcatagtgttattttagagttcaaggaaaagtagggagggggaagaacaaacaggctttaatttagaaagtcttttttttccatctattaagtattgaaattcatgtttagtctcatttgtctactaagaggtcaactttcatgatgtaaagggagcggctaacagtgtaacttggtcaactcagttaagccaagttgttgcttagttactgtgttgtttgccaaaagctatgtgacacatctgtcacttaaatgactgctatcagtttttgaaaatagtatctctttatctttatgccaggctcagaaaaatgctaagaggtagtacaatgaagagattaatttttaatttaaaatacattgatagtttcacaaaattatgcaaaatcaggatttgcagacagtcaaatgtggatttgagtctaagctcttcaactccccatgatcttgagcaaaaatctcagaatctcaaactcattttctttctctccaaatgatgagttataagcaatacttgtttcacaagcgttattgtgaggagcaattatatatgatagcgtctccagttgcattgagattttcttcaataggataaagatttatattggtaaatccctcctttatatttttatgtcagagaggatatgagaagttaaggtgtcaattaagtggatagaatagattgattttatcaagataagttatatatccaatatacaatgttcattttttttaaaggattcctccaaccctggtctcactcctagataattttcttccattttgtgaagataagtggttcttgtttgccgataaccatttttactgtgtattctatgctttttacaatgggttgtatatttgtaactatctttcaatgcagataattaaccaattcccagttttctttcaggtaaatgttggagatatagttataataaaaggcaaagagtatatacctgctgacactgtacttctctcatcaaggtagagatgcctactgatgctcaaacagtgtagaggatggtttctctaccctgcattgaccttgtgatttctccaaggaaataaggaataaacgaagaatttaaaacctctctaataatttttatttaaacatttaaaaaattgattggacttaaagggctttttc

SEQ ID NO: 10284 - DNA, 6000 bp, Homo sapiens
ccaggcggccactcggctgtcctctgaatgacacgtgggcagctgcacgcagcggctgctcttggtctcatcccactgacgtgggagcaccacagtgaccaccacctgggcctcagcagagttccagaaaggagatgacagccacgagtccaagccacaagctcagagtcactctggctggagcccctcagggccaacctctcaagcccctcccagctcctctacaccctctgccctatggaggctgctgggtgatcctggaggcataggggagaggcaggggatctgtggctctgggacggatcacacccatggcagctgggaggcgacttctctgctgctgggtctcccttccttcttggggtcgttgtaaaccaatgtttgattcattctcgcttcgtttgaccaaatttcaaaaggggcaaaaaacaaagttgaaaagtagcaagcagacatgggaagaactgcaaattcaggctggaggggtagaggggagacggacccagggcccagagaaggatgtaggaaatgctgcctgcacttactggtgacattttatctcagggggtgagaagcatcagtggtattctgttccttatgcttttctctgcacatctaaaatctgcttaaaagttttgggccagccgggcgtggtggctcatgcctgtaatcccagcactttgggaggccgaggccggcagatcacctgaggtcgggagttcaagaccagcctgaccaacacggataaaccccatatttactaaaaatacacaaaattagccaggtgtggtggcgcatgcctgtaatcccagctactcggaggctgaggcaggagaatcgtttgaacctgggaggcggaggttgtggtgagttaagatcgcaccattgcactccagcctgagcaacaagaatgaaactccgtgtaaaaaaaaaaaaaaaaaaaaaattggccgggcatggtggctcacagttgtagtcccagctactaaggaggccaaggtggaggactgcttgagcccaggaggttgaggctgcagtgagctgtgatggcaccacggcactccagcctgggtgacagagcgaaactctgtctcaaaacaacagcaacaacagttacatcagcaaaaaaccaacagaaaatcatgcctctggggtcccttcccaccctggatgcagatgaggtgttcctgggtgcccagacagattagttcagccgcagagtaaagagctgccaccaggatcctccctttctaggcaaagacagacaccgcctcgccatccacttgcagttaagaatcaggtcggctaaaaaattagccgggagtggtggcggcgggcgcctgtagccccagctactcgggaggctgaggcaggagaatggcatgaacctgggaggtggagtttgcagtgagccgaaatcgagccactgcactccagcctgggtgacagagccagactctgtctccagaaaaaaaaaaaaaaaaaaaaaaaaaagtgaagtatgaagttatccaagtatctgatgatcgacttttctgttagtgaactggccatatgctgcatacactcagtgcagatttcaggagaaatccagccaaggccggccgggcgtggtggctcacacctgtaatcccagcactttgtgaggccaaggcgggcgcatcatgaggtcaggaggagatcaagaccatcctggctaacacggtgaaaccccttctttactaaaaatacaaaaaaattagccgggcgtggtggcaggcgcctgtagtcccagctacttggaaggctgaggcaggagaatggcatgaacctggggggcggagcttgcagtgagcggacatcgcgccactgcactccagcgtgggcaacagagcgagactccatctcaaacaaacaaacaaaaaatccagccaaggcctgatagaacaagacagcactttcctgcaagaaccatcggacagagagggtgaagctccagcatgtccagcagcaccaacacttacttctctttctgtgtccagaccgggtgtgagttttccagtccaagggtgtcatcctgagtgaaaggagcctcaagtttgctggccatgctaggacttagaatcctgtgcgtctgtggatcccgcagaggtgtctgaaaagtcacctgttgcggagtgaggaggagagcacctattcattagttcaagctgttacagccacaccagcagtgtcctgcagctcagaggtcaccaagaaagcaggccctagggcaacctggccagccacacactgtacaggtcacacttaccttcatagctttggccaggttcttgggtggcacattttctttctgtgacacacgaagaacagacgatcttccggtaacttctggtggcgaaaacaggaagtcgcaattttctgtatttttttcattgctgacatttttgtcgtttaagacctgcagactcattctggaaaagcagaacatgtttgtgtcagtgtgagggcaacactaccacattgtccagacacagacgtgacagctgctgcaaggggcacgaccacttcccacacaggtgtgctcattgctctggaactcacacctcccacacgtgtctcttggcagagaaagcctcagactgagtccccatcttgcttcagagactcactctccagcctggcagggggagccatgggcagcactgctgcttcctgggaccaagagctaaagggccttcaggctgagatggtgagaaagaaaacccaagcctgcataatctctactgctgtattactatatcaagcagaagtcaagagacggaaaagcccgggccaataagaaacccggatgagccagaggaagccctggtctccccacaggcctctgcgtgtgacgtgaggcaggaccgggcagtagagggcagaaaagcaggacagcggctctggtctgctctctcccaccgggctaggcagcgggacaagaccaggctgagagggtgaaggcccagaggaggagctgggagacgatgcgcaaacaagggaagcccagagctgagcaacaggtgccaaggaacttccacatcagagcctccagtcagtcccaggttccagggctgcccaggtcctcacgccggtcacccacacacttgccaccctttctgtctacagcgttcccagtctagggaatgacgtagggaaaaaggctgccagagagaaccgagtgtcgaccagggcaggaaccccacaggcacctggtggtggagggggacctggggaggctttgatttgaagaagagcaaagttggggagggtcctggagaagagagagggggcagccccggcaggtcggtgctgcagcttgagaagcccactgtggtgctgtgtgtgggtggggaggttaagagcagaagggaagcagggaaaccacaggcttctggagcccaaggagtagatgccagaccagacccgggcctggccactggcacatatgggacttacggacgacgcttaggttttcgccctgaataactgggtacagggcaggggaaggggtgctggatcgctgggggacccgcaagcctcgaactcagggagaaagtgactcggaggaagccttctggcggcctggaggagctcgggagagcagcagacccagccttagtcaggaggggcctttactgactatggaggcccgggaggggctctgggcagagaagggaccggccccaggctggtgctttggtgctactctggtgcacaagagggatgcggtgcggggggaaggtggagcggcgcagcaggtgcggggaagcggtaggggcccaggtgtccgccgcaggcggcctagatggagttggccccaggacggaggccggaagggaccaaagaacaacaggagggtccgcgtgctgggagccaacaaagagccaaggtgggcgaccgagagacaggagagggtcgaggagagcaaagcacctcggggcgcccgctccgccgtcggtcttggcccagctctagccgcccctggccaccatccagggggcccagcccggcggtcggtctagggccgggtcccatgacagggcgcggtacaggttctggcggcggccccaggaggagccgtgggggacgcttcccggggaaagcggcggccggggcgggagggcgagggccgagggcggggcggggcgggacggcctcgcgcccccaggaccccagcctccccgcgccgtgtagccgctctcctacctgcccgcccgcccgttgccgggctctgagcccgcgccgccgccgccaggaaggaggggtccgcgtctgctccacgccgggggccaagcctagctgctaccgccgtcgcgcttctagcccttgatggccgccggcgcgccggagtttcaaacgccgacggttgccttcgcgcggccaatcagcgcgcggccgggggcaggaccgcaggagggcgggcgtccaatgggaagctgtgcctcgccggctccgccctccctccccccccaccccccgctcgggcgccgacggttccgtttccggagtggagggcacgccagggtgtctgaagctgagaccccgggctcgcagtcgccccatgaatttcgagttccgcaactgacgctactgggcggggcttcatggccagggcctcgctcaggcctaagtttccccacctgtgctcaatgcacaggtgcggtgccgcctccagggccggccgagaagagaggccgcacccgcacggggactgcatctcccagagcgccccgcgagcggccgagcggcgggactccatgccctagagtgccccgcgggcggccgggcggcgggactccatgtcctagagtgccccgcgggcggccgggcggcgggactccatgtcctagagtgccccgcgggcggccgggcggcgggactccatgtcctagagtgccccgcgggcggccgggcggcggccgccgcaaccgacaggtccgggactgggcgctgcggcctcgtccgcgcgccggggcgggggcctagctcgacagcttcccggcggctgcgcgatggacagccccgaggtgaccttcactctcgcctatctggtgttcgccgtgtgcttcgtgttcacgcccaacgagttccacgcggcggggctcacggtgcagaacctgctgtcgggctggctgggcagcgaggacgccgccttcgtgcccttccacttgcgccgcacggccgccacgctgttgtgccactcgctgctgccgctcggtgaggctgctcgggccggccggccgcatcctctcctgcgcagggcttgctgggaggtcaggaggaggcctccgccagctccccgaggccccgaaagcgcctgggcgcagctggggagaggcgccggtcctcatccagagggaccgcggcgtgggctgagcgcgcttaggggcgccgccggcactgacttgcaggtgacgggaacccaagttcagaaccttgggcaagggatgctccggcccaccaagtcctgaaccgtcacgtgcctgggggttgcaaggccaagcagcccttgcttgtcgtggttgggggcagtggccaggagaaggcaactgttgattgagtccaacggaaggggtcggaggggctgtgtggagggtggcactgcactaggccttggaaggtgggtgtggagagaacaggcggatttggaggcagttccagtttgggggcgccacaggggcagaggctggggagggcctctgtgcagtgcaggtgggacgctcagagttgtccaggggggtgctgggctgggccccaggtgctagctggggctctggaaggtccctctctcagctgattggatgacggacaggtgggaggtggggtgtgcagtggctggagggggatttcaagggggtacctctggaggacacgggggcagacgcagccctgggaggacagatggccagtggctggccaggtttgccactctggggatacaagaggggtgaccctccacatcctggtttgaggatg

SEQ ID NO: 10285 - DNA, 6000 bp, Homo sapiens
tgatcaaacttaaaaggtaaacaaattggaaaaaaagtagacttgccacatatttgaggttcaaagacagacagccttgatctatcaaaatatgcaaaaatgaaaattccaaaaggaaaaagacatatgcatagtcgattaacataaaaaaatctgttagcaaagaaaagcaaattaaaatggcagttcgccccggccaacaactatcacttgggaaaaatttatcaaaatgataaagcccgctgttggtgcaaacattgaagatggcctctcctgccctctgctggtgggaatttaaactacagtagtatggtaagtcctttctggaccttctttgaaaatatcaatcaaaagtctttaaaatggccaggcgccgtggttcactcctgtaatcccagcactttgggaggccgaggcgggcggatcacaaggtcaggagatcgagatcatcctggctaacatagtgaaaccccgtctctactaaaaatgtaaaaaattagcctggtgtggtggcgggcgcctgtagtcccagctactcaggaggctgaggcaggagaatggcgtgaactcgggaggcggagcttgcagtgagcagagatcgcgccactgcactccagcctgggcaacagagcgagactccgtctcacaaaaaaaaaaaaaaaaaaaaaaaatcccgtctctactaaaaatacaaaaattagccgaaattagccgggcatggtggcatgcgcctgtagtcccagctactcggcaggctgaggtaggagaattgcttgaacccaggagacagaggttgcagtgagctgagatcatgccactgcactccagcctggtgacagagcaagactccatctaaaaaaaaaaaaaaaaaagtctttaaaacgtttgtatcttttgatctagggattccaatgctatagcttttaccaggggaataatcacagctgtgtagaaataggcacacattttattgtgtttttatacaatcaatggaagaactttttaaaactagctttcttcttggaatgaagaacagtatcctaaatgatagatattaacattcactgagcactttccatatgccaggtacttttctaagagctttacctgtattctcattcctggaggcgctcacagaatacctggggaccaatggggcagctacacagcacagtgagagaacagggtggtactggtctggcctcagagtttcaagtaacagaaaacaactgaaattaaaattaatttaaaaaagggaaaatttaaccatctgtaaagtctcagcaatggataataacagctaagatttactgagagttttctatgggctgctctaaagacttcgcatgtattaatacttttaatctttacccaatcctgtgaggtgggtattattcttaaccccattttgcaagtgaggaaactaaggcaaagagtggataagatgctttctcaaggttcaaagagtcagtaatgacaggaccggcaatgacagccaggcaggcagctagctccagagctcagttccttaacaggattaactaaggcttggctagatctgggaggcggcgcaatgctaccaagacctcttagcttgcctctcagtgcttccttcccacgtgggctcccatttccagaacagcagccccaagcccaaactgacctcagagctcaccatatcaaagcaaccgtgaacatcttcccagcctaagacgtggaggatgagaggtctgttttgggtcttgtgccctcccctaggacggggtcagtctctgggatctgagcaggaccactatagaaagcagcagtggtttctcagaggtaggcagacacatgtatatccatattgaagacaagttagctgtgctcaaggaccaaagtaagcacagctaatggagttcctgccgtgtgctcggtgtttgcaaggtactgggggataccaagacatggttgtttctcccaatcaactgggggaaacacagggcaaaaggaaaataacaataaagcttggtaattcttggaagagagacatgaatagagtcactggaacccagggacaagggaacactgatcaaggggcgaacaggtgccggatcttgaaggcctggcaagccaaattactaagaatagtaactactgctgtttggaggcaaactatgtatgccaggcactaagctaaacaatctgtatacatgtatcttcactccaatacccgatgtttcacagatgagcaaactgatacttagaacaataaaataacttgcccaaagacccacagtgatggaggcaggatttgacagtctatacacaccttggatttaactatgttgctaagggggggccagtaaaggtcacaatgaaattcatttgttccccacaagtaatccacattgaaaatgaaaatttcttaattggtagcaaatctggtatcacatatctatctataattagggtgccacagtacacacattgaagggtttcttttcttttctttcttttttttttgagacagagtttcactcttgctgcccaggctggagtgcaatgggtggtcttggcttactgcaacctccacttcctgggttcaagccattctcctgcctcagcctcccaggcagctgggattataggcgcttgctaccatgcccagctaatttttttttttttttttgtatttttagtagagacggggtttcaccatgttggccaggctggtctcaaactcttgagctgaggtgccacctgcctcagcctcccaaagtgctgggattacaggcatgagccactgcacctgcccaaagggcttctttaatggacctcagaaatgaagatgtggtcattaaatactggaatttttccaacctccttttaagtatcatcaatatgctgtgcaagtagtgccatttaaaattgcagagaaaaaaactctggaaggatttcagatccaaattcaaaggccccgaaaccacaaaaggagaaacctgatctgacctgaacataccatgtatgggaacctgggatagcggcgatgctcttgggagtattcagttaccacggaggccctgcactgaccctttttcgaggagacaatcaacagaagattgtatttgatgggacaaattcacttcctgttaacaaggcttctaaccccgtacgagagagaagagagggcaaagacttcagttgactttgaataaatgaatccagttctttaggagtcttgaaagaaaaaaaaaacagaaaaaaaaaaacaggataaaggaggtattgtttagaaaggccatatgatccacccagctgttaaatcctgtgctccgaagggggaagaaaggctgaagaaatgataaatcagtagggatttggtatttctctcttttttttaattttttttatttttatttttgagagggaatctcactctgttgcccaagctggagtgcagtggcaggatcactgcagcctccttctcccaggttcaagtgattgtcctgcctcagcctccagagtagctgggattacaggtgccggccaccattcccggctaacttttgtatttttagtagagacggggtttcgccatgttggccaggctggtctcaaacgcctgaccttgtgatccgcccgcctcggcctcgcaaagtgttgggattacaggcgtgagccaccgcgcgcggctggcactcttttcttgagtatttcttattacattccttttacaaacaccccaacacatcgaagatattaaacagtgcctactaattcaaattttacttcctatgtagctggctctccacccctgtattcaactcacctgaaaccactctccctgctctcccacactgcagcagaataaactgccctttatatgtacagtgtttctattatgccccatgtacagtgtttttattatggcactgtattgaagctgcttcctctactagattcttctgtcctcaccattttatcacatgcagctgctcagaaaatgttggctgcattgatgaaatgctttcatacatttacaaatagagttttcttgtaatatacctctgtggttttctttggacaaggagctcctcacgtgcaaggccatgtcttactcatctttatctccactgctagcatggtgcctaacagctcctaccaaatagtagatgctcagtaaacgtttgcgtggctaagcccaccatttctcagcacatgacacgctgggaaacggctgggagagtaatacgcgggattattgacgaagaaaaagttgtgaactcgtaacacacagtttgtgggcgtgagcagtgtggaaaaccgcagtttgctgggaaagcaatttagttccctcggttcaggctgggaggatttttcacaagtggcgaggaggaggctcacatgaaccacatacaggtacttctcactgaaacgcacaacaaatctagagccaagtgtaataacgaaacgggccccaagaagtttatttaatgcccagggcccccaagtggtcactgccaggctctagcatcctgtccagcaggcctttctcctcctttcaagtcttgctggacgactcctgaaaagcaaaagtaggaaaaaaactgggggctgagagtggaaggctggacagagggtatgtctcctgctctggcacccggaagcctgcgagggcttcggaagcgcagcgtctcacggtcgcgcatcccggccctggacgcatccagcggcagcggtaatcctggtcctcctgggcttccgtaggtcggaataaacttgggaactcttccaccggcaaagctcagtgttttaaaattcaaatcacacttgccgacatgagagcggaacctttgaggccgactccaccctagctgctcgctaactaaacagcgaagagaacacagtctccaatccaaacgccaggaggtccagacccggagcggacgccggaagcgctgtgtctgacgtcacttccgtcgcatttcggggcggtaccaagatggactcctcgcgggcccggcagcagctccggcggcgattcctcctcctgccggacgccgaggcccagctggaccgcgagggtgacgccgggccgggtgaggcgcgcaccaagccgccccgaggttctcagaggcgaggcgtcggaaaacggccggcctccggcagccctggcccagtctggaaggactgagtttcggctttgcaagtcgaatatttaatgtcagggaagatccttagaatcgcggagtgctgtgcatcgtcatttcagctgcgcttcagaattctctggagagctgatttgacacctatttggaaatagcgattaaaattaaaaatacccaccagttttaagtcttaaggatttaccagaaacatgcgtgtaccgcagtgtacaatgatgtgcgcagtgtttcacttcaggattgcttgtaatagcgaattactggaaatatctgccttgcccgtcagcagaaagctgtttaagtaaatttgggtatatgtatacctgacacatcaggtcgactcgtatgtaccaatggggatgattttcaaagggaagtgtggaacactatggtatgccgccatttgggtacaaaacaggtaacttgtgatgtatgttcacctgtgaatgcatagaatatggaagaattcagtagaaattgtaagtggtggttgcttctggggattagatctgaggttaaggatgggagacagatacttcattttggatattttttatctcatatgttttaaaaccacgtccatttattaccttttaaaattaaaaacacgaataacctcatgcccaggcatgatgatgtatacattttgaggatatcccagaatattacgaacatgcttcccagggtttccgatggtcatctaaaggcccaaaacctcagatgtggaccattgattctcacgtgaacctagagggcatgtcagaatccccggaaaacttaatagaaatcatccatctgacccaacccccatccacccattctttcagattgc

SEQ ID NO: 10286 - DNA, 6000 bp, Homo sapiens
atctaatatgcttagaaaggatgctggcacatcccctcaataactgttaatcataattcttacttttcagttttcctccacataatttgtatttagttgcaattacaggtactcaaagcattgtgttctacttttaaaaatataatcttgttcataagttttatttcctatctctttttcattaacataggtaatcttattttattatttaattaattaattaacttatttagagacaggttcttgctctgttgcccaggttggagtgcagtggcacgatctcagctcactgcaaccctgccctcctgggctcaagcaatcctcctacctcagcctcccgaatagctgggactgcaggtgagcaccaccaagcctggctaatatttgtatttttagtagagatggagtttcgccatgttgtccaggctggtcttgaactccagagctcaaaagatccacccgcctcagcctcccaaagtgctgggattataggtgtgagccaccatgcctgaccaacataggtaattttaaatgacagcttgacattccatactgttaatatattttacttaaacatttccttattattggacatttattttattattataatgatcttataaatatactttgcatatgatgctttttatttcttttgaattatttatttagcatctcttcccagaaatatgattattgattctgtgtccaatatttgaaactccttccttctatgcaatagttctaaagaagcaactactttcagcacatgatggaaggagaagcagacatatcataggatcacaatgaagtcatcttcatgtaggaacagactctccatggaagactgataaggtctgcattatcgtcattgtcatcatcatttattcatcaacaaatgtattaattatctatgatgggccagtttccttttcagtaggaagatggttacaaaataaaaccagtgacttgcacaaaagaatgcaagaagctggccgggcatgctggctcatgcctgtaatctcagcactttgggaggctgaggcgggcggatcacaaggtcaggagttcaagaccagcctggtcaacatggtaaaaccccatctctactaaaaatacaaaaattagccaggcgtggtggcaggcacctgtaatcccagctactcaggaggctgaggcaggagaattgcttgaacccaggaggcagaggtttcagttagccgagattgtgccactgcactccagcctgggcaacagaacaagactctgtctcagaaaaaaaaaaaaaaggcaagaagctataaatacaaatatatacacacatatatttttgcaaaccttccaggttgattctgcatgtcttcttctgtaccatgtggaatctacatgtaagttaaaaagaggcattttcgtctctcaaggaactgaaattatgtcaacctgatactgatcatctaaacaaataaactttatggaagccatagcgatatcttgtaagaagggagagtcttgtctcccaagaagtttatattaatacctttttctctgtatcttgattttcttaaaataaagatggttttactaatattgtttgagtcttctttttggaggcagggggagaaatctttttaagtcaactactagattccttcttttgactagggacgaatgtaaaagtttgaattatacaggcccaaatgtagtattctgttttcacctaaaaaataaaaattaaagaaagactaaatcttttttattaatcccaccacattctgagttcagtttttacaccttttccttaatgtagttgaagttccctaatggcctcttttttttgtctgtctctctgtctctttctcaacaccttgctgaaaaaaattgccattgttctctattatgtgatctatggatggtatacctgtggcaattgcctacttaaactgtatgattgatagtgtaacaaatgtcttatttagaaaactataactttatgaaaattaccccaactattaagaattatgttggatctaggtgttttatttacagatctgttctctttggcttttctgagagttagtagggacaatacagacacttttctctcttttaatttaaactttatgaagaaattatgtaagggtctgggttttctgccttttcaaacttcataaacattgagatcctcattaccattgtcaagaatatgagctaccatcacctaccaagaacaggcaaggcgaattggaaactggttcttctaaccatcataatatcagttaattccttaaggcagtagctcttacctttttgggatcagtcaatatgataaaagttctaagtcctctcacttaaaaatatacgtacataagcatttttcttgggagaaaattaactgtattactataattatatatctataactctctttcctgccccccaacacagtttttttgcatagagtttcagatggtttatggtcctgtcccctcaaagtacatctgtgctaggggaaattacgttaactagccaaaacaagtacctgaatgggacaagaggcaggagagactcgggtagggaggagagagtagatcataaaaaagaaattttactagattcattcaaagtactagtcattatactcaaagtcctcactggagagaggatttgtaatcagaaggccttggtccaaatctgtgccctcttcccatctccccttttcctagatagttgtctgacttttggaaagtcattgaaacctctctgaccctcagttgttgttgctgttattgttttccctgttaaatcagggttccccaacccgcaggctgtggaccagtaccggtctgaggtctgttaggaacctggccgcatagcaggaggtaagcggttgagcggtgggcaagggagcaaagcttcatctgtatttacagccactccccattgcctgcattacggctgagctccgcctcctgtcagatcagccttggccttagattctctcaggagtgcaaaccctagtgtgaactgtgcattcgagggatctaggtggtgtacgcgttacgagaatctaatgcctgatgatctgaggtggaacagtttcatcctcaaaccatctcttcctgacacctgtccatggaaaaattatcttccataaaaccagtccctggtgccaaaaaggttggggaccactgtattaaatggaatcttgttagacttctcagggttattacagtgatcaaaggagaaatgatataggaaggcactacttttaagtcccaagcaagcatgaggtgtgataagtatcaaagcacttgccattcccttagcttcagccttgggttggccgtctgtcctatcattcaggtctcagctccactgttaccccagagaagcctccagtaacatcatatctaaagtagcctccctctccctttcactctcaattccatcaccctgctttattttagtcaagacacctcacttacgaagtggtttaattttttgcttgcctgttgatcatgtgagacaagtaacaaacgttaagaagccatgcttgctcatttctgcttgtcagcataatttcacacagcccctgactctgtgaccacctgcagctggcggaaagatgctttgaagacaaaacgagatagaacacaggatcccccacgtctcttgcctgagcccttgccttttactgcacctaagataaagtctgatgaggttagtgattatgcttctgtaatctataaacagatgtactcttaagcccaaactgtgatgtgcttttacacatactgaatcttcaccaactgtttctaaattgagaagggaagttctgtgttggagggatctgcttgaatctctctaaaagactcctccagggctgtaggcctccatctctagtcctcagtaagacttctgaataaaactaactttcattctttaacagcttgatttttaaattttagtcgacaatcacttattgtctttctcctacagtagaataaaagtttcctaatggcagagtccttgcctcatcttccccaggcatgggaacagttcctggtataggatgcacacagattttgctgattcaggatagccgtgaataacagtggagactccagaggaggaagacctggatttgaagcccagcttctcaacccagcttctcaatttactagttgggtgacattaggcaagttatttagcttctctctgcctcacttgcaccgtatgtgaaaagggggattctgataatatacgcttcagagaacttttagtacatgtgaagtacctagaacagtgcctggcacacagttaagtcttacatgtgttttctactcttcagtgagtttaatgttaacacattaatagtgcacgtgaccctctaagtgtatcagatatgcactgctccctcgggtttcacaggaaaaccacttactcttttggtaaaacaggctgcatggctccactgctccgcgtcacccgcctggcctcccaccgcttagcggaaggggaggtgcggttcctaattccgacaggcacgtagtcttccacaagtggcactactcggggctctcctggctaggggcgttcgagccactaggggcgggtctcctgggatgggaagactggggctagggaggttcaacgccgcccccggaaacctaagggacgctccctgaaactcaccgggacgcgcttccgacccattccggtcacttgccttgaaatcgccgcagggctgcgcaaacctgccacccagggcccaagcgaccggggcggggcgatcgaggactgggcgggcctgcaggatcagaggcggggtagggcgtccacggggccagcaatcggggcggggcggggtgattgggggcgggacggggagatcagagggcggggcggggcgctttgctctggactctggggcgctaggctccggactccgcggcgcagactgcacctcgcagtctccccaggtccgcccagcagccgcgcttcagccaggtaagggcgccgcgggcgggctggggcggccccgggagtgcgatactccgggcgaggacgggtggggagggggatgagcgcggcaagaggcggcttccacacgcccctcgaggaacggggaaggattttctcccctccgtgccgcagtgagcgcgggtgcgccgtctctgggtcccctcttcggtccgggaaggagggacaggtgcgcgcagtggcgcagcctcgccttcctgccggcagtagattctccacttctccaactcccgcactgacctctcctaaggaacacccgcccctttttcttgaagttccaggcctgaggccgccctgcggcaagttcagcgttggggtcacgtcccagcggcgagcagggctgatgcctcctttcgggttgggcggcggcgcgatcttgattgaaatttggcagtgtcgagatagatatacctaatgtaaatgacaagttaatgggtgcagcacaccaacatggcacatgtatacatatgtaacaaacctgcacgttgtgcacatgtatcctagaacttaaagtattaaaaaaaaaatttggcagtatcggccaagatgttccgcagttgcacgtgactcacccagtgaagttcacgttctcttccccacccccccaataccccgcccacctcgccccgggaagttgtgtttgaatattgaaaacaggtgcccggccaatgtatgtacttcttggaaaaactagggccttgacctgggagtgtacactttcctaattttctttaatcctaaatttcttgtggattttattttattttatttttcccgtggacgtgtaacatggtggtgtgtaccaggtttggaaacaatctcatccattgctattctttggaaactggaatatttgattcgaaagattgatcttaatgttaacttggaacaacaggatggctggtggctaagtgggtttgaagattatccaaaatagttataagttttgcgcgtatt

SEQ ID NO: 10287 - DNA, 6000 bp, Homo sapiens
ggctaccttgagcatttcttgtaggaacagctagtggtgatgaattctctcagattttgcttgtctgggaaagactatttctccatttatgaaggataattttgctggatatagtatttttgggtggcagggtgtttttttttttttttttttttttttttttttttttttttttaacactttcaacatatcatcccattctctcctggcctgtaaagttcctgctgagaaattcattgttagtctgatgggagttcctttataggtgactagatacttttttttttctgctgtttttagatttatctatttgactttagaccttttgagtataatgtgtaatgcagaaatcctttttgcattgtatctgtttggtgatttcagcacctcctctatttcagctgtctatatttcttgctagacttgggaagttttcatctattattttgttaaacaggttttcaaacacttttgttttctcttcaccttctgggactctgataattcaaatattttttcattttatggtgtcccataggacactaaggctttgctcattcttttttattttgttctttatttttgtctgtctgggatatttcaaaagacctgtcttcaaagtctgagatttttctgtttgatctagtctattgctgttcttcagtcccaaaatatgtctgattctttttgtatgatatctatctctttggtaaatttctcagtcacatcctgaattgtttttctgatttctttgcattacttttggaattttcttgtgacttactgagcatttttagaatcaaatttattttgtgcctgggatttcatgaattattttttaattggtatcctttgctggagaattgttgtgttcttttgaaggtgtcatattctgatatggtttggctgtgtccccacccacatctcatcttgaattgtagctcccacaattcccatgtgttttgggagggacctggtgggaggtaattgaatcatgggagcaggtctttgcttctcctttgccttctgccatgattgtgaggctttcccagccacgtggaactatgagtccattaaacttctttcctttataaattacccagtcttgggtatgtctttattgcagcatgagaacagactaatacacattcccttgctttttcatgttttctgtggtctaacattgatatctgcacattgatgtaacagttgtttctttgaatatcttgaatttgctgtcatagagggcactttttcctgaggttgaatctatggtgttgataactcaggcactttagccttgattatcggtgtgtccattagtgtagtctccgtatgatttatttggctgtaaatattgtcagtggtatctgttattttcttggtggtttaaagtgatgttattaatgaagctgtggtgcagatatttggagactggcacaggtaggccagtctttgggccccagtggtggcaatggtgggctaaatgtacctgttcttgggccccacggtggcatacactggtaccattggttccaggaaggctgattttggggcctttaggtagcttacttagatgctgattgttgctacagtgggcttgtcaagtgggcaggttcttaggcttctgtgcagctgatgtgatgtgggtgatggcagtggcaggacaaccacttaggtcctaggcagtgtgaactggtgttggtggtggctgcaatgaactggatgagtcaatctccaggcctgcaggtggtgcctgcaggtaggtgtcagctatggtggtagtggcaggtagataggcttaatctcagactcttgagaagagtattcaggtgccaacagtattgggctgggtaattctctgttttccatactgtgtgctctggcatgtagcagggtgttgaatccaggtggggtgggcttgttttttggtttgtgattgtataggctatggtaggcaatgccagggcaatccttaggccattgggaggatgctcaagtgaggagtggcagtggatgtgctgctgtcctgccactggcagaggcagtgccaccttcagtgatagcagcctatgctggtgggtgggaatctgtgcactacttatgccttagcccccacagtgcccactcctcaggccctgctgtggtagctggcacctcacttgcatcttagccctgtgtgcattatgccatgattgcttctgcctgtgccacaggggcaactgctgctgcttctcttgtacctcagtcccagcaccactgggctctaggacagcgcatagttgtttgggggtagggctctaaaatggcaccttgtggtagctgcttaggtatccaggaatttgtggaatccagtttgggcttcatcttggggtactgttgtcacacaatctctcagcagctccctatgttagtttaaaggcttatagggttgaggggctgtggcaaggattgccaaagtccacggtagacatttggacctctgagtgtctctcaccatttccctgtattggggagtctcttggctcctagccagcaatggcagagcaggtcatcttcactcccctcttcttgcttttggtattccctgttacttttctgttaaattctcatgttttttgacctattcaaagtgtgattactcactaattttggtacttttagtggaggaggcaagtgggaagtgcttctagttattcatcttaatacccttcctcctatttatcacaattgaagcaaagaacttgagacaatgtattgttgaaaagagagccatatagacagaagagtttagaaaataccacttttgaagtctattgagaacaattagcaatatagtgctaatcacaaaaaaaaggggtgagaaaaaataaagtacctagctgtgctaaggacattaatatgggacagatactattttaagtcctttacatttattatcccctttaaattagagacaaatattatctccatattatagagggaggatctgagatgtagaaaggttaagaacattcctattttcacaaaggtaattcatgccagtgccagaaactgaacccagtcatcttatctagtagcctggtatactgtcaccccactgtggtaaagctattatgtcagagaaaaaaatgagttattttacgtagtcactgaaagctgaaggagggggaaaataaaaaccaataaacacaaactttaaaactattcaaataaaagatcatttgaaagaatggccaaacagaaaatattccgatgggagacaattaaatctctatttttgagccattaaacataaaacagcttctactgtaatctctaactttttaaacatggttaaagtaaatattgctgtatctcctaagttccccccaccatgtcctgtgattcaatatgaaaacactgattttcttgagagaataaatctatacataccacatgttttaatccagaatcctcaaagctggttgctggacttgcttgtaattacttggacatgtttcttgtaaagcctaatttccctcagttaagccacagagcttattgtctgctgtattattatttactaatgtaagaggctgagaatatatttatgaattttaacaaataaggattataaaatattagtttattattaatgtgaaatgcttaaatgtaaacatgaaaaccatttaaaaagaatatttacacaatgttaatttcaaattagcacaaatactactacatatactatataaaaatgaaaataatcagttatatttatatactaaacaaatataatttttctagcacctttttattagattttggaattttttacttttgaaaaaaagtaatgctccaaagatgaaagttacttttgctaaatgaagttatagttttcagtgtgaactgactggtaaattttattaactacttatttagacatttttagttctactcaaaattgtattatcatatgtcttctgtcatattgttggtgtttatacaaactgacaatctgtttcatttttttcatttgtcaaatgttttggaaaatatagttccttttaatacctttgcagagcattataatgaaagtattacaattagaggcacattgcatttttagcattttagatgaagatattctgtacaaccaaagtaaaaatttatcatttttctttaatatcctttgactctgagccttaatagctcttaaaattgtaatttctattttgtaacttttctgatctttataagaagttcatgtatttatactaaattctctatagatatatgaaagtatttaaagggacggtttgtaaatactgggaattcataccactaagatggacaaagttattcctaataataagaaagaagaaaatacgtttttgcttttgatatttaccttccttttctgccttttttggggtaaataaattgtttcaatacgttctattatatttagagctaaaatggacagtattaagaaaagctaatacagtcctgccattttccttaggaggaaagtaagtcccaataagctgaataatggctgagacaggtgccctggttcataactcaggtcttctccactccgctaccccttgttattccctcaaagggaagagactgaacatttctaatgaacaaataagaagtgccatcagtgtgctctagtgtgttttgttttgttggtttttttttttttttggaaagcaaactggggccacacctcaatgcttatcatacttccccaactggaaaagtgtggtcttctgaatcatcacaagttgcacattctgagccctctactacttggagcttctctatgcggatattgacaattacttcactgtgtggagccagttggcacaaaactgatcatgttcttgttcttatcaggctagaagactgcatacctcactcactaaacctgtcaaacttgtttcctttcttgttgccagtgactgtcattattttgcagcctccaagtcctaacctgctgatacagatcagatggtgactgaatagaagctgccccagtcctgggttcatgatgtacgcgtaagtattcagcttttctcagtaaaggttatcagtggggacagaggtttacaattcctgagacaggtagtacagatgttggctggtggagattgatttaaacattagagttttaatgtgtgttattgtattttatattaaagttttattgttgttgtttttaaatatcagaatttttttgaacaacagaggccaatgtggtgttttttgtttctaaataaaagaaatagaaatgatgtgaggtaataagttaactatattaatatttaaaacatttagtaaaacctacacttcaaagaataaagtgtttaatatagcccatttagttacttttccatgttccatagcatggtatacatttttatcatatgttgcttattgatgtatattctgggaaaattaaatataaatttaagaggagagtctactagaatttttatttaactctaatagaaactatgataggttattttgtatatcatgagtgaaatgattaaaattaaaatactcatatgtaaaaaattatcaaattaacaaaatctagactttgtatcatcataattgaactccaaaataattgatcaattgttgaatttaaggtaaataaatttgtattatatatttatgtttaggtaatattcaggctattgttttatagacttcgaaaggaataattgatatttgatggatgatttcattcaaacttgtgctaagtctagccttgtttcttaaaaaggttctcgatctttctacagacacaaatttcccacatgttctgcactgactgatgtttccaacttaatcatgattttgtgataattttaattgttcagtcatttgattttgtcttcaattaacctaaatacttaaagcctgtaggctctggcactcttaaatgatgagtgttcctgccctccctaatttactttcaaatgacagcataagcct

SEQ ID NO: 10288 - DNA, 6000 bp, Homo sapiens
aaggaattccctagagctgggtcatgatggacagtactggtaagtttaagcttctgattttgctattttgagaagtaggtcctaccagaagtgagtgtaccaaggaacagtgcagtaaaaaaggcctcttcgttatttattagggcagtgaaactactctgtatgatactataatggtagatacatgccattacaaatttgtccaaacccatagaatgtacaataccaagagtgaaacttaatgtaaattatggagtctgggtgataatgatatgtcaatttaggttcatcagttgtaacaaacgtaccactctgatggggcatgttgataaacggagaggctaagcatgtgtgggggcggagggcatgtatggaaaatctttgtatctgccacttaattttgcagtgaacctaaaactgctttacaaaatgaagtctattatatataatgaataaataaggaaataaataaataagtaaaagatgtctgaggatgaaaaaaggcttctgctagtttgccagccaatctaactcaaaatattattgcaaatgaaaagaaaatagtgctaataagaacaaaatactatgtagaaataaacaggggaggagaaggagtctttctttctcttccatgttgtaaggattgaataattaacctgtcagtgtttactaagaacatggaaggtatggaaactagtataaaacataaaccctatactccaggaatttatatcctacttggggaaacaagtatgacacaagtagaagaatatgtgataattaattcttatgagatacatgcaatttgatctcagaaaactataaaatgtatgtgcgccagggttactgtagaagattcagttgtaagtcttaaggttggtttgaataattttgaagtatacctagatatgaatgacatggtaaagcttttaaaaaaacagaaacccaggaagaggaagtgcagtcatgaggtggataatcccagttgctacagagcatttgattaattcttacccaagctgacactgaaacttcaggttgaattgaaactgagacatgcagtctgtgggagtgttcttggaacaaatatatgtttcttaactcactcatttaaagaatgatgattcaatgtaaccataagtacaacatgatgtatgtgcttctctttcataactgacagatcttttgtggctatgaagctaaggggagaaaatggcataaacactgacattttaggctttaggctttgttcaagatggaagaaaagatcatcctgtttcagcagcaacactgctggcccgtgggaagttagagaacctcatcagtctacagtggctatttctgatattagagcaaatcaaaaggaagaatggatgcgtgtgaaatgattgagatttaatacaaacactttatcattttcaaatgtttaagttttttaaagatgtttaaaaagttaattgactataaacatcaaataggatatttattagttatagatatttgtattatctgtttcaacagataaattctcaaatcttgatgggcttgtaaaagaaaagtttatttcaagtttatgcaaagtccaaaatgtggtatccctgaagggcgggtagatctccttatagtgataccatattagttttggcaacttgccttttgtatatatatatatataaattttcaaataatttgcaataaaagttactttccagcttgttttataaggctaacataagctcagctgtgaaacttaacaacgaaaataaaagacaggaaaattatatgtcattgtctctcagaagtatgtatcaaaaaatcttaaacaaaatattagcatatgaaacccagtgatatataaagtgtcataaattgcaatcaagttgaggttattccagaaatgcaaggttggcttaacatttaaatatgagtcaatgtagatcatgacattcataagataaaagtagacatgattatctcaataaatgcagacaaaaggatttggtcaaattcaaactctgtttattgtaaaaacgtagcaaacaaaaaacaagacaatttccttaatttgataaagtgacagaaaacattctacttagtggtgaaatacttagtctttctctgaaattgggaaaatagcaaagaatccctgctatcaccattccattcaatagtatactggaattctatgccataagccaaaaaaataaaaaaaataaaaaaaataaaaaatcatttaatcaaacaaaacaaaataaaaaatataagcaatggaaaagaagtaacactgtttatgcagatgacaagacgatgtacatatatgccaaaaatttgaaaagatgtccaaacaaaaaaaattaataaattaatccattttcttgttatataaaaatcaattgtatctcaatatgctggcaacaaatgtaacacaaaattcaaggaataatactatttataacaggacagaaaaatatgaaacacatagattaattgtagggaaacaggtatgacttctatccagatattgagaaaaattaaagaaaatctaaatggatgaatgtataccaagtccatggattggaagctttactattttaagaagtcaattatcctccaatttatctgtacattcaatgcaatatcaacaaaattctagagatttctctttagaaattgatcagatagtgttaagatttagaagtaaatgcaatggactgaaaaaagccaagacaacattgaacaaggaaaataaatatggacttatattaccagttatcaagaccttttataacttcattaattaaagcagtgtgatatggcacaataatggcaaaattaaaagccaataaaaataaatacacctttaatcccacttcatcatgtacacaaaaataaattctatgtgaattattaatctaagtgcaaatggtaactcactaaagtttctagaataaaacatgggagaatgtctttgtgaaaagcaaagaattcttagaccacatacacgtatacatgaaacactaaacttaaaagcaaagattgataaattttaaattaaaattaagaaattctgttctttaaaagttactgtttaagcattccagtaatggcaaactaccttatattcaggccttctagagttaataattatacactttggaaaataatataaaaattaaccatatgaaggcagtggagagtgacaaaaaataccagaaactgaaggaaagccaatccaagaaaggaaggaactgtactgaatgatatttggaaatcttaatatttaaagacaacataatcatctatatagaaaattcaaagaatctaaagacagctattaattttaaaagtagctaaacaaatttgctgggcatgctacttactaataccaatcagtaacattcctacacactagcaataaataattagaaaatttaacaggaaaaatattattcatgactatgagaaaaacttcaaacagaggaataaatataaaaaagatgtgccttatatcactttatgagtaaaatgacaaaacaaaattaatgaataaatagaaagatacatcatgctgataaacagttaacaatataagatgttgaatctttccaaactattctgtgaaataaatagaatttctattgaaatctcaaaatctcaaaatattttcttgggacttaataatgggacttaataagctgatcctcaaagcatatggcagaatagaaagttaagaattaccaatataaatttgaagaagtgtttgagaaaacatatgctttcagaaatcatgacctactgtaatctgcagcaggggctggaaaactacaacccatggacctggttcaccatttgcttttataagtaaatactggaaaacagccatgcctgcatgtatttttttacttagcatttttggctgtttctgtgctgcaatgggaaaatttaatagttgcaatggagaccatatggcctacaaagcctcaaacgtttattgtctgggcactttacagaaaatgcttgctgactcctgatctatagtaattaaaactatttagtattgacagaagaaaaggtaaatagactattggaacagaatagagagttaagaaacatgcagattttgtatatgatataggaggcctcacacatccgtagagaaaagatgaactctgcaataaaaaagtcttggaaaacaggttattagtaagaaaaaataatttcaaattaagacaatataaaattaaattatcatttcatgtcattacaaaagtaaatggattcttgaagtttttaaagaactgaaatctctttacataatgaaatgtcaagctgcaccctggggacaggtaattaataaataggtgaacataactggttaatatccagtataataatacattaatatccagatcatataaggaactcacatataactataagaaaaaaagattagcaacccatttttttttccttaccatctgctgcctgttgatgaaaaactaaacttatgaacaggattctcaaaagtgaaaatccaaattccctcaaaatatgtgaaacgattattctcacaggtaattaaggaaaagcaaatgcaaaccacaatgaaatagaatttcatctgcatgagaatgatggcaatatttgccatattaaaattgacgtattgtaaaacgacatttgtcagaaacttttaactagttatagttagtttcaactgagaagagacaaggcagtataatggaattggtaaaatatagagttaggattacccctacatacttcaaagctgtttcttgggtgtgcctcttagctgaccaaactgggccgtaattttttctaaatcgccaagtcaaggaagtttgtcattcttgggttaactcctgtcttgaaactacagaaatgtgatggtcattaacactagtcagacaagtttcatcttatttgttctctacatcttacccagcccataaaaaccaagctccaacactggatgtagcacataagtcaaaagctgcgtcagaaggttctaacttttgtcatcactattaccagcattgtcatcgttatcgttatcttcgtcatcatcattaccaccgttatacctgatactgccataacaatcagaacattatgtacaggtaaaggggacttcactggggagagcaagttggcaaaatgtagcaagttgccattaagtatgttctagttttttgttaattgactgtttttataatttagtttttattcctggacactgttaagaaacactctattgtctgaggtctacagaccctttgaagtctctgggaaagtttccaaaagttaaaaagaaaaataataattcagcaaaattttgcttactgggaaagaatataaatatataattgacctgaaatcttaaggaaatgaggcataagatttcttttacaatcactcataagaacgctaccgtttttattctctagtaatgtaattgaaatcaaattttctaatattaaaaggttttcttaggaataataaaaaatatgaatgccattatatattttggaataatgtactttctaatatagattctgaattagcaacaggcaaactgcaggttctcaaaacttcataaattttccaatgacttcctttctgtagactctcttttgttcaaagttccaggagaaagtgaagaatagaggccattacccatttgttcattacacttctctgctccttatgcacaattctcaccctaatgatttaaagttttctatggaaaaaatgtttatttttataaaatttgaagaattttgcaccacagtcatgctttaacacatttcattatatgagataattcaggcacatctaattcaaatggtttataaatgaagttctaatacatgaaaattatatattttttaatgctttgctgtttaactcctaaagcagtgcccaaaagtggttaaaaggaaatctaaccactggcatggaccataaaggtaaaattgt

SEQ ID NO: 10289 - DNA, 6000 bp, Homo sapiens
tgggggcttgctttcttgcctaggctggtgtcaaactcctggcttcaaggaatcctcctgtctcagcctcctaaaatgctgggattacacatgtgagccattgcgcccagccaatgataaaggtctttaacattaagagaaaggatagtataggccaggcactgtggctcatgcctgcaatcccagcactttgggaggccgaggggggtggatcaagagatcaagagatcgggaccatcctggccaacatggtgagacccagtctctactaaaaatacaaaaattagctgagcatggtggtgcgcacctgtagtcccagctcctagggaggttgaggcaggagaatcgctggaactcgggaggcagaggttgcagttagctgagattgcgccactgcactccaacctggtgacagagcgagactctgtcacaaaaaaaatagagaaaggacagtataaaatactcatctgtttaaagtgtgccaaaaatatttgggcaattataatttaatttttaatatttctaatacttattaatttccaagcaattaaagagaaacacatgctttatttccagactatctaaatgaatcatataaactagctatgtataaggattattagtctctgagcatatgttttaaagcacagattcaaagattaaaatacaagtatgttagaagtaaaaaatttcaatggaagtttacctttagggaaacactaaaatagctctggtgttgtgtgacccttaggtaggtctacatcatcacaccttgagggagaatctgtcaaggattcaaataactgtaagaatcattttttctctgtaaaactagggaatacaggcatttccaatgagaattaaaataatttttatctgtatgggtagtttattaaagttggattgttttggtcagaaagttgataaaagagttaaaatactattgatgttttcatctatattagcactgatatataaggatattacaaaaataatgctaaaatgatcttttctttatttttcatttggttttcattttttgtgtaagtgtatatatacacccttagtgagttaagaaaaatttgaaattccatatgaatcattagggaggcagtgattccatcaaggaggaagtagattttttgaagacatcatcaagctgcaatttaacgttcctactagacaccaaatagaaacacagcagcattgttttttcatgtaaaaaaaatgtataaggtggtttttctgtcatatgtcatgccatatatattatacaactgaaattttggaagagtagtagaatcagaggaatattccacatcagttacttcacaggcagcaaccaaagaaatattttatataaacaaagagagacgagagagagactgttttaaaaaatacaataaaaaatacaacagttcagtgtaatgtttgcaaattacaatttatacaacggcctttttgtagttttgcagcttccacaaatagtatatctcacaaaagctgaagtaatccattaacacaatacttacaatgtttagaccttagaccaaactttaaattccttaaccctggcctacaggcattataagaaatgccccctaatgatctctgttactttatcaatcatccctctcccttactacattcttgtcatcctggcccctttgctgttcatgcgacaatcattcttgctcttgcctggtaacgtttgaactacgtcctaggatgtttccctccagacatttgtatagtttactttaacttcatgtacatctctattcaaatatcacctatttagagaggctgtccctgcccactctacctaaaatagttatcatcatttatgcttcatcttcttatccacattttcttcccagcaattttcactggctatttgcaaacacatatttgtactgtttgtgtcctctagttctccctgattattatgtaagctccatgaggatgggtataaggtttattttcacccataaaaggggcaattgaaaaaataaattactaaatattgattttaattttatgaattcttacattttagtgggagactgacactattaacctgttccaggagtttatccttagatagtgcttcatattttttcttggtatgttactaataaatccatgggcaaataagtattctaaaagctgtaaatattatgttgagttttccttattacgataaatatttagccatattgcatagggtgtgttcttctaaaagctcatgttttaacatgtcttatcaattacaaaaatgactttaaaataataaatatatctttaattaaattatttaaaactttaagtcaatcaaatcccaagagactttgtaatttcatgcacaagataaactgtatttttttgcttaattgagctaagcatttggtgagctcagtcaattataaatgttaattataaacatcgatttaaaaatcagacttgggtctgatattttgaagttcaaagcaacatttcttgcttcttcaaatgcaactgaattctggaatattaatgttcaattcaagtaattgaataatccaaatttaaattattaaaaggttggtattatagagatatacacatatatattattcttagatataaaaatattgaaaagtgaggctacctctatattataatgtttcttctgtactttactattttagcaaaatcagaatcaatgtcagtttatattttaaggtaattattttaaaagacacataactaatttaaaagagctttttatagctaagctattcatataaataatattgagttataaaatacagacatcaaaaggttgtattgcatagctaacagcaagaactaattattaacacctatttgaaatacagtaccttaactatcgtgagaacttttattgatatttttaaatcaaatgtttcttataacaaaatcaatatagcattttaaatagataattcgaccaatgcctggcaatcgtctgaatacatgagaccaagaaagattgaggataatcagaaactgattcatatgttgttctgttgattccacctgtaaacttgtttattcaacgttaattccttgaagtattaatgtgtaattaatactccagaattaattctataatcaatgactattacatgacaaagacaaagataaacagtattacgttaacactatttggcttctagtgtcttttatcttttaatatatgcaagccaacatacagaaacaaatcaacttataatatttaatccatgttttagggaaaaaaatctttcaccatttcctagaaaggaagattggactcaaaccaaaatctaggaactttacctggatgtatcttatagttattattgattattgactgctgtgtgcatccattttctcactcgtagatggaagtgtctgttgcatttttcctacgctttgggtgtgtgggagccaaaaactttattcttttagttcacaagtcttcagaccaagagtaagtacaacaaaggataggactttcctttatctgctcctggatctgatttagcttacaaaaatatcctgtgtaagaagcctgaacctgatgctatattgatatgagactattgtttgcattggaaggaaaaagtgtatatttcatgtcagaggaaacaaaatttattcccaacggaaaggatgtggctatttttaaaaaattagcaaatactaggtacatttctcattaaaagttgatgtgtatggtccacaccctcccctccatcctcactccaccttgaagtaaaacaggcttgtgcctaccttggtattgaaaattatataatataacttctaatactaggtcataaaaggccatttactttctgtcttgcttgctagaaatcccacttttggagcattaagccaccctttcatgctaatgccaacaatgcacctagaggccataagtaggcattctggtagacagtcctagagtaccttaaccttttcaaggcttcttataaactttgtgtttataagcatgaattagctttatccttagggcaagtttagccttacttaaaacagtgtagctttccttggatcttgtctgaatgttgcaagtgttcaatgaggattctactttctggctgttccagtcttgaaagtttccaaatcctacgtgaagtcttgggaaacttcaattcacaattcctccatatatgcaaaacctacacaaatgacatatgaggttcttttctgttataatgaagaaattaagttttgagctttgtagccaaaaagagacctttccatgaactaatacatctctccctctaagtgccagtctttcaaaatactggctagacgttatcatttcaaacattattattattgcaaataggggaactagttttaatatgctatcttgttgacctagtaaatatttccaggtataattgatttacaataagagacaatacagcgtaatagtgaaaaacaggcgctctggagccggactggatttaaatctttgctctaacccttactagggaggtgaatttggccatattacttaacctctctgtgcctcagtgttttgtctcttgaaaaggggtgggggaggggagattatcacagtatctacctcactgggtgtttcaggaaagttaaattcataaatataaataaaatgcttagcacagcaactggtaattagtactgggagtttgctgttattattatgctattgttgttataattaatgatctgaagaataaccagagctctataggtttatcatgattactaatgaagatgccactaaaaaaaagaattcaggagcatcttggcggtggcagcgagtttgaagatgcgacgatcaacgttgaagatcaccgctcgcaaccccgggcctggcgccgggtaggggcgcggcgctcgatttccttccctgcctccgccgtccccctggtgcgcatgctcagctcagctcggccctcgcctttgatttattttttttctgggcggccgctgcgacccgggactgacttcgggatgggaagtggagcccccggagctgctaccgtggcggcggcgctgtgaggagcagccagggggaggcagctgcggctcgccggtgagtatccgggaagcgccaccatggggctccgtaagaagagcaccaagaacccccccgttctcagccaggaattcatcctgcagaatcatgcggacatcgtctcctgcgtggggatgttcttcctgctggggcttgtgttcgagggaacagcagaagcatccatcgtgtttctcactcttcagcacagtgttgctgtccctgcagcagaggaacaagccacgggctcaaagtccctctattattatggtgtcaaagatttggccacggttttcttctacatgctggtggcaatcattattcatgccacaattcaggaatatgtgttggataaaattaacaagagaatgcagttcaccaaagcgaaacaaaacaagtttaacgagtctggtcagtttagtgtgttctactttttttcttgtatttggggcacattcattttaatctctgaaaactgcctgtcagacccaactcttatatggaaggctcgtccccatagcatgatgacatttcaaatgaagtttttctacatatcccagttggcttactggtttcatgcttttcctgaactctacttccagaaaaccaaaaaacaagacatccctcgtcaacttgtctacattggtcttcacctcttccacattactggagcttatctcttgtacttgaatcatttgggacttcttcttttggtactgcattattttgttgaattactttcccacatgtgcggcctgttttactttagtgatgaaaagtaccagaaaggcatatctctgtgggccattgtgtttatcttgggtagacttgtgactttaattgtttccgtactcactgttgggtttcacctggctggatcgcagaatcggaatcctgatgcc

SEQ ID NO: 10290 - DNA, 6000 bp, Homo sapiens
ctgcatccagcttgagacctttcagaaactctggaagttacctcagaacttcccagaaccgcccctctgaagagtgaagaggctagaacatccatccactgactctagtccaagagttgtcctcgggcgtattaacttatcacacttccaggttgtgcctgtgtgcagccaagcaaaagcacatggaacaatgaaagacctggggcagagaaacagataggcacaggcactgacatgggaagcagtcagcattcaggtgaactcagaagagggccgaggattcaggcacagtatctgctatggcagcccaccagcaagcggaacatgtacaaatgaatatttgatatgacctatttgaatattcttcggcaacaaggaatgttttccattcccttcaaaatacttaagggctgtagacataaatgctatctgattcactgtgatggtggacagaaaaactctccaaaggaaagctgtgtgttttaaatattctgtgttactattcagtgatccatcattttcccattgtaaaacatacatttgttcagacctgtggaattatgacatttgttttattatgatcatgtctattttgacatctttgtctgtatagcttcatagccataggtatccattatgatgctcatcatcacgtggttcacatacataataacatcatcagtgatttgaggacacttgggctgcattaatttttttcaaagagggcaagtagcagacttcacaggtgacctttactcagtgcctgctatatagagagttctttattagattctatggccatacatagaataaagaatgtataatttaacaacattatatactgcttagagaacagatattcttatgttttaaaaaagtagctatttatctgttcaaaagatgaaaataagaagttgatcttaaaaaaacttgaatgaagtgaggttttaaaaattcttatttttacttaatgtgtaataatttacattattagggataccaagtgatatttcaatatttgtatacaatttgtagtgatcaaatcgggtaattaccaacccatcacctcaaacatttattatttttctgtggggaacatccaacatctcttctagctttttgaaaatatacagtaaactattgttagctatattcactttatggtgttataaaccactaaaatgtcttcctcttacttggctgtaattttgtatctgttaactaacttttccctatccttgccagtctccaatgaccacaattctaatttctactcccatgagcccaatttttaaattcccacaaatgagtgagaaatgcaatacttacctctgcgcttattttacttaacctgctgtctcccaggctcatctatgttgctgcaaatgacatgattttgttcgtttttatgagtaaataaaattgtattatgcatatatatcacattttctgtatccattcatctgctgatgaccatttagattgagtctatatctattgtgaataatgctacaataatcatgggggttcacatatctctttgacgaactggtttccttttatttgaataaatacccagtatagtgggattgctggatcatatggtagtaatatttttagattttagagaaatttccctactgttttccataatgtctgtactaaattacattccaacaatagtatatatgagtttcaatttcttttcatcctcacacattctggtgaattttattttgttacttttgtgtgtgtgtgtgtgtgttttcagagacaggggtctcactatgttgcccaggctagcttcaaacacctgggctcaaggaagcctccagcacatcctcccaagtagctcggactacaggcatgcaccgccatgcccatttgctatatttttgataatagacatcctaaggagagtgagataacatctcactgtggctttgatttacagttctctaattatagtgatattgagcactttttcatatatgtattggccatttgtctgtcttattttgagaaatgtctattcaaatcattttcccattttacaatcagattattcttattactgctgttaagctgtttgggttccttgtatattctatatattagttcctcattggatgtatggtttgcaaatattttctcccatgctacagactgtctcttcactacgttgattgttttctttgttgtgcagaggaaacaatcctttgcacaagcaaggagaaagctttgctttttagtttgatgtagtctcatttgtctattttgttttttgttgtctgtgcttttgaagtcgtacccacaaaaacttttctaaaagatcaatgtcctgaagcgatttctccatgtttttcctaatagtcttttagttttgggtctatatttaagtctttaattcattttgagttgatttttatatatagtgaaagatagaagtctagtttcattcttcttcatatggatatccagtttactaagcatcattaagatgtcctttttccaatgtaagttcttggcatctttgttgaaaatcagttggctataaatacatggataatttctgaattccctgttgtgttccatgggtctatgtgtctgtttttataacaatgccatgctcttttgattactatgaatttgtagcacattttgaagtcaagtagtgtgatgcttctagcttagttctttttgctcaacattgctttggttatttgggctcttttgtggttctatgtgaattttgggattgttttttctatttcttcaaataatttgcttgatattttggtagggtttgcactgaaactgtagattgctttggacagtatggtcatttcaacaatattaattcttccattccatcagcacagaatcttttcatttttttttattcctcttcaatttctttcattactgttttgtactttccattgtagagagctttcaccttcttagttaaatttattcctaagtggggtttttttggtcatcattataaatgggatttctcttttgatttctttctcatctactttgtttcactggggtttggaaacactattgatttttgtatgttgatgtgtatcctgcaaatttactgcatctgtttatcagttccaggagttttttggtggtgtctttaggtctcttaacaaatggtttcctctaccttaaatatttttaagcttttaaaataattcctatttgccttttaagattagctggatcgttacctccttattaatttcctataactactatcatagggatcaccccacctcctgggacctaacctgctgcaacatggcaccattttgagagcagagccaccaccagaatacatcacgtcctgggatccagtagtctctgcatctgcatttccctggggctttgtcgtcttatagttctagaggtcagaagccaaatagagatcccactgggctaaaatcaacatgttaatagggctgaattccttctggaaactctagaactcattttctagcctttttaagcttccccatgccaccttcctcagggtttcccttttttcaccttgaaagccatcagtgtagtatcttcctcctttcttacctctattcatattcttcatcttctctctctgactaactctactgcctccctctcataaggatcctaatggttacattgggtttaccagtataatttgcataaatctcctcaactcaagatggttaacttaatcacatctgcaaagtcccttttaccataaaaggtaaaatattcactatccaaagattaggatgttgagatatttggggggaccattatttagcctactataccttctcttcaaatatgacctgatctcttgagttagaatttgttcctttttctctggatttcagaatcatgattacatagttccaatatgagaatttttagaatgacttcgaaatttggggtaatctttttacctttactgttattttcttggtgacgaaattgtgcatttcatctctgcagtcaaacaggcctgaatctggacccagatctccacccatagtggagccagatacctggtccagatctcagcgttaccacctatcagtgagaagcagccccaatttttcagtttcctcagctgtaacatgtatgtaattatagtatttactacaaagatttattgtgagcattaatgaatatatggaaatggcttagaacactgataagcacatattattcactcaaaactgttagttattattactttccacttgtgagattattgtagaattaaagagacagtaaataaagctacagcacaatgcctggaacatagaaaattatccctacattctagttttttatttatcatcataacctatattaaatacaacaggttaaagtcaaatagagtgaagaaaatactgtttcaaaggtaggactttagtgaaatgcactcaactttatgctaataatctgatgtttcaggctttcttattttcagacttagtatggttatagggttaaaagatatgaaaggccaatagtgttgcaagggatatattttattagtttcattaatgaaattttaatagcaataaattcaggcttttaaatattacaaagtattttcaaatatctcatggggccttgatgttagcttcaggaagtatctagcaacctaatggctgtttgattagacttctcagactattattatccttgtcacataatagtgctttagtccatgtatcataggatcttcaagtattattcatttgtttccaaagcaaattgagctattccactcaaatgattacagtaaatagaatagaaacttgtggaatcatcttcctctctcgtaaatgaagtaacagcaaaatagcgcagcatctcagctgttccaggttcctcaaataagttttacttttgcaaaaccaacctcaaacttcctatattctctgttctgcattataagcaacatgaccagcagccacgtttgttgtaattttttaaatatgtggaaaaaaagcaagatatcaaccatgtattaccttaaccaagatgccaaattatctaacttgtttctccaggcaagcagcccaacaacagggacagctcccaggagccagtcaaggttgtctgtctgtccatccactcaggacatctgcaggtaagtgctgaacaaattatcttaatctatattctttggatcaatattcgtattcttgttgtttgttctgagaatgtgtgtctcttgcttctgctttacatggtccatagaaaatttatactggctattttttttcatttagttcattttcttcagttgatctttatttatctacttctggtccatgctgtcattttcatcattctctctctctgtttttccatggctttcctctccattcccatttcccatcctttgcctgctgctctgtctagatctgccatcttgcatgacatgtcagaagagtcatttgagtattgcacccctgtcatggtgctgagccctgctaggaaggagtctggtaagaaatcagtaatacaaagacctaggaggaggagaaaagcctctgagagatatgagcatgctgcagaagaacaaataagagggagaaaaaatgactttcaccttcaaatctcaagccccaggtggagggagctttacacagattcttcagattcatcttccacagatgagagtcattggattcaggcaaaaagaagagcccaggttaaattcagactgtcaagaagaaggaggagaaataataataagccgtgtgaaaacttagctgggtcttccactcctaacggaattgagctcgttgatctgggatccaaaggtaaagagcaacaagagctgattgaatgtgagagttgctctttaaatctccacagaggaaaacatacaaggtaccaagaatgcaacccttctctgactcaagggtcctctgaaattaagagatcctcaaggaatcatgagaagagcaaagg

SEQ ID NO: 10291 - DNA, 6000 bp, Homo sapiens
aatccaccttattccctaaggaaggcatgaaggatgagaaataaaagagaaaacatagacttaacctttgtatacattgagtttgaaatggttaaaactgaattcattatccctctaccacccaaactatctccccactctgaatttctagtttctattaaagctaccattattctgtgagttacctagtgtgaaaaccagtgtcctgtatctacctggcatccaaaaactatttctcagtaacaaaagtgatattttccactgtaaaaatagtttgaaaatacataactaggaaaagtttttatcatcccagatgcaactctttgtactgaaaattataagggttagcaaattaaactgttctgacagagctactaatatcacttctgtaacaatgattgcccaccttttttttctgtttcaaaagacttaagggaaacattttctgagtaaaaatggctcactgtatcagtaattctcaggcaaaggagtaggaagctccctccatattgtatgtctgataatctctggagttgtggtattacaatgtgcattttctccactgaaaatgctgcatgtctgggtgtggtggctaatgcctgtaaatcccagcgctttgggaggccaaggcggacggatcatttaaggtaaggagttcaagaccagcctgaccaacatggtgaaatctcatatctactaaaaatacaaaaaattagccaggtgtggtggtgagcacctgtagtcccagctactcaggaggctgaggcgggagaatggcatgagcctgggaggcagaggtggaaatgagctgagatcatgccactgcactccagtctgggcgacatagcaagactcagtctcagaaaaagaaaagaaaagaaaagaaaaagaaaatgtggcttaactctatcaatagtaataaaaaatttactcataataaagattgtattggattcataccagccattgataagctataagtatttcacacaatggttaaaattaaagttgtattcttcaggtatgagttgcaaaaataaatgtattcaattaaaatatcttagaaatatactaccgcaaattataatgcatatggcaataaatcatcagtaagtattaagcaaaacaaaggtcagaaatgtggaagtactggagcagggttggttgatttgattgattcagtactaataaatggatagaaaagtattttagagatcctcaattattgtaaaaaatgtggatttttactcagatgaccttataacatagaggagtcaatacagcactgagattttggtttatatgagttaaatcttatacttcacccaaagttgttaagttatatttgccataaaacctgatttgtaacaatcttctgtgacacagatgctactgatggctgtaatgttgggctccaatagtttaatagtaacatgattgttctacaaggcaacacaagaatcatatgtcaaccaatggtcacatatatcagaaaaaaggaaactcctgtcacaatggaagctaataattctccaaactagaatcatattttttagctagaagctattcagtaaatatatgatattgcaatctacttataaccaacccctacttcaacacaatctttcctttggaaaaactgtttcttgttgatactcaatgtatacaaataactacaacaggacaaatactataagaaagaaatcgtgcaaagtgctttgggaaagcagaaatgagagtaataacttttttttttgtgggggtgaagaaagcttcaggaaattaggagatgttcagaattaaggatagattcagcctgggtcttgaaggacgagtaggacattaccatataaacaaagagaaggaggggcatctaagcagagtacagtgactgaaaaggtatgaggagacagggaagatcatagggtattcaggcaactgagactaaatgaaattaccagagcaaagggtattttgaggagttattatttaaaaggggccctgctataaaggaccaacgtgccatgcttgagcccattgttggtattcaataagtatttagtgttcaataaaaaatatttaaaaaggaatctcaaaagcaatgagaatcctttaaagtcttttcagtaggggaatatcttgattaggttgaatattaaatgaatcaaagaagaaaaagagtggaaactaggagactacttaaaagccttttgcagctcttcaaacaataagtcatgtagtccatcgcctccttgtataggtgaggaagctatgataccagagaagtcaagtggtttgttcaaggtctcaagagctggttagtagcaaaattagtttatgccctatgtccaaacatattttctactatatttccttacctacaaatttattcttcactgcctaagacttgaggtatctgtaagaggatttccattgtaatggtgcagtggtgcaatgacactagtcattgcagacaggactaacttgttaatattgtttaagcaagatttttgcattttgtagtctttttcagggagatataatttgattcttggtatattaagaatgaatttgacgaacaaatcagcagaccaaagtaacttactgtgtctgattagctgtttttaaattgttgcttatattttaaaggcaaaaaaaaaactaagtgcttatttaacaacaacaaaaaatcccctttacatttttttagaggtattattttctctcacctatgaaactttctgaccataaagtcagtgcgtaatcactgatgattcccagcattctttctttatccttgcttcttttcatttttcaattcttaatccctcctttcacttcccccctgtattacaacaactaacagctgccaagaaagtggattaggtcatatattcaatcaggaggttttcctgttattcaagtcactttcttagtataccgaaactaaaaaatagttatggtttttgcctcaaaaaattcagttggacttatattttattatttgaaggttgggtagcaagaagcaggtctaaacttacaaaagcaaagcagtcattttggatcttcaactccctatttctgtcttgagctgttttcattttgataatacatctgaacactcttctctaacttactgataatcagtccgtattgttctacctcactttgtagacaatttgtcatcccatatctacagctgcaggatcagtgggacccatactggtggagaaaaccatgcagtctctccattaggaaaggagaatcagactgaagactcctgacttgctttgatttctaataataggctggtctcactgggcccaggctgttctaaatctagagtagttctgaaatactgagtgtgaaataggcaatggtagaaattcttaggacccctgtaagacaaatcaaaattccttctagtattcttttctcccatcatttcctgcactgtgctacgccaaatccaatctcttaaggaccatttcctacatgcaaccattgagtgcactttggccccagtatagctttataaatctcactagataactgtgggaagtccatccatgaatcatagtatcaatggtctgcagctcagaaagcacaaaagaacaaaataaaagtttgaaaacttacagctttctctgccagatatttttttgccaaatatcttagactcctttgtgttgctgtaacagaatgccacagactggtaatttataatgaacagaaatgtatttcgctcatggttctggagtctggaagtcaaagaacatggccagcatctgatgaggaccttcatgcagcatcattccatggcagaagatagaagagcaagagaggatgatagcatgtgagaaagtgccaaacttgattttataaaaaacccacttccaggccaggtgcaatggctcacacatgtaatcccagcactttgggaggccacagcaggagaatcgcttgagcccaagagtttgagaccaacctgggcaacatagggagatactgtctatacaaaaaatgaaaaagttagctaggagtggtggcgcgtgccttgtagtcccagctacttaggaggctgatgtgtgaggattgtttgagcctgagaggtcaaggctgcagtgagctgtgattgcaccagtgtattccagcctgggcaacagagcaagaccctgcctctgaaaaaagagaaagaaacccactcccacagcattaattaattcattcattcatgagggcagaggcctcatgacttaatcaccttctaaaagtcccatttctaaacactgttgcattggggattaagtttctaacacataagttttggaggacacattcaaaacatagcactaaatattcattgggaactcatgtacttggaatatctactggcaaaaaaaaaaaaaaaagaaagaaagaaaaaagaaaaaaattccatattccgtgttcccataattgtggtttatatttagtgaagcatcaaatgagcatgagatacaactattttttttatttacacaaaacttgaccctaaaatatttaaccaacagaagtagtactaataaaattattctatgaagtaatttttaatgaagctgagtttattcaagtcatgtcttctgcaaataaaaatggacaccaataaacaaaaacaaagatagaaagaataactgtgttcttgatatctcccctaaagttcacaatctctacacctgtttctttcatcttctggtgatgttaatcttctgtttattttgcgctttaaatctaagcacatgtggattacccagagattgccctctgaaagtcagtctacacctgttctttcttacctcacaaaaagtaatggaaaaaaaagtgtgtgtgtgtgtgtgtgcgtctgtgtgtgtgtgtgtcctgttggtggtagtgttggtggttaaaaagcaatttgggacttcctctttgaacagttgccttttcctctcacagaaggaagatttcattttgtttgagacgagaaaccaaaccacacaccaaagagaggggtatgatggctaagaagcccccaaaaccagcccctcgcaggatcttccaggaaaggttaaagattactgctctacctttgtactttgaaggttttttattaatcaagcggtcaggataccgggtgagtctatagatgataatgttaaacctaagacttctgttttaatttaatatttatttcatggtgatgtgatgtgttaagacctccttgtttctgttgaaattaaatcatcttctcttctttgagctcagaaaaatgattccaatttttcataatttaaatacaatgtctggcttaaacctgtatgtatacacatatataatatgtataataacagaggttgtaatattaaggcactaatataaaaaagtcaataagctaaatttccaaagaatttatttaaatatcacaaaagattttggcttgggagataaaatgtttcttgtattttctccacaatttattgctatgcttcaatgatgacatgtaccattaagataaaatgatatcatgattaaaattaaacctgctcctgttctgagtcatttgaagtttataatgatcaaattattaaaaatggcttttgtaaaaattgttaaaatgacaaagttcatactgtttaacattatatatagttatgtgttctaaaatactattcaagatagtgacttttaatttttggggtactactgtgggtattaagtacactaagctacataaatacctttgctctaagaaaatccatgaagcattctgtatttttaaatgtaataattaaaacttatagttagttaaaatcattacttttaaaacagtaattatggatgacttgaaattaattagagaaataagcccaaaattgcctgttattaaataaaaaaatcattaagttaggtcaaattttatgaaattgtatactgactaaaactagaaaaattttaaggttttcagaaattccatcagaaatg

SEQ ID NO: 10292 - DNA, 6000 bp, Homo sapiens
tgtttggaactaattacttaataagtgaaactattagaatttctttggctaagggacaccatgaaaaaactagtgagattctaagggcaccatgaaacaagaaagtttggaaacttctgccttagggacatgctaggattcaaaggacattgcctactcagagtaaaattagagtagcagatgaaaagtggaaaggacagtgcctctagcttctgcatacctaattatacacagtggggccttttcatagctcaatgctagctctaaaaactcttgtgcgctctcattctaaattcactgcaggagccccttaaaatcactgaatcttgctttcaaaccagcgaatttcgttcttccttaataacaaaaacaaagcagtaatttttcagtgttggtcttgggaccaaacagagttcctcaaatatttagagaaactctactaagacttaagtatcaccttcctcatgaagaaatgaatgaactttatggaaagattcactcagcaacttcataatagcccattatcaaaattttaaaatttactctaaatcaggggttggtaaactttttctataaaagttccatagtaaatattttaaaatattcttttacaactctttaaaaatgtagaaaccaactgaaagcaggcacttgagcagatatttgtacacccatgttcacagcagcattattcacaataggcaaagggtggaaacctagtgtcatatcaatagatgaatggataaacaaaatgtggcatatacacataaaggaatatcattcaaccttaaaaaggaatgaaattctgatgtatgatacaacatggatgaaattagaaaacatcaagctaagtgaaataagccagacacaaaagggcaaatattatattattccatatatgagttaccaagaatagtcaaattcataaagagagaaagcagaacaatggttaccagggccagaggcaagggctaatggggagctgtttcatgagtacacattttctctttgggtgataaaaaagttctgaggatgataggggtgatagttgcaaaatgtaaatgcagttaatgccactgaaatacagtggtaggtaaagttgaagcttagaagtggacagaaacagcttaaaggttcagatttgaaagtttaattttaccacttgtgctacttttattttcttctgcactcatttggtacacagtagaccatttcccctcccatgtgttggaaaggagaaaaaaggaaacattggaaaattaagcatactgtaaagactcagatctctcccctgcatgcttgcaacctttaaatctaaaactcacttaactcatggattagttagcacaatctcagactctggagccaacctatccctaaaaaaagaaaaacctaacggactgtatgtaggctgcaggcaaaaaaaaagtcactataagcaagaaacttctttcagattagataaatcgtacataaatgtatagacaaaagacaactgtttcagttatctattcactggaagagatgtgtaacaaacaaccctaaactcactgaagtaaaacgacaatcattaccctcatgaattcttcaggtcaggacttaggacaaggcagagcaggcattgtatgtctctggccatgatgagggcctcggctgggatgacccaaatggctgagcggcgagaatggctaggagctggaatcagcttctcagctcacgtgactggcacctaggctgggctgactcaaagcctgggctcagctgtgactgttgatcagtattaccttcaaagggtctctctgtctgtcttgggctttctcacaaaatgccagcctcaggcagtggaacttctcacaggaaggctgggagttccaaaaggtaaatgttccagcagacaaggtggtactgcatggtcttttatgacctagcctcagaagtcacatatggtgactgtgaccattttcaccaacttctattggttaaaatcaatcacaagcccacatacatgtaaagagagggaacacagactctattttgttatcagatgagtatcaaagaagttgcagccaggttttaaaactaccatggacatatttatagagaaatggagatacatggcaaagggttaacagtgtccatcccccaggatccctcaaagtgcatttaatctattatcttaattcagattaatccaaacttatccttcaataatagcaaattccacctatttgcatgtgatgcagcagtaacaaacttcaattaacctctataacttgcatcaaaattgactaatagcttgtttttgaccctagcaccatctgccaattttaaccatttcttatttttcaaacaccatcaagctcagatccaccttcaggcttaggctctcatatccagaaagaatgcagagaatgcctatagcaagcaaagcaagtagattaggatcacatcagcattatggcctattccctatccttactagactttaggatcttacaggtcaagagaaaaaaatgaaacaaatggtaggcaaataaagctatcaactttttattctccaaagtaaaaatatctgaagaacaactactatctattatcatattaaaaaataggatagacaatttcaaaataaaacatggtccttaagagtgaagaaatttaactaaatgaaaaattcatatatctcatctgaaatgctttggaccagaagtgttctggatttcagattttttcagattggggaacatttgcattatacataccagttgagcatctcaaatctgaaaatccaaaatctgaagtgtttcaaggagcatttcctttgagcatcatataagtactcaaaaagttttggatttgggagcattctgaatttcagattttcagatttggcatactcaatctgtaattttgtttttaatttctctgctgagctgaagaaatttcaccatagaagaattccagttcgcaaactggtatgtgaaatcatttgtgcatctgtctcatctcttctctcttttgcttttttctaatggatttagatttttgctttaggaattcaaaatctaaacaagacaaataagtaaatgagtataataccatataaatgctgtaagaatacatggggaaacaaaaataaaggaaggtctcacaaattaggcaaaaaaagtttgcccatgagaaagaatgggaaagattataggcagcaaaaacgctgtagctgaaagcacagagacaatctacgcatacggcatatccaagatagcctctactgtgtaccaaacaagtaaagagtagttatacttggccgtagagtaaaattaactttctcttcattattcttcttttttatgaactttaacaacagagcaagcattaatttaatgatcaggaattttttttaattaattttatttatttatttatttatttattttttgagacagagtctcgctctgtcgcccaggctggagtgcagtggcttgatctcggctcactgcaagctccgcctcccgggttcacgccattctcctgcctcagcctcctgagtacctgggactacaggctcccgccaccacaactggctaattttttgtatttttggtagagacggagtttcactgtgttagccaggatagtctcgatttcctgacctcatgatccgcccacctccgcctcccaaactgctgggattacaggcatgagcccctgcacccagccttaatttccatttttaaagtaagcttaggaagaacaaacataaggcctatttttccggtagaaagtagtttgggtcaggttgtaaaatacaaatgttaacaactgagaagtaggcagtgaagtcaagtccaaacagacgataccaaaaaaggggctcataatattccttaggtgtctctgtgagactcctgggctaggtgtactcaatgttacaagcctccttatccgtatggtcattaggcggaaattccccaggtggcaggtactagcaggtcaaatgcttaaatataatgccctttggagtcacaaagaccaaggttgctatctccacactaccacttaactagctcagtgagcctgggcaaatttatcagccacttgacttttttatctgtaaagtggaaaaatgcctacctctcaaaatttttgtgcagaacaacttacataatgtaggtaatgaacttagtacagtgcctgtccccctgaaaattacaattacaatataaaacgcatttgtatatgtaattgagtagtagatatttgtttactctattggtttagctaaaggctttaagcatatgaaactcctttgtcagatggaatgtcaactttttaaaacttaaatgagtgcaaatttttaacacaagttccaaatgtagaagggacattccctatttgcggttaattctaaaatgaagctacctttagaatgatccttctgtaggatccagaaataaccaagcggcctagcccctagattctagcaactgacagaaaactaggtggaggtttcccattcttccttgtcttcttactccagcgggcttctgtatccactctagattgaataggggatgttttgtgtagagatgggccttctctcttccagtccaactctgaagtaaccgccccttacccaagctttctttaaactggaataacgccagcagaagaatgtagtaggtgtgcttcaagtgtcctcaaataattcccgcagcttccagaatccttgcaatagcccgctggaccatctgcggcaattccacccacttccacgcacctgctcttctttctaaccccagtacgcaatcctgcagccccgcccccacagctgaccaatcagagggcgcaaagtgagtcggatggggcgggcccagtttggcgctgacgacgaatcacctgcctcagacagcaggggcggaagcggaaaagagctgaaagtcttggtttggccttgggttccgctgtaggggaggtcccgtgcgaaagaatgaggagatcctggggccttacctactagcggaatcgactgaagagacgcctgccagtgcgggaggtaggaagctcgatccccaaagaaaagagcgagtgggcaggcagctgcgagacagaaccggagtgtgcagggtccctagaggccggttcctggtctgtgctgctctcctggaagccatggtacaggcagagctcagggcgatccccaggtgagggcagcggctctgcctgggattccaccgcagtacaaccgggtagatgcggggtggagaagaaaggatgttgcctgcactgctcgccaatagcaccctgagaggctacatttgcagaagcagcagcagcagaagacacagcgccggtccaggaggcggctcgagctgttcgtaaagtcgcccgacagctttttctccgtagtatgcgagttgacaaaacagccagagaacagggctccccattacaatcttttcgagatcttttcccttgctaaccggatctgatttgtgcgaaaacatgccttgcacttgtacctggaggaactggagacagtggattcgacctttagtagcggtcatctacctggtgtcaatagtggttgcggttcccctatgcgtgtgggaattacagaaactggaggtaagagggttctgcaccatcagcctgtacactttcttctacccatctatggttgggaaagagacacccttaccccatttctgccctgacagtcctgaaaaccatctaatgtaaacgagcctactcttaggatataaacctgtctaatttcttgttcacggttcttcaagtcatgctacaggtggaggtgggaccgggtcgagaaaatagaatatattaatatagctgcttagaagggcactgttttgcaagtattcatcagttccctgaaagtaaggtaattttattgctgaaatctgatctgttcagacattggacgaaactaggtcaaataaactaccttgaaaaccatgtattgaattttattagctt

SEQ ID NO: 10293 - DNA, 6000 bp, Homo sapiens
caaatctcacgtggaattgtaatccccataatccccacctgttgagagagggacttggtgggaggtgattgggtcatgtgggtggttttccccatgctgttctcgtgatagtgagtgagttctcacaagatcccatggttttataaggggctcttcccgctttgcttcctctcacctgctgccatgtacaacatgcctttgcttctccttcgccttctgccatgattctaagcttcctgaggcctccccagccatgcagaactgtgagtcaaacctctttcctttataaattacccagcctcaggtagtatctttatagtagtctgcaaatagactaatatacctcttttgctcccttttctagttttaattgagcattttatatgattctattttctctcctctcttagcatatcaattatacttaaaaatatgtttttagaaattgtcctagagtttgcagtacacatttacaactaagtccacttttcaataacactataccatttcacaggtagtgcaggtactgtataaaagattattcccagtgcctctctcctgttccttaaagcattgctgtcatttatttcatttattcataaactaatatcacccaatatattactgatattattattttgaagttatctatgcgatcaattaagaataagaaacaaattataggttggtggatttttctttcaacactctaaatatttcactctactctctttttccttgcatggtgtctgagaagtctgattaattctcatccttgttccttataagtaaggtgatagtttttcctctgactcctttcaatattttctctttattttccacaatttgtatacaatatgcctacatgtagtttttttaaaatttatcttgcttggtgttatctgatcttcctggatctgtggtttgatgtctgttattaattttagaaagttgtccaccattattagatacctagataactattatttatgtatcttctgctgctttctttcttttccttctggtattgctattacctgtattttatgccttttgtaattttcatacagttcttggaaattgtgtttctttttcctattctgttttctgtttccatttaagtttgggaagtttcaactgacataccttcaagctcactgattcttttgcagctatcaaaagtgattctcttttctattgtagtattttttgttctctaacatttccttttgattctttgagttttcatctttctgtttattcgttcttgcacttttcccagttgatctcttagcatattagtcatagcatattttaaatttccagtctcataattcccaaatccctgccatatctgaatctggttctgaggcttgctttgacatttcagagctgtgttttttcttgccttttagcatgccttataattgttcattgaaagtgaggcatgatgtatcagataatagaaaacaagataagtagacctttagtttttatgtgtattgggccagaagttagactgtgcttaatggttgttgtagctgtaagtatcagaggcttctattttctctaatatctttctttttgtctcccctatttgttgtctttgggttttcctagagactcatttttaagcagagtctgtgtcttgcaactctctctagttgtgatccacagttattataccaaaacactatttatgtggtcgtaagatattggagagttgatacattctataatgttatgataaaatctctatttttaaattcttatttctttttaaacaattttagattcaggaggcacatgtgcaggtttcctacatggatagattctgtaatggtgaggtttgggcttctagtaaacccatcacccaaatagtaaacattacagccaatagataattttcaatctgctctcctctcccacgtttccctgttttggagtccctagcatctattattttacctttatgtccatgtgtacccattgtttagctcccacttataagtgagaacatgcagtacttgattttctgtctgagttatttcacttaggataatggcctctagctccattcatgttgctgcaaaggacatgatttcactcctttttatggctgcgtaatattccatagtttatatataccacatcttctttatccaatcaactactgatggacacttaggatgattcctaattgtgaatagtaccccaataaatatatgagtgccagtgtcattgattataacaatttcttttccttcaagtagatacccaatagtgggattgctgggccaaatggtacttctattttcagttatttgagaaatccccatactgttttccgtaggggttttactagtttacattgtcattaacagtatatacgcattcccttttctctgtatctttgccaacatctaaaactctgttttctagttgtccagaatccctgagctgtgaacttcataagggtttcttcttttgtttttctccttatgtgagaaagaaagtgtagaaggtgttcaaactgtctagttgccttttctctaattcagataaagctctggggtaaagtttaccttgaggacaggcttttgtttctgagtatatttcaaatagttattgttttcctcccacatgccagaaaaaagaggaaacttttgtcctgtcttctgaaagtaaaactcattaatgtgtggatgctcccatatgaatgactcccactgtctctgagttttcaactctcaagttagtccacactcagccttcagcaataggccaaatactgtataaatgcccccctatcctttactggctccagtggcttttgctgtcctgataagctgtaattctccgtattcacctatttcttcagtttgcaaagaggtggcatgtcctatgacatcaattctctgcagatctaaaaagagtagttgatttttgatttgctcatttttttcttgttgtgatgatggaagtggagactttcacacctttcaaatgtcagagcagaaaccagaagtcctagtaataatgttatatatatatatatatatatatatatatatatatatatatatatatatatatctcttttgaccacataaaagggggaggtgcacaggtcttattattatcattttacatataagaaaactaaggtttaaagagattaaatgagtttccatgagaaatattgctaacagacgaagctaaagtcagaacctggatcttctagtgtctgccaggactctcccaatacagaccattctgtttaggcattcatgtatacgaaacaatttgaaagaaaaattttagtttaagaatagagtcatgcatgtttggatttgctctgtggcataatgtaaaaggcaatggcctagcatatccctaatgaatcttctcaggcctaattcagcccccaactcacttttagactttagaaattctcagcaaatgctgacacaagcttcagtttctccatgtgagtgaagcaagaataaaccacatgatcttgtgaccatgaagtgaaacaattctaggttggatttaggccctatatttttggaagcaagtttgtgtatgtgtgtgtgtcttaggtgtgcatgtgtggaaaggggaactgatttcttcaaaatctttctgaactgctaaattaatcctcttccttaagtgaaaaagctttgctgctttaattctttaaatgaaatgttattttgccttcccatctgctcatctgacatgatagtctatggatgtgattaatgtttaaggcagaacttccttctaggaaatgtcatattttaacagtccttgtgttttctccttcctgtgaatgctacacccattaccaaccactggatggtctcgggttaaatagcacttcctcagagaaggcttctttgaactcagactagcacagaacctacacttcccctttccaacttaaagtttgcatcctttggtgtatgcgaacccacatgaagagatgttttttttgttttgttttttttttgagaggactccctcactttgggagggcgaggcgggcggatcacctgaggtcaggagatcgagaccatcctggctaacacggtgaaaccccgtctctactaaaaatacaaaaaaattagccaggtgtggtggtgggtgcctgtagtcccagctactcaggaggctgaggcaggagaatcgcttgaacccaggaggcggaggttgcagggagccgagattgcaccactgcactccagcttggacgagagcgagactccgtcttaaaaaaaaaaaatacagataaatggcctgtacagataaatggcttaggtgcatctacaaagaattagtgattacaagtgaaatcttgtaatgtcacaagaaatgttaatgacgtcagtggtgcagatgaatttcttaataccaagtggaaaaattcacttgagataatcttttacaatggtgtgaaattcctcagacttttgttttatccataaactgcacaaataatacctccctctgtgacacttagagagggtgacatgctgagagtttcctgaataatcacctcttgaaatacacaaaactcttctagtttcctggttgaccgacccagggcttgacgactccttttgagccacctgacaattcagtccagcacagcaactgaaggaaggcgttccccaacctgctgtcctatgaaggcctctaggtcaccggtgctaaagccctcctttctccaccctccttaagtggaggtaaacgtcccagcaggaagtcaaggctggattggcgctcttcgcgagcaccctgggaacgggagtctgggtcacgggtgctagagccctcccctctcctcccggccggtgtatgggaaattgtccccgcagaaagtaaaggctggccaggccgcccccagcacgtagagggaatgagtcaggctccggctccacactggcacgtagtgggcggatcgcgccggcgctgagtaggaaggagcttcagccgccagcccggaacgcagtgagtacagccactcaaaggaaagccaagtcgctttgcaggggagcgtctcatgatttttcagaaacgtgctcatggttaaaaagaaaaatcaaggctcggaataaatacattcaagcactgttaattttagcccaaagacaggcggtacttgcctggagatttgggaaaatcaacatgaaactaaaaatgaaattttagttggagtggagcaagcagtattgatcagaacataccaaatacgaattttttcaaagtctgcgtagaagtttaaattactaggaaaaatgtaaaggagaagtatttactaataaatgaaacaaaagtaataaaataaaaatgaattaatatagtttgacaaaatatcagcgaacgctgaaaagaaaacattaaaataatgtttgagactttttaggttttgtgcaggaagaattgggaaaaatgtgctggatggagtgatactgcttttcttttccacaaaaatttcattattttagagagcggtagagcctttttaaagacagtaagttattgccaattcacaatgaaataagatcacatgctctgaaatgtacaagagctgcatgcaataaacttcatttatctataggtaataactgattgatgtttattcagtagtcgaaatgcacctcatgcactctaattagcacgtcaaattagtctctccgtttcagaggtgtagggcctttgtggagccttctcaataaaataatttgccactcttgaaggttagacattctcttctatcaatgtacacataaaggttttgttttgctttgcttgttgtgaattaaaatggggagaaaatgatgtgttagctatcacccagtcatgtgtctttttagtcataggttagcttttcaagacacttcctgcatctctgacctgttgcacctctgttatcttggcacctctgttatcttagcagcaagcacctgcctcagctgacccttgagc

SEQ ID NO: 10294 - DNA, 6000 bp, Homo sapiens
aagacctcttctatgtcatgttagtgccaatgaccagcataagtgacaaagcagctggagaattaactaaagccacgggatgggtccccgtcctgtcaaataaagatatttaatgatagaagaatgtactggaaccaaagtcaaaataacactaatatttagatcccaagtatgcaataaataaatttgtacctgctaacatatcttatgagtaccaagatagcccttgtttgtttaaatggtttatatcataaatgagcaattaattcaaaaagccaagttagcagcatactttgaaaaaaatgataatttgttatgtgtaccttttaaccatttcacacattctctcaaataacccttattaacagagttgccaaacatcagcaattatgaaacaagataaaataaaaaaaagactttgaaaaagtctacactaaacctttctgtttaaagaagctttggttatatatctgtgcccagggaatattactttctatgataaaaaacatactgggtctttcaggtccaatatgtaaagtgatctattttccttgttaatattcacagtaggaagaaaagccttcatttggatgggtgatgtagttttctctcccagggctactgatggattaactgtacagagaaaatagttgctgaggtagtctttatctttattcaaatgaatggtttatggctctttttcttttttatttcattttgcaatgatctgtcttcaagttcaaaaatcactgtaccttgctttatgtctgaaactgtttaagaatagatccaaaaccaaaatttatttggtagcctgagattctttttcttcataaataactttgaaagcatttcatttgcagggataatggaaataaaattagtgatgaatttgttaactgatggaaaagttcacaaaatcatattatttacttcatcaaatagaatatatatatgtgtgtatatatatgtatatataatgtatgcatgtatataacattttattttttcatatttcatttttttcagtggaaaaaatacctaaaatttgcaagtatgctgttatgaggacacactttatatgtttaggctgatatactcaaattttaatttgatttgttactagtttagttgcctggacgatttttgtaacctctgtatgtctctgtttcctcatcttcaagagaggttaatacacttgtatcatggggtgatttgaagagcagatggagtaacatataataacttagcacagtatttggcacatgataaggacttactgatattatttctgtgtattatgtatcaacaattaacaaatttgtatgtaggaaaacttgtttttaaaagtcaaggttgggcacagtggctcaggcctgtaatcccagcactctgggaggccaaggtgggcggatcacctgaggtcaggagtttgaaaccagactggccgacatggtgaaaccctgtctctactaaaaatacaaaaaaaaaaaaaaaaaaaaaattagctgggtgtggtggcgcatgcctgtgatcccagctactcgggaggctgaggcaggagaattgcttgaacccaggaggcagaggttgcggtgagctgagatcacaccactgcactccatcctgggtgacagagcaagactctgtctcaataaataaataaataacaaataagaataaaaataaaagtcagtagctataaatgagtctatcaatttaaatgaaaccagagtataaaaagtttatattctgtggaattcacaaataaaaaatgttaaaatatgtctatttttcccaccaaagcacttgctgcttttgtgaagagactcatgtatcagtatgaaaatggtacagtagagcatcaataattgaggcagaaataatatatctactctaaatcttcaattccaaggtttaatatattcaccatttaaatgtgattcaaatgtaagttaggtttgcaaaatatgatttcagacttttttttggctaagacttacgatacttttacattttctcatgtaacaattagatgttttagttatttatagcatccatttggataaaaatatttcaaaatattcaaacaccacgttttaagaattacaaataaaaaagcatgcagtagtagtggaaaatgtcagtggcacaggcaaaggtgttagtaggttgggacacattaggaaagaagttattgtagagatacagtaaattcactttgctaagttcagggtcctgagtgattgccacagcacagtattttcaattcccaaaaaagtcccaaatcacatactgaagatattttcacagaaataaatacattatcatgtaagaatgcattttttctttaaagtaagagatttaggttttgctttaattccttagagcagtgatgaaaaagaaaaaaagctgaaggatgcattttccgatctttatggctactattataaattccccagatctgctaactatgaccttcttcttgtctccattcttatgaattagtccagagaatgctgaagaactggaagataaacagaggcaaagaagatagatagggcattaaagaaccaatctcctagggaaggtttacaacttgaccttctgatgcacttagaacagtgtcattagcagtactaattacttttttcaagccattagattgttttcctattctcaaagactgccattacttacatttccaaatttttaccttttctcctggtttacttcccatttggccccgattgaaaaaaatctttattattttggtatttaaaaatatttgtttctaacatttgttcaatcatttgatatgttattttttacttattatataatgatataaatactagtgatccctaaaatattttaatttgaaaataaaagtgaacacatagatttcacaaagtacatgcatcacaatttttttatactctattagtttttaatttttataggtacatagtgggtatatatatttataggatacatgaaatattttgatacaggcataccgtgtgtaatattcacatcagggaaaatggggtatcattgcctcaagaatttatcatttctttgtgttataagcatttcaattatactttcagttatttgaaaatatacaataaattgttgttgactgtagtcactgttgtgctatcaaatactagatcttcttcattctatctatctatatttttgtacagcctctggtaaccatcacttgaatcgctatctctgtgagttcaggtgttttaatttttagctcccacaaatgagtgagaacatgcaaagtcggtcttttttgtgctcagcttatttcacttaaggtaatgacctccagttccttcatgttgttgcaaatgacaggatcttattctcttttatggctgaatattactccattgtgtatatgtgccattattttctttatccattacactgatagtttattttttaaaataatttctgatgctgctttttcatacttattactttttcctcagaaaagtcccattggatttcacaatttcacaatgcaataagaagcctatctgatagtgagtagcctttaaattgttgttgttattattttattgagtcctctttgtatttacaaagattaaggagtttctaaccgtatctacacttgtaataaatgttattcttagtcttcacacttgtaaaggataatggtgatgaatgcagcggcagaggctgcacgttcccacccagcactctcactgaagactgcctaatcagcactggctgctggtacttttctctgcaagcttagtctcttccaggaatgacaggtggtaggtaatcctgggaactcaagagcctccttgaagcttggactgattagagcacaaaccatgagctgttgaaatctggtccctgaacaggagagtttttgacatgaagctgctctagattgctgtagggctgggtctcagatctggtgtatctgcctgtttccatgaaaagagcggaatcttcaaaaatactcaggctgtttgtctattcctctaataaaacttctattgatgttatatagaatcttgagcaaaagatttggcatcgcaccttttatgagtttcaataaaccttgtgatttaaatagtttcatcattgatgacagtctttgggtgaggccacaagagagtcgcttctcgagtgtccattagtatatggtgggaagacaggaggtcaatactaaggctaggagtgaattgctactggtgccttcttgcctcagaccagcggtcttttcggtgttcatgtcatagattgttgaggtcccctcgttgtttaatgttttgcctcagactcccgcctgtaaacagtacacatctttctccctcactttagctgctcatcatttaagctgtcattggtcagacatcctaaactttctcattgtgactagggctctgagggttccaggggttctaattattatcgtggctgcagtgtaggtgtccatcaccgagatggggcacctgagctactgagcagccagaaaaaaactttctccttatccttggcatctgccatcagtttaagtactgatttaggaatctttacggcaaagaagaggctcttcatccccggccccatccccaccgcgcccacccggcccacatacaccctcggagcctgctttccgcagactcccctatgtcctgtccttgactccagttaacctggagatgctagttctgggaactcctagaggctctgttgcctcctccgcctgctctgcgttccccgcgtgagcgctggattattccagtctttgagcatggcagatttccactggatgacatcatgggagcccagtgaatgccggctcagagagggggacggagaaggggagggggagcagaggaggggagaggactggggagccgagccagagccgggctgcctgccacccggctgctcgtccgctagctggggaggagcgctccacccgcaactgacaaaggatgggagaatgcccgcgccccgggatgccggccgcacgcagcctggcggccgcctgagctacttcaccctccgccggtaagtgactgcaaacatcattcattcaatcagcctcactgggagccccttctctccggctggtagtcctgggcggcttgtccctgatcccgagcggggcttggcacagcatcagccctggagggcaggcagcaggtgcctttgcctggtgggtccactggggagcgtggctggggttcgcggcgggtgctgccacccaacctgcgggcggcgggctcgcccagtaggcgcctctctggtgagaggaggcggctccagcccgcagcctggggtagttgctactattggcccccagcgcccgctctgcgcgcgcgccgtttctggcggatccccagtgcgcggcgcgctgtttacaccggcgtggtactagtcacggagccgcacccctcggaaagcgcggagtcgatgacagccacttcacaggctcacgcgctcctagtgtgggcttgaaggggacggggaccgattaccaaaggagagcgctgagtacggaagacacagggcagcctttgtcttgggtttagcgctgatgcgctcaaccctgagtcgggttcactgcaactgttgtgtccgatttcggttccctgcaaccgccctcctgggcgagagatgtcattgtgttcctgcggccagcgggactgagagctgggacttaagacgccaggagggtcctgcgctcacgggtgagtgtcgcagttatccaggtgctgagggagtttctggagctccaggaagtggagtgaccagtcgaggcagagagacgcccaagttttatccccaaatggtgtgagggaaatggcaaagttaagggagactcactctcgctcttttctctggtttctgaagcgctgattttggagatttgtgacaggtgaatggaatcagaggcatggccaatatgtagttagagagcctcacgttttc

SEQ ID NO: 10295 - DNA, 6000 bp, Homo sapiens
tcaggattcccctatttaaaataagagtaatatctgctatgtaaaattgttaggtatgtataatagacaacacacatcaaatacagtgtgtatactatgtgatacatcacactagattctttgtcacaattgaaaaatacttcattattgcacacaaacattttaaggccctttgatgctatattttaattcattttaagacttcctacacagaaacatacaggacgaaaatctgctccagtggtaactgctggatcttatattgtggcacactgctggctctgcctaattaattactatcttgcccttcctcaagtgcacccttctcattttctaggatatcttggagcataacctgtcagaaaatagtctgttataaagtacaataccagtaagtccactaatttcacacatctttttgtatttaagaagaatcatctagaactcatcaagtcacacaatcaagatcttgtcccagattaaactgagctagctgattggatcacccacaccagtcctgccaatttagaaaaaacctaaagatgagctttataattggaactctttgtcatttgattaaatcaacagagagctttatctgaaaggctggggcaggcagatcattcaaatcacagcatttgattccttcttacacctcccttttcacatcacatatccatttcataattactttgggcctcaacttccatatttgttaaatgtttgtaagagtccccaggcataatgacatctgggtgcagctggtagaatttgtatgaggatttaatgaaataatgcaagcacagtacttagaatggtacctggtatatatatctaggaaaactcaataactcttagccatggttaaggtttttttgtctccttgaggaaaaaaaggaggttcccatggctatatctgtgcatcagtgtataagtcatctgtttcattatatttatatatttagttatttataactaaactttctagtaggctgtggtgatagagaaagacgatgtaccttagggccccctaaaggatttgttgagggacgcagatttatgaaaagagaaaagactggaagttagaagacaaaaatttttgctggacaactaactcatcacatgaccttgagcagtcttcttgcctttctttcatctctaaaatgaggtttaaaaagtctactgcataggattctcagaaaaattaactaagacaacttaaatatctaaattcaacttgcaacacagactaaccactttcttggtgccagatataaatttatttttataaacattaatcaaaagtcagaacagaaacaacatttagggtagattacttacaggctttgctggcttctcactctctcaaatattaaaagatctactcccagaccaagccaggtcatcagagaaatatatacctaaattaaatcctattgttcctcctgcagaaaactcattatcgaattacactagagtgtgatgccaacacaccacactgatagttctcacaagaataagccctgtaaacctttcatttgcattgtaaggaggctaccaaaaacattttttattacctccacaatgaattccttatgagatcctccaggagaaagcccagcctggacttaagactaaaaatgttattacacgtcctaagtattagaagctggtggcttccagtatagttttactgtttagagtccaaggaacaagcaatgaacgcattccttcattcattcaaaatatttattgagcatctactatgggccagactctctgctaagatccagaaatgcaattctaaagaaaacaggaagtatctttgccttcactgacctagagagtagtgggaaggaacagatgattaaataaatgattataatacaaatatgtattatataatataatgatatagagcaagctgaaaaagatgctgggtaactaggtaagatctgttgcctccctgggtgggctgcaaggctcaaataaagtcaaactctgaccaacagaatagcagtgccctagaagaaagctacacgcttccgtggaaatcagggaagaaagacacagtgagaaaaagactagaaataggtggatgggtagagatactgagaacctaatgctgtctataccatgaccagaagtggtctatttatgtactttgcaacactgtaacagtctgcttgagtagaattacattgtgtagagtattcataactatatgaaatcatttcatgagcccctggagaaactggcctgactttgtgactctaaatgactaagtagaagaaggtatcaaagacagaatgttgtttgagatataatcttagggattttatttattaaattgagtcatattagtatagctttattagtttatttccatcaccactaccatatgaaaggagagagaaatatccaggctatattgagatcataaaccccgccttcaaatgaatttttgttctcaaagatgctggaaattcagagcaaagaattaaatatctaagagggattgggattacaaaagtttaattgagcagttttagtcatagtcctatcacgtaacgaagtaacacatgagacttggagattatgtgaggaattcaatgaacttggtacctcatgtgcttggtacaataataataataataaccaatatttattgaaggtttatcttgtggcaaatactggttctaagtgttttccctgtattaactaacaacaatctcatatggtaggcagtattgtcattttacagctgaggaaactgaggcataaagagacatggcaacatttccaagtcgtatgattggtaagttcaaacctagtcagtccaactccacggcccaggctcttagccactactgcattctcccaatacagtagtctaagagcgtctaagggaagctcaaaggacatatcagagaactctgcctcaggatatacacaggagttcatcttctcctctctggggcctttatgacatgaaaatgaatgggatttcagcataacaagggggatcctgtgctctactctgctcagaacagtcagtgtgggcctgttgtcccaatgcccaccagcatctcctttcacgccacacggttccagtttggataataagttacatattcacctaagtccagtggctaagaagttatgttctgaagtttgctgggtctatagtcaaaacccagcttagccacctactagctgtgggagttgaggccaattactttgtctcaataagcctcaattttctcatctactaaatggaaataataatagtccccacttcatagcattgttatgaaaattctaggagccaacacatatgaatcaatttgtataatccttagcaaattgtgggcacccaataaaaattcatttttatcaacattagattaaatgtttgagaaggtttcttacattggcataactgtggtggactgctttataaacttgagacatcaaagcatacctgtgaatctggagcacttagacaagaaccaccatcagtagggaatgtccaatttttctaagtaaatcactggtacttccaggggtatccattttaaaatgaaattataatgctaaagccattggaaatgcagttgggtctcagccactcccagggattttaatccattccattctaggctccctgggaacctcactgaaatgctaaatttcatggtaacatggagaaagttaagtatcctttcagcttataatctctttggggtacattttagcctcttgggccaatctggattcaaagttgtaacttctggcatcattctgcattcaaacataagccactgactcactgtactttgtattcgagccctggaatagctttaatattcagagaatatcctttatatggcatgggcatgaccgcagaccagtccttttgctggcaactgcagtaactggctacatgtgttagaacctgccaaaatgtttgtcacccaagacgggagaatcttgaaagacagactcaatagatcatagtcaggggcttgataaaaccacacagctagttagtatacatactgaacaaatcaccaatttttgctcattctttttatttgttaaataaagaggttaaatccattgaaaaaaaaagggggggttaaacctaacatggtctggctctgcgcggcttaagaagattccatctgctcaagaacgataacccgcttcccccttacttttaaaaacttctacttcctcccatagtaacctatttaatagtatgcctgactgtcagcaagttctttgcctccagcctagcttcctctcctcatcatgcaaattgccgttggctttaattagatttaataagccactgggaagtgaagcgagggaaatggagagcaaagattatacagtatgggcttactcttgcatgtccaatacagcatttccctggaactctcatatcctcccaggctgggaaaataaagaatgccaagcgcatggaaagacacgctgctgctgctgctgtccaaatgtgaaccgtgggtggagaaaaatcatttagaaaaagagagtgagggaaaaaagaaaatgaaccagaatccccaacagctgcaaataacgaagcatgtgaatctgttaccttggatgaactctgctttcctgctcacagacggcagggtcctgttgagccccaggatcctgtctaggtggaaggcaaacacctcactcatgtccaagggctgcttgagaagcccacaggggctagggccacagcggagcacagcgccaggtgcgcccccctccagcaccagcaaacgggctccgctcctagaggacacaggccggagccctgccactgcgctgtccgccaagagtcgcattcttcggatgtcatctttgctcagccaggagggggcgctctcgctgtagatcctaatgttgctctccctggagctgggctgcaggaagtctgggcccccggctcgcactcccggaccccgcaccaacctccagggtcgctctccaatcttaaccaggtttgctccctgagcgtacccaggtgctacagcatcagcttcccttgccgcttcctgcggctgaagggatggtccgaccaaagcctcctgccctggggcagccgatgccactgcatgctttttcctgcgcttgggcttcacggtgccacggatattggccggcttgctgcgcttggagcgtagggtaatgtacaccacattgggctgcagagtggacccattgccctgggactctggaggggccagggtaccatccaggggtatctcagggaaggatggctcggcggtgtcgcggctgcgatgtggccccttctcagccgcctgtccatgctggagagaggccctccccacctggctcaccaggaagcccaagtagatggcacacgcagtgcccagcagaaggtttctccgggtccttggacgccggctgctccagagcttacgcacccgcgggacgcacagggagcagatgaaccagtttatgagctgccccggcttgtctggacaggtcatttctctgccgcatccacatgttgaacggagtttaaagtctgcagttggctcctgctaatgtgatgcatggtttcctgacttcagctgccgcgtccgcttcgggatataagtggtctccagtgggcagaggtggaaggaaagggttggtgatgaagctgggaatgtttctgacacaacaaaccttttaaattatcagtctccccaaggagaaatgcggcttgtttctgggaatgaatggatacagagttaactgagtcacaatttcaaaccatttaagttcctctacaagagtcaagaaaaaaagtaatcatttcctttcataaatatcaccactaaatgtttttaaaaataaaatttaaaagcatgcaaacgagatagatgtatagatttgatagtcacttgaaagtagtgaaaacaagccacaaaaatccaagagtgttttataacttgtacctagagt

SEQ ID NO: 10296 - DNA, 6000 bp, Homo sapiens
tgatcatgtctattttgacatctttgtctgtatagcttcatagccataggtatccattatgatgctcatcatcacgtggttcacatacataataacatcatcagtgatttgaggacacttgggctgcattaatttttttcaaagagggcaagtagcagacttcacaggtgacctttactcagtgcctgctatatagagagttctttattagattctatggccatacatagaataaagaatgtataatttaacaacattatatactgcttagagaacagatattcttatgttttaaaaaagtagctatttatctgttcaaaagatgaaaataagaagttgatcttaaaaaaacttgaatgaagtgaggttttaaaaattcttatttttacttaatgtgtaataatttacattattagggataccaagtgatatttcaatatttgtatacaatttgtagtgatcaaatcgggtaattaccaacccatcacctcaaacatttattatttttctgtggggaacatccaacatctcttctagctttttgaaaatatacagtaaactattgttagctatattcactttatggtgttataaaccactaaaatgtcttcctcttacttggctgtaattttgtatctgttaactaacttttccctatccttgccagtctccaatgaccacaattctaatttctactcccatgagcccaatttttaaattcccacaaatgagtgagaaatgcaatacttacctctgcgcttattttacttaacctgctgtctcccaggctcatctatgttgctgcaaatgacatgattttgttcgtttttatgagtaaataaaattgtattatgcatatatatcacattttctgtatccattcatctgctgatgaccatttagattgagtctatatctattgtgaataatgctacaataatcatgggggttcacatatctctttgacgaactggtttccttttatttgaataaatacccagtatagtgggattgctggatcatatggtagtaatatttttagattttagagaaatttccctactgttttccataatgtctgtactaaattacattccaacaatagtatatatgagtttcaatttcttttcatcctcacacattctggtgaattttattttgttacttttgtgtgtgtgtgtgtgtgttttcagagacaggggtctcactatgttgcccaggctagcttcaaacacctgggctcaaggaagcctccagcacatcctcccaagtagctcggactacaggcatgcaccgccatgcccatttgctatatttttgataatagacatcctaaggagagtgagataacatctcactgtggctttgatttacagttctctaattatagtgatattgagcactttttcatatatgtattggccatttgtctgtcttattttgagaaatgtctattcaaatcattttcccattttacaatcagattattcttattactgctgttaagctgtttgggttccttgtatattctatatattagttcctcattggatgtatggtttgcaaatattttctcccatgctacagactgtctcttcactacgttgattgttttctttgttgtgcagaggaaacaatcctttgcacaagcaaggagaaagctttgctttttagtttgatgtagtctcatttgtctattttgttttttgttgtctgtgcttttgaagtcgtacccacaaaaacttttctaaaagatcaatgtcctgaagcgatttctccatgtttttcctaatagtcttttagttttgggtctatatttaagtctttaattcattttgagttgatttttatatatagtgaaagatagaagtctagtttcattcttcttcatatggatatccagtttactaagcatcattaagatgtcctttttccaatgtaagttcttggcatctttgttgaaaatcagttggctataaatacatggataatttctgaattccctgttgtgttccatgggtctatgtgtctgtttttataacaatgccatgctcttttgattactatgaatttgtagcacattttgaagtcaagtagtgtgatgcttctagcttagttctttttgctcaacattgctttggttatttgggctcttttgtggttctatgtgaattttgggattgttttttctatttcttcaaataatttgcttgatattttggtagggtttgcactgaaactgtagattgctttggacagtatggtcatttcaacaatattaattcttccattccatcagcacagaatcttttcatttttttttattcctcttcaatttctttcattactgttttgtactttccattgtagagagctttcaccttcttagttaaatttattcctaagtggggtttttttggtcatcattataaatgggatttctcttttgatttctttctcatctactttgtttcactggggtttggaaacactattgatttttgtatgttgatgtgtatcctgcaaatttactgcatctgtttatcagttccaggagttttttggtggtgtctttaggtctcttaacaaatggtttcctctaccttaaatatttttaagcttttaaaataattcctatttgccttttaagattagctggatcgttacctccttattaatttcctataactactatcatagggatcaccccacctcctgggacctaacctgctgcaacatggcaccattttgagagcagagccaccaccagaatacatcacgtcctgggatccagtagtctctgcatctgcatttccctggggctttgtcgtcttatagttctagaggtcagaagccaaatagagatcccactgggctaaaatcaacatgttaatagggctgaattccttctggaaactctagaactcattttctagcctttttaagcttccccatgccaccttcctcagggtttcccttttttcaccttgaaagccatcagtgtagtatcttcctcctttcttacctctattcatattcttcatcttctctctctgactaactctactgcctccctctcataaggatcctaatggttacattgggtttaccagtataatttgcataaatctcctcaactcaagatggttaacttaatcacatctgcaaagtcccttttaccataaaaggtaaaatattcactatccaaagattaggatgttgagatatttggggggaccattatttagcctactataccttctcttcaaatatgacctgatctcttgagttagaatttgttcctttttctctggatttcagaatcatgattacatagttccaatatgagaatttttagaatgacttcgaaatttggggtaatctttttacctttactgttattttcttggtgacgaaattgtgcatttcatctctgcagtcaaacaggcctgaatctggacccagatctccacccatagtggagccagatacctggtccagatctcagcgttaccacctatcagtgagaagcagccccaatttttcagtttcctcagctgtaacatgtatgtaattatagtatttactacaaagatttattgtgagcattaatgaatatatggaaatggcttagaacactgataagcacatattattcactcaaaactgttagttattattactttccacttgtgagattattgtagaattaaagagacagtaaataaagctacagcacaatgcctggaacatagaaaattatccctacattctagttttttatttatcatcataacctatattaaatacaacaggttaaagtcaaatagagtgaagaaaatactgtttcaaaggtaggactttagtgaaatgcactcaactttatgctaataatctgatgtttcaggctttcttattttcagacttagtatggttatagggttaaaagatatgaaaggccaatagtgttgcaagggatatattttattagtttcattaatgaaattttaatagcaataaattcaggcttttaaatattacaaagtattttcaaatatctcatggggccttgatgttagcttcaggaagtatctagcaacctaatggctgtttgattagacttctcagactattattatccttgtcacataatagtgctttagtccatgtatcataggatcttcaagtattattcatttgtttccaaagcaaattgagctattccactcaaatgattacagtaaatagaatagaaacttgtggaatcatcttcctctctcgtaaatgaagtaacagcaaaatagcgcagcatctcagctgttccaggttcctcaaataagttttacttttgcaaaaccaacctcaaacttcctatattctctgttctgcattataagcaacatgaccagcagccacgtttgttgtaattttttaaatatgtggaaaaaaagcaagatatcaaccatgtattaccttaaccaagatgccaaattatctaacttgtttctccaggcaagcagcccaacaacagggacagctcccaggagccagtcaaggttgtctgtctgtccatccactcaggacatctgcaggtaagtgctgaacaaattatcttaatctatattctttggatcaatattcgtattcttgttgtttgttctgagaatgtgtgtctcttgcttctgctttacatggtccatagaaaatttatactggctattttttttcatttagttcattttcttcagttgatctttatttatctacttctggtccatgctgtcattttcatcattctctctctctgtttttccatggctttcctctccattcccatttcccatcctttgcctgctgctctgtctagatctgccatcttgcatgacatgtcagaagagtcatttgagtattgcacccctgtcatggtgctgagccctgctaggaaggagtctggtaagaaatcagtaatacaaagacctaggaggaggagaaaagcctctgagagatatgagcatgctgcagaagaacaaataagagggagaaaaaatgactttcaccttcaaatctcaagccccaggtggagggagctttacacagattcttcagattcatcttccacagatgagagtcattggattcaggcaaaaagaagagcccaggttaaattcagactgtcaagaagaaggaggagaaataataataagccgtgtgaaaacttagctgggtcttccactcctaacggaattgagctcgttgatctgggatccaaaggtaaagagcaacaagagctgattgaatgtgagagttgctctttaaatctccacagaggaaaacatacaaggtaccaagaatgcaacccttctctgactcaagggtcctctgaaattaagagatcctcaaggaatcatgagaagagcaaaggcagatatcaccacagagatcctcagctcttgcaaagtcttaggaaaaatgaaataatgaagaagacattttcagaaacagattccagcactgaaatactgggagttccagaaggcagcaaggacatgaatgatgcagggctccaggtgaataaccctgttcagaagcctcctgccacctatgacgatgggtctgataatttagaagtatgcaggtcagtcactgtagagaaaggcttgatgtcatccatatatagttctttttgcagtgagttaggtgcgtgtttgacacctaccctcaaaacttaacatttatttacattgttctttttctgattggatataaaaggagaaaaggtgggtatgaaaagaataatgcagatgtaaacatgggtgtgaaagctgttaccaagtacaattagatatccccttcctttaaactgaataatgatttatcctggtaaaggggctgactcagctgagtcttgcactcattctagttatgacagtaatagtgggggaattaagagtgagactgtgtgaaatgttagacttttcaatgcaaatttgctggcatcct

SEQ ID NO: 10297 - DNA, 6000 bp, Homo sapiens
aacagagagctttatctgaaaggctggggcaggcagatcattcaaatcacagcatttgattccttcttacacctcccttttcacatcacatatccatttcataattactttgggcctcaacttccatatttgttaaatgtttgtaagagtccccaggcataatgacatctgggtgcagctggtagaatttgtatgaggatttaatgaaataatgcaagcacagtacttagaatggtacctggtatatatatctaggaaaactcaataactcttagccatggttaaggtttttttgtctccttgaggaaaaaaaggaggttcccatggctatatctgtgcatcagtgtataagtcatctgtttcattatatttatatatttagttatttataactaaactttctagtaggctgtggtgatagagaaagacgatgtaccttagggccccctaaaggatttgttgagggacgcagatttatgaaaagagaaaagactggaagttagaagacaaaaatttttgctggacaactaactcatcacatgaccttgagcagtcttcttgcctttctttcatctctaaaatgaggtttaaaaagtctactgcataggattctcagaaaaattaactaagacaacttaaatatctaaattcaacttgcaacacagactaaccactttcttggtgccagatataaatttatttttataaacattaatcaaaagtcagaacagaaacaacatttagggtagattacttacaggctttgctggcttctcactctctcaaatattaaaagatctactcccagaccaagccaggtcatcagagaaatatatacctaaattaaatcctattgttcctcctgcagaaaactcattatcgaattacactagagtgtgatgccaacacaccacactgatagttctcacaagaataagccctgtaaacctttcatttgcattgtaaggaggctaccaaaaacattttttattacctccacaatgaattccttatgagatcctccaggagaaagcccagcctggacttaagactaaaaatgttattacacgtcctaagtattagaagctggtggcttccagtatagttttactgtttagagtccaaggaacaagcaatgaacgcattccttcattcattcaaaatatttattgagcatctactatgggccagactctctgctaagatccagaaatgcaattctaaagaaaacaggaagtatctttgccttcactgacctagagagtagtgggaaggaacagatgattaaataaatgattataatacaaatatgtattatataatataatgatatagagcaagctgaaaaagatgctgggtaactaggtaagatctgttgcctccctgggtgggctgcaaggctcaaataaagtcaaactctgaccaacagaatagcagtgccctagaagaaagctacacgcttccgtggaaatcagggaagaaagacacagtgagaaaaagactagaaataggtggatgggtagagatactgagaacctaatgctgtctataccatgaccagaagtggtctatttatgtactttgcaacactgtaacagtctgcttgagtagaattacattgtgtagagtattcataactatatgaaatcatttcatgagcccctggagaaactggcctgactttgtgactctaaatgactaagtagaagaaggtatcaaagacagaatgttgtttgagatataatcttagggattttatttattaaattgagtcatattagtatagctttattagtttatttccatcaccactaccatatgaaaggagagagaaatatccaggctatattgagatcataaaccccgccttcaaatgaatttttgttctcaaagatgctggaaattcagagcaaagaattaaatatctaagagggattgggattacaaaagtttaattgagcagttttagtcatagtcctatcacgtaacgaagtaacacatgagacttggagattatgtgaggaattcaatgaacttggtacctcatgtgcttggtacaataataataataataaccaatatttattgaaggtttatcttgtggcaaatactggttctaagtgttttccctgtattaactaacaacaatctcatatggtaggcagtattgtcattttacagctgaggaaactgaggcataaagagacatggcaacatttccaagtcgtatgattggtaagttcaaacctagtcagtccaactccacggcccaggctcttagccactactgcattctcccaatacagtagtctaagagcgtctaagggaagctcaaaggacatatcagagaactctgcctcaggatatacacaggagttcatcttctcctctctggggcctttatgacatgaaaatgaatgggatttcagcataacaagggggatcctgtgctctactctgctcagaacagtcagtgtgggcctgttgtcccaatgcccaccagcatctcctttcacgccacacggttccagtttggataataagttacatattcacctaagtccagtggctaagaagttatgttctgaagtttgctgggtctatagtcaaaacccagcttagccacctactagctgtgggagttgaggccaattactttgtctcaataagcctcaattttctcatctactaaatggaaataataatagtccccacttcatagcattgttatgaaaattctaggagccaacacatatgaatcaatttgtataatccttagcaaattgtgggcacccaataaaaattcatttttatcaacattagattaaatgtttgagaaggtttcttacattggcataactgtggtggactgctttataaacttgagacatcaaagcatacctgtgaatctggagcacttagacaagaaccaccatcagtagggaatgtccaatttttctaagtaaatcactggtacttccaggggtatccattttaaaatgaaattataatgctaaagccattggaaatgcagttgggtctcagccactcccagggattttaatccattccattctaggctccctgggaacctcactgaaatgctaaatttcatggtaacatggagaaagttaagtatcctttcagcttataatctctttggggtacattttagcctcttgggccaatctggattcaaagttgtaacttctggcatcattctgcattcaaacataagccactgactcactgtactttgtattcgagccctggaatagctttaatattcagagaatatcctttatatggcatgggcatgaccgcagaccagtccttttgctggcaactgcagtaactggctacatgtgttagaacctgccaaaatgtttgtcacccaagacgggagaatcttgaaagacagactcaatagatcatagtcaggggcttgataaaaccacacagctagttagtatacatactgaacaaatcaccaatttttgctcattctttttatttgttaaataaagaggttaaatccattgaaaaaaaaagggggggttaaacctaacatggtctggctctgcgcggcttaagaagattccatctgctcaagaacgataacccgcttcccccttacttttaaaaacttctacttcctcccatagtaacctatttaatagtatgcctgactgtcagcaagttctttgcctccagcctagcttcctctcctcatcatgcaaattgccgttggctttaattagatttaataagccactgggaagtgaagcgagggaaatggagagcaaagattatacagtatgggcttactcttgcatgtccaatacagcatttccctggaactctcatatcctcccaggctgggaaaataaagaatgccaagcgcatggaaagacacgctgctgctgctgctgtccaaatgtgaaccgtgggtggagaaaaatcatttagaaaaagagagtgagggaaaaaagaaaatgaaccagaatccccaacagctgcaaataacgaagcatgtgaatctgttaccttggatgaactctgctttcctgctcacagacggcagggtcctgttgagccccaggatcctgtctaggtggaaggcaaacacctcactcatgtccaagggctgcttgagaagcccacaggggctagggccacagcggagcacagcgccaggtgcgcccccctccagcaccagcaaacgggctccgctcctagaggacacaggccggagccctgccactgcgctgtccgccaagagtcgcattcttcggatgtcatctttgctcagccaggagggggcgctctcgctgtagatcctaatgttgctctccctggagctgggctgcaggaagtctgggcccccggctcgcactcccggaccccgcaccaacctccagggtcgctctccaatcttaaccaggtttgctccctgagcgtacccaggtgctacagcatcagcttcccttgccgcttcctgcggctgaagggatggtccgaccaaagcctcctgccctggggcagccgatgccactgcatgctttttcctgcgcttgggcttcacggtgccacggatattggccggcttgctgcgcttggagcgtagggtaatgtacaccacattgggctgcagagtggacccattgccctgggactctggaggggccagggtaccatccaggggtatctcagggaaggatggctcggcggtgtcgcggctgcgatgtggccccttctcagccgcctgtccatgctggagagaggccctccccacctggctcaccaggaagcccaagtagatggcacacgcagtgcccagcagaaggtttctccgggtccttggacgccggctgctccagagcttacgcacccgcgggacgcacagggagcagatgaaccagtttatgagctgccccggcttgtctggacaggtcatttctctgccgcatccacatgttgaacggagtttaaagtctgcagttggctcctgctaatgtgatgcatggtttcctgacttcagctgccgcgtccgcttcgggatataagtggtctccagtgggcagaggtggaaggaaagggttggtgatgaagctgggaatgtttctgacacaacaaaccttttaaattatcagtctccccaaggagaaatgcggcttgtttctgggaatgaatggatacagagttaactgagtcacaatttcaaaccatttaagttcctctacaagagtcaagaaaaaaagtaatcatttcctttcataaatatcaccactaaatgtttttaaaaataaaatttaaaagcatgcaaacgagatagatgtatagatttgatagtcacttgaaagtagtgaaaacaagccacaaaaatccaagagtgttttataacttgtacctagagtcatttaagttgactctgaagcaaaagcgttaaaatgtgacaaacctgggcttttcctttttgaaattcagaaagaacttaagacaagtaatagataattttttaatactctatacctataccatttttattttttaaagtcctgaattaactaagtacaagcagcaagtattaacaataaaatttagaaacatattctcttagtctaaaggtacaaattgtacttcatattaataatatgttccattagcttacattgttagtataatacaaagccataaatgtccatatatcttggaagcagttgcatttattctgtttctctctctctctctctttctctctctctcacacacatacacacacacaacacaacacaactctgactgctttttatttcttttctttccaccgaagtcagctgaaagaaaataaaagcatctctagttctgttttttcactattaaaaagaaaaagaagaaactcgtaagcaaccttacttacacagctggccccatgcttggctccaggaagaatgtaatccttgactctaatgcaaagaacttttaaaggctgaggcatgt

SEQ ID NO: 10298 - DNA, 6000 bp, Homo sapiens
cttgttcagttccacttaaaaaaattgctagataatcctattgaacatttattgtctaaataatcaataactgtctgcattatagataaattaacctggaataattaaggtaaatgaaaatgtggattcacaaatacaaccgagttgaacatcagacaaaatcagattttaaccacccttttattatctcttatctctgtgcttaataagtacaattgttgctttaagtttagattagtccaattgactgcaactcagattaactttcatgttattttttgttttaatatgaaaaacaccaaaagcacattttgaggtccaaattaaaatagaggctgactcagttccatagagccggtctgcagaaggttttactggagatgagagatgtttttgctaaggttgtctatcataacttgtttattaaaaaaataaaaataaatgctaggagacattcaagctgtcttgattttcctctagttatttcctcaaaggttctttgttcacatggacatcactgtggcatttttttcaagcaaaatgaggtttaattttatagtatttatagaatagaagtctttgttatatcctatcctgctaccaacttttgtgttctatgcagtctctgcttctaaccagaggcccaaagcatgtgtttagaaactgatgtggggtatcaggatcaattagtccctctaggaattaaaagcaagcaattgaatgcctgttaacaatgactaacttgaaaaatattagcaattctaggcaggcccctttgctttctggacgaatgctctaggcaggcagcattcccaggaatattggtttccagctatgtagactgtccctcagttataaagttgcctccagggtctttgctatggctttgatttgaggatgattattattcttatggatgaaactttagttcttcctagaaaggctttcagcgatttgcatgctctttccagctgccctccaaaccttgcccagccttatttttctccatcataaaatgggtacacaggtcatttttattggatagtttggaggactaaattgactgagatgtggtatatgaagtgctgatcttaatgtctagcccatacgtggtctgctgtatatgtcttgctttccacctttctttcttgagaagtttctgcatacatatattcttatgtagttattgtataaatagtgtatatggaaacattcccgaggttgtattttcctgttctttcttgatttagaaaactaaaactacagtaattttctgctgtgtgtaagagagaaaatgtgcttatgaactgtattcagcaaacttaaaatgttgaagctcttggtcacctttttatgcccagtaatgataaactgtcaatttgcttacgttatttgggaatttactagcaacttgctgcagatatcacagtagacacatctcttataatatgtatgatctgaaagaagcagcagtctggtagttttttgtttgttttattaaaataaaaacttataaacttataaaaacaaatgaacaaatatatttatcctaatagctcttctgagtttgcttctgaaatcacctatattcaatatagacaacaaaaccaattgtttttgctattctctgaggtttttgagtttgagggtttgaatttgattctaatttttagaaatgggcagttgtctgaaatatggagggatgggaaaagcctttaatttggagtaggagtgaggaaggaaacccaaatgttatacacttcagtcaacgtatttgttagagaattgaattattctcttgaggtttttttttttctctttgttagcaactcgagatagattctcctgcctctactaatattgaaaccctggaaaatgttaacagaactacagaggggagaaattatcaggatggaatgtaggctttgtgtagatatgcaacattgggggcactcagcagatgttaataaatacctctttctattgttgagaaaaaatgggtttgatttgggtgtgaactgcagtggtcaatgaaaggaacttgtatctcaccagggtgtgttttaagcagtagaagaggaatctgggtgttgatccaagtgacgttggtttttcataccaaattattccccatttttaagggttgtcatccccctaaaattgtaagctctcttgtgtccatgtcatatgctttcttggcagtccttgtgatacatggctgtgcacacagtaaggtttcaatagatccttgttgtctgaaaccagatatttgggaattttggagacagagttgacgaaggggtgaaaggagggctgtgggtagagagtaagagaaatagtcaaagcagagagagaattaaatagagaaatggcccggggaaccagaaaaaaaccaaggttggtgagcaatgaaccatttaagttctcctgagaaaagaaaaaaaaaaaaactggactgaagaaaaaatttaatctgaagagttaattaacaaaattataaaacctctaaaacatccctctcattacagttgtagttttaagacaaaaaaaaaatatcgtggaaagcactctaatttgtcctaggaatctatttaattttgatttgtccagtaatagaaatttgagggggaaatgcaatatactgtagtttatgagtcttttaaatgttgttacttctgaattccatcctctttgtgatagtgagagtgaagaaaacacaagtgtatttgaaatcacttctggtttcagtgcatgtgctgatttgattttttagaagtagaattagatggcaaaaaataagaaaaccctaacaatacaatctgggcaggttagaatatcaaaaattataacgagcctgttctaatgtaaagaacatctctaaaagatgtgaataggttttaaaaatatgatgaatatctagcattggataaacacaaataaaggtatcagtgaatatcacaatggaagaatcacatgataataattaataaacattgactcttcttggccaggtgaccaatattatttcacagttgatccttgagggcagagccaatgacctttgtcctgaattttaataatttactgaagttttacattaaatcagaatataattgggaagaaaattagtgtttctttgtggggagtgcagagtaatgccactaattgcttgtataaaagcattcccgaggttgtattttcctgttctttcattagaaaattaaaactacagtaattttctgctgtttataaaagggaaaatgtgctggtgaactgtattcagcaaacttaaaatgtcaaagctcttggccacctttttatgcccagtaatgataaactgtcaacttccttacattatttgggaatttactagcaacttgttgcagctctcacagcacacaaatctcttataatatgtatggtctgaaagaagcagcagtctgctggtattttgtttcttttgttctttctttcactttaatatttgagcaatttaatatttaaaatatgtgttagggcaaataaccatgtttttctgtttaaggagatggacaatgaagaacagtgtaaattaacctcagtagaataatgctttacaaattatatttaggtaactgggggattgttttcaggtaaattattatcaagtaaaagaattgagctgattctaaaagtatattgggtttaacattttatgaaaacatgtttattcacacagatacatacacgtgtacatctcctgggaacttggaagggttaagtcagaccactgtcatgttacaggaagtgtttttccactgtgtccagtaccttgagtttgttatgtattcaatatgtagtgtcatcataaaacagttgcacctacctgcattagccctcattgtctcaaggtacaagctgaaaaataatagaaagtaaagctcaggaattgaatatttctgctaatagtgtgttggtatttttccctcagttcacagacattcttgatttcaaaacgcaaactacacaacccagggcactagggttggaattcaatgtttattcaaaaaggcaccctaaggcagttagggaggaaacgctacatgtatgaaaaataggagccgggaatcaaagctgatctgagcagagcagcagcgactgtatttactaacacttgttttctgggagcctatgagagaaatggaaataattagaaggaagctgaaaggatggggttttgtggcttgttctccttatatggagcaaagaaaactgcagcaactcttcgggagctggtattccctactgccatgggggcagccgaattctgggtggaggagtttgtttataccttaacacatacaggctattttgttgattaaacaagcaaaaaaaaaaaaaaaaaaaaaaaaagccccgtttgcgctttcaaacactccctcaatgagaaaatgtctcataaaaatgcatcatgtgataagctcttgctttagtcccaaactgagcttgagtccacttggagatcttagaattaaagagttcttagggaatacacgttttagctaagaatatagttactctgtcatgaaacagggagctttgccacttgcttgttttggaaggaaaataaattaaaaaaagattgcaggggattttggttattatatggccagggctccgtttagagtctgtggcattcaaagctggctttaatcacagcatgatgcttgaagcctccaaaagtctaagtgtttcctttctttctttcttttctttttctttctttttttttttttttaaagcgttacttcactgaagcagagggctgcctttgagtgacgtcacgagttagagcagcaagctgcacaggggaagggaggctgggtgagtgacagcccagcctactttttaatagctttgtcatgtgactggggactgtagtaagacaggtgccttcagttcactctcagtaaggggctggttgcctgcatgagtgtgtgctctgtgtcactgtggattggagttgaaaaagcttgactggcgtcattcaggagctggatggcgtgggacatgtgcaaccaggactctgagtctgtatggagtgacatcgaggtgagctggggcagggctcggcgctgcagccacaactgacgcttccctcagatgctattattcctgtaaggggggatgggcttgggcaaagagaggagccaggaaagtagtccaggcaggagcttttagaagaatctcaatcttatcttaactccaataagtttgctattttaaggtggctctgagatggcttgagcaaatcaaagcttagctgctgtcatcagtatctgttgcagttagaaactctttccatgtgactttggcactgtttctactcatatgcaatatttatgctctaagatattgatatgaatcagaagctgaagtctttccagtggtgtttagtggcctggttggaaaaatgccatttctatttataataagacgaagataaaaatattaaaatggatgtgttcaaatatagtccgttttgactctagtccggatttttcccccctctctctctgttcatcagacagagaacttacaaaatcctaaataatcctgctgggctattttagattgcttttcccacagaacacaaaacaacgatgctgcttcctttaaaactcctatacgtggttgaaagatttggccagcgaataaaaagaaacgcctggcagtgcaaggttttccgttcgcgtcggtggcagggaagccaatggttaaatcttcctgtaccacggagagctgcctgaagctgagagagaatagagtttatgcaggactgtgtgtggagctgctcgctgctagtgtaaaaatagacagcaatacatcaattccacagtctctgctggctacaattcatacaggggggaaaataacgcaagcagtttcctcgtaatctctggagtctagtggggggacggaggacctcggcgtgtttgcattcagcacaatggaatgctc

SEQ ID NO: 10299 - DNA, 6000 bp, Homo sapiens
aatgtttaaagactcagataccaaaaaacaaataaagctttgcctattaataattgcaagatcccctaacatctctcccaaggggtaagataagctgatactgtaaataagggcaaatggactccccacaagctattttgtgaaaaagtttcaaaagaatatccatatctgcttaaaaattcaatcttagctttgtaataccaaactgttttaaaagcagggaagatgaaaatttgagaacagtttgtgtgtgtgtgtgtatgtgtgtgtgtgtgtgtgtatgtataaaatggacaaaagaaacacaggaagaaaccttataaatttctaaaatgttgcagttataataaccccactgtacaccctaatttgatcaaattgtccttaattgaaatcattgattaaaatagtggtgggagtacctagcttaagaattgttatagaaaatcattttgtaaaggaggaaacaataatcaatgcccaatttgtaagttttggaaacaatttacattatataggttaccttaagtgggggggttctttttatccaacattgtgttatgaaaaatttcaaacacacaaaaaagctgaaggaactttacagtgaacacctgtatacttagcacttatattctactattaatattgcattatcaacatgttttatcacatatctatccatccttctgtccattttatcaatccaccaatgttgctgcattttatttttgatgcacgcacttccaaattagtttgcagacatcagtacacttccaaatggttctttttaaaactcactgaatgttatttttcaaaatatctgatacgtaaatattttcttgatcaccatcttaagatataccttaagaatgcagtaaatatgaacctagaagcctttcctacaaataagaaaagccaaaaggttgttttactagaggccaaattgttaccttgagccagctaagaaccgagtcgtgccaaaactgtgtaggtgatggaggcaatgggaagctcgctgtcaggacagtgggaatgtggaaggagaaaggcagtgattgttttaacagggcacctcggtgtttaacacgggtctatgtgggaagggattagcaactttcacagctatttaggaataaaacgggaaagaacccaaagaagggcgggggtggaagggggcaatagagcctgcagaaaaaggagtgttaagccagaaaaggggtgtgtgtgtggtcagttggtggggtttaactgagtcaaaagggaccacagcaggggagccggttaactggtagtgacactcacacttctcccccctcccaaacccccaatcttccatctaagggtgtgtgtaacggtgcgggggaagagtctggggcagaagcgtacctcgcacacgcgcgtgaacacgcgcgcacacacatgcacacgcatacatatctcctgacgtggtgatctccgtggccggggtgggggcgtgggactccggggaggctccgcagaggggcagcgggcgcgggagaatcccgggatccgggttcacccatccatcctctgtcccctgccgcgtgcccgcgcgccgccggccgcccgcctgccgggcccagtcgcccccctttcactttcgcgtctgcgtaggtgtctgcccgagcgggcacgagggcgcgggggcgcgccaggagacgcgggggcgcgcggcgcgccgcgagcggaggaggaggggtcccggctctcggccccttcctcggcttgccccgccgagccgcctccgcgggcgtctgagccgccgtcagagcgaggggaccggtcgcgaccgcagcgccccagccagctccccgcacgcctccgcgcacagacgcccgctccctcctcggcgcccccccacggcgggggtggggcagaggcgcggcgagcccgagaggggcggggagaggagcagcctggcggggtgggcagccgaggagcaggaaaagaaaacttttccctcccgccccccgcgcgaggtccccagccctcgcctccccccgcaggtgggaactgcacctgaagccgggcgcgaggtcagggccggactttggagggctgcgggcagggctgaagggggtgcgtgcatttgggctcagttttcctttggcctccaggttgtcagtggccgtagtgggagggcggctgccggcgcccctgcccgtttcccacccgcgggtggccggacgcggtgccgcctcctcccgctcgtgagggcgtgacccggggaggggggcgcaggctccccctgcgaccgccccctcacacacgcgctcggccgccggagctgtcaccggccacccagggcccggggagggggcgcggagagtggcgctgcggagcggcgggcgcgggatcctcctgccggacttcccggctcccagggacgccgctgtcaacgccgagcggacgcgcagccccgggagaggggcccgccagaggcccggccgccgccgctgggggcgggcgggtgcccgcgtccccctctgcgcgatttggcgccgctgcctcgccgcctcttgtagggtaacagcactattgctctacccaccgtcagcagggcgactgccactgccgggattatcatcctctccatcctcaccgccgatcagccaatattggacttgctggtggcggcggcagcagcggcggcgggagtctagccgttccccttcccccgccccagcctccccaccatgtcctagaaaaggtgagtgcagcgacagtcactttgcgctgacagcggcgagagggggtccggagagcgcaggggcggccccgggcaaggcaggttgcgcgcccagggcagagggcgcgggttggcgagcggaggtgggatgcgggcaggagacgagttgcccgctggcggccctggggcaagggtgctgggtggcgggcgagtgatcgcggcggctgcccctgcacggttctaacctagattttgcaagaagctgagatccagggcaagaccggccctcctcaaaggagataaaaacttagtaaaagagacacgtccattcctttaataatgaataattcggcaacgcttgcggagccgccgccgcctcgcgtgcccaggctctaggtccgggactccccttgctcccgcccgccgcccgcgctctgccgacgtgagatcgatgcccagttcgctgggccgggagagtgcgcgtgacggtgggccccgcgggaaagttgggacgctcggcggggactcctggctgcggggacgccgggggcagctccaagctggggaccgaggggcattagagtctggggtcaggaccagctcgcggcgctgccgctgtcgcccctatctccagggagttcctgactggagcggctgagagttcaagtctcagccctgggttaggggtccggaatcccggagcttaactaactgttaaggagaggaggggcctttgggcacagggtgtcccccggtcccccgcctcgggctttggcgggcgcgaagcgagggtgaggcgggaggccgcacagctgccgccgccgggctgcgggtcgccgagggccgggggaccagatttaggtgtatacgtcactgatgctgactccgggccagcggggagcctaaaacggggccttacatgagaagcctaaaagtccttagaaatcaaagttaggaaccccatccttttgcttagtaactgcagcatttgggtgggcgggaggagaatcgaggagggggcggttggagggaaaccgaaatttcttcatgcagacaaccgatccttagaaaacagtttggttccttcccccctcctgtctgtttctcccacttatgtgacccaccccctccacccattataacgtgaatatcctcgatggtaagcttgctttcaaattgaactagtggaaaaatccaatactaaagtagtaagtacagtgacaaaattataaggaagtagaggagcagctcttgaccctgccacttctttcatttatctttctctctctctcttttttttttttttttttttttttttttttttggtgttaggggtctaagggatgggaggaaagctgtgtttaaagggtttttccagcacggttaaaacaactaaattcaaatcgagtgaacgtgatcgtcttgctcgctggcagcgaaggctgctgctgctctgctgagaggtaactctggagacagtggaaaggggctgggagaggaacctcgagggtcgggtgaagcccacccagagtcctccccgcgcgcggacgctgttgggcggcgccagggtctgggctgcagctcacctggagctgcaggtggagagcgtgaggggacgacactttgctcgcggaaaaaccgacttcttccgcgtcagcacacttttcacatctctccagatatcctggggtcggtcagaaggagagcagggtggacgtaagcaagtttggggcggccgagcgatgggggtgggggcagcgtgcggaggccgcctgatgtagccaccgcccggcaccccaagctcccgccgcggctgcggctttaaggaagctgccgagtccaggctgtgtcgcagcaactttgtatcagtcatgtcgcccgcctggtgactgacagcctggattgtccaataagaagcccgcctgacccgtgcggcgtggagccttgcttctcttcgggccaataggaagggttcaggggggcgggatagcaacctgaactttatctggacatgtgacccgcttttaaaagggccagccctccagctggcccactccccctccgggctttcgcccgccctctctccctcccttttttgcccgccctggccctgcccctgcccctgccccctcctctcagcccctccgcgcccggggtgtcattgggcccgggagacgggagccaacttcaggctgctcagaggaagcccgtgcagtcagtcacctgggtgcaagagcgttgctgcctcgggctctcccgctgcagggagagcggcactcgctggcctggatgtggttggatttaggggggctccgcagcaggggtttcgtggcggtggcaagcgctgcaacaggtagacggcgagagacggaccccggccgaggcaggtgtgtaggggcgcgcggcggggcaccgcttgccgtgctcggcgtgcggccgcggcgcgggagcgtgcactttgcagggagaagtggctgcgtaatccggaggcacagtcagtatggtgctgtgtgcttgttgttttgttttggttttccacttttctccccctttggccgccagaggactattttgggaaagtttggccactttggataaatgccctctaactagcagcttttaactgcctttggcagtgggaggtctaccacccttccctttacccaaagatgaatttcggatcattttccctgtacaatttttaaaggacgtttgaataatatttctttcctttatcaattgcggacgctcccaaatctcagccggaggtgtagcgcataagggcagttgaaggagatatagatcctaatagatcctgtataaaaggggctctggaaattcgtgcatttcccgttcgctagcattcgcgaaactcttgagacaggctacgcttcctatggcatcagttggaattttaagggcaagggagaaggggacgaagcttcttttggtggcatccttactctgctactgaattttaggtgcgtggctttgcctactcaatttaaaaagaccaggtttaaataataatggtttatggcaccatcagttttaattatttattatgacataggagttaggaaaacttttgatagcagacgagcttttgaaaccgccgaattttaaaggcaccaaattgcttcctaacattttgtattgccatttctctaggtgctgttattgatgatatttacatagtaatgataacagcattctccatctgtgaagtcctgctgtgaagtttaaattttatgtttgacatcgtggcagctatcatggaaaagcttgag

SEQ ID NO: 10300 - DNA, 6000 bp, Homo sapiens
tgtttttgagacagggtcttactgtgttgcccaggctggagtacggtggtgcgattatggcttactgcagcctcaacctcctaggctcaatctatcctcctgcctcaactgcccaagtagctgggactataggtgcatgtcaccacactcaactaattttttaaactattttttagagacagggtcttgctatgttgcccgggttgagaaaattaaaatataaaaattcaagtggactcgttttatgtggataccttattgcctgccgcaatgcattaataatattttatatcacactaactttttttatggctaaagattaaatcctgaagcatttttttgcaatcatctttgctagagtttaaaaaatagtgttgacaaagatgttgtcttagttgctactgacagctgttaaaatgttgctaaaaatatagtgccaactactgaaaagctaactgctcctgtgaagtcctaatgagaaattctaaatgagtgtttcatcaagttcaacagagacttacatttcccacacctgacccattggattgtctcactttttttgcggttgttactgtacataatattgcagaaacagcttcaaggcataattttaatgagcacacaaatcatgcaattatttatgtaagattagcacagttatttaaaggtgatgaatttcttgtactaaaccaagaatatatgaaaaaaagaggagaaattgaaaatgtctttatttttattaaaatatactgctctaagttcctcccctttttcaactactgtacattatttctaaatttagaacatcagtgtaggcacggtgaaatctgatttgcttctaataatatggcatactaattgtgatgcatgtgctgtttggtgctctgtcatctcaaaatctggccataaaaatgtattaagtttgcatattttctatttaaaatgactacagatggaattaaggtagccagatgaataaataataaggtaaacaaatacagaaattaatgaataaccaaagctaatacaaatattccaagtagtctagaaaattgagtttgggctattttggatattaacaaaaaccctgatatgttttgtatttatcttctggtctacaatttcttatttacttgcagtgtttataaactgtaacatgtgtgctttgcaataaacaaagaagaagttttatcttatattattcctctattcatcttctctctccaacacccccctcctttctctttctgactctccctgtctttctcaactctttccaacagctggtaagagactgaaaaaaaaaaaaaatcccagctttttagaaagaaataaaaaaaaatgccagcatggctaggcttattaatgaagttaactaggaccaaatgcttagcctttaacttttaaaaattattgaatatgattaaattatatgatacctattggtctttactttcttgtcagtaaatagataatggagaagtacataatacatttcaacatatacatgttcaattttttttttggcttataattttacagcttaactccatggctttccccccacccctcagtgtcagctgttgaaggaatggattcggagcagagaactaaggggtggttctgctaaagctgaaatagagagctagggaggatttttttccaacacaaacttagatgatattaggctttgtatctgaagttacataatagaggatgtgatgtcacacatgtaaattgcaaacgctgagtcgtgcactttagtggcaaacctcagggagtttgacattaatgggatgggggggagggaggtgtcctgaggttcagcgactgtgaatagagggagagcaattgtcaaaagggagatgtctgatgctgcttcaagctttcagctatttggcagctacataggagacgaagttaacgtccttttccgtacgataattctcccttttatttttcttgaaaaaatttctatccttttgcaaggaaaaaatacacttacataaaaagacgaaagcaacaaactttgttaagggacatctcagaaaacaactaaatattgacatttactaggcacacatatttctgagttgatcgggctctctatgaatgggcattggaatgaagagtattcctaagcttctaaaaacccatcttctttgaagagatccctctgaggcatcacttgtggggtgattccaagcaaaaccagtgccaccttctcttcagatgagggagactcagatcttatcccaaagttgttcacttttcagggtgtcacaggaccaccttttgtctctcagcagaggaaaatataaaagtggtttacccaggggaaacttaatcattcaaatatttgggcaaatgtttaaagactcagataccaaaaaacaaataaagctttgcctattaataattgcaagatcccctaacatctctcccaaggggtaagataagctgatactgtaaataagggcaaatggactccccacaagctattttgtgaaaaagtttcaaaagaatatccatatctgcttaaaaattcaatcttagctttgtaataccaaactgttttaaaagcagggaagatgaaaatttgagaacagtttgtgtgtgtgtgtgtatgtgtgtgtgtgtgtgtgtatgtataaaatggacaaaagaaacacaggaagaaaccttataaatttctaaaatgttgcagttataataaccccactgtacaccctaatttgatcaaattgtccttaattgaaatcattgattaaaatagtggtgggagtacctagcttaagaattgttatagaaaatcattttgtaaaggaggaaacaataatcaatgcccaatttgtaagttttggaaacaatttacattatataggttaccttaagtgggggggttctttttatccaacattgtgttatgaaaaatttcaaacacacaaaaaagctgaaggaactttacagtgaacacctgtatacttagcacttatattctactattaatattgcattatcaacatgttttatcacatatctatccatccttctgtccattttatcaatccaccaatgttgctgcattttatttttgatgcacgcacttccaaattagtttgcagacatcagtacacttccaaatggttctttttaaaactcactgaatgttatttttcaaaatatctgatacgtaaatattttcttgatcaccatcttaagatataccttaagaatgcagtaaatatgaacctagaagcctttcctacaaataagaaaagccaaaaggttgttttactagaggccaaattgttaccttgagccagctaagaaccgagtcgtgccaaaactgtgtaggtgatggaggcaatgggaagctcgctgtcaggacagtgggaatgtggaaggagaaaggcagtgattgttttaacagggcacctcggtgtttaacacgggtctatgtgggaagggattagcaactttcacagctatttaggaataaaacgggaaagaacccaaagaagggcgggggtggaagggggcaatagagcctgcagaaaaaggagtgttaagccagaaaaggggtgtgtgtgtggtcagttggtggggtttaactgagtcaaaagggaccacagcaggggagccggttaactggtagtgacactcacacttctcccccctcccaaacccccaatcttccatctaagggtgtgtgtaacggtgcgggggaagagtctggggcagaagcgtacctcgcacacgcgcgtgaacacgcgcgcacacacatgcacacgcatacatatctcctgacgtggtgatctccgtggccggggtgggggcgtgggactccggggaggctccgcagaggggcagcgggcgcgggagaatcccgggatccgggttcacccatccatcctctgtcccctgccgcgtgcccgcgcgccgccggccgcccgcctgccgggcccagtcgcccccctttcactttcgcgtctgcgtaggtgtctgcccgagcgggcacgagggcgcgggggcgcgccaggagacgcgggggcgcgcggcgcgccgcgagcggaggaggaggggtcccggctctcggccccttcctcggcttgccccgccgagccgcctccgcgggcgtctgagccgccgtcagagcgaggggaccggtcgcgaccgcagcgccccagccagctccccgcacgcctccgcgcacagacgcccgctccctcctcggcgcccccccacggcgggggtggggcagaggcgcggcgagcccgagaggggcggggagaggagcagcctggcggggtgggcagccgaggagcaggaaaagaaaacttttccctcccgccccccgcgcgaggtccccagccctcgcctccccccgcaggtgggaactgcacctgaagccgggcgcgaggtcagggccggactttggagggctgcgggcagggctgaagggggtgcgtgcatttgggctcagttttcctttggcctccaggttgtcagtggccgtagtgggagggcggctgccggcgcccctgcccgtttcccacccgcgggtggccggacgcggtgccgcctcctcccgctcgtgagggcgtgacccggggaggggggcgcaggctccccctgcgaccgccccctcacacacgcgctcggccgccggagctgtcaccggccacccagggcccggggagggggcgcggagagtggcgctgcggagcggcgggcgcgggatcctcctgccggacttcccggctcccagggacgccgctgtcaacgccgagcggacgcgcagccccgggagaggggcccgccagaggcccggccgccgccgctgggggcgggcgggtgcccgcgtccccctctgcgcgatttggcgccgctgcctcgccgcctcttgtagggtaacagcactattgctctacccaccgtcagcagggcgactgccactgccgggattatcatcctctccatcctcaccgccgatcagccaatattggacttgctggtggcggcggcagcagcggcggcgggagtctagccgttccccttcccccgccccagcctccccaccatgtcctagaaaaggtgagtgcagcgacagtcactttgcgctgacagcggcgagagggggtccggagagcgcaggggcggccccgggcaaggcaggttgcgcgcccagggcagagggcgcgggttggcgagcggaggtgggatgcgggcaggagacgagttgcccgctggcggccctggggcaagggtgctgggtggcgggcgagtgatcgcggcggctgcccctgcacggttctaacctagattttgcaagaagctgagatccagggcaagaccggccctcctcaaaggagataaaaacttagtaaaagagacacgtccattcctttaataatgaataattcggcaacgcttgcggagccgccgccgcctcgcgtgcccaggctctaggtccgggactccccttgctcccgcccgccgcccgcgctctgccgacgtgagatcgatgcccagttcgctgggccgggagagtgcgcgtgacggtgggccccgcgggaaagttgggacgctcggcggggactcctggctgcggggacgccgggggcagctccaagctggggaccgaggggcattagagtctggggtcaggaccagctcgcggcgctgccgctgtcgcccctatctccagggagttcctgactggagcggctgagagttcaagtctcagccctgggttaggggtccggaatcccggagcttaactaactgttaaggagaggaggggcctttgggcacagggtgtcccccggtcccccgcctcgggctttggcgggcgcgaagcgagggtgaggcgggaggccgcacagctgccgccgccgggctgcgggtcgccgagggccgggggaccagatttaggtgtatacgtcactgatgctgactccgggccagcggggagcctaaaacggggccttacatgag

SEQ ID NO: 10301 - DNA, 6000 bp, Homo sapiens
ttcagcaaaaaaaattgttttgacttctgtcagcatatttttagaattttccacaaaataattaacaaatactgttcttcctttttctcatctcagtataatacagtagttggtaatgatatattccaagataattgatgacttacactcttagtctgcgcaatgagattacttatttttaattcttactataaaattcactctttttggtgttcagttctacatgttttgtgaaatgtgtagtcttgtaaccaccacccaattgagatgcagaagagttctatcattcactaaaattctcttggtcaacccttttcctcactcccaaaccgtagtgaccactgtatatgccctattggtataattttgttttttttttttctatgttgtctataaactctatgtagcctttgattcttgcttctttcactcagtataatgcacttgagattcatccatattattgcttatttcagtagtttctgtttattgctgagtactattccatttatggctatatcacattttattcatccatttacctgttggtagacatttggcttgtttccagttttggctactacagttaaagccaatataaatatttacatacaaatatctgcatagacatatggttttttttgttcagtaaaaacctaggagtggaatcattagaatatacaataggggtaatttcaatttttcagagactatcaaattgttttacaaagtgtttgtaccattttaatattcccatcagcagtgtattagaggcccagttcattacatcctttccaacacttgatagtctttttaagcttaggcattatagtacatgtgtagggatatctcattgtggtttaaattggcatttcctaatatcttaaagacaccaaacatcttctcatgtgcttatttgccattcatatgcctccctttcatgcctgcttactcttgcccatttttattgtgtgtttttcatctttttgagttctgttatcaatgtaccttattgtaaactttttgatagaagacctagaactaagagtacaatagatatttaaaattctgtattggtaggctgggcgtggtggctcacgcctataatcctagcactttgggaggcctaggtgggcagattttctgaggtcaggagtttgagaccagtttggccaacatggtgaaaccccgtctctaccaaaaatacaaacaaatattagccaggcgtagtggcgtgcaactgtaatcccagctacttgggaggctgaggcaggggaaggggaattgcttgaactagggaagtggaggttgcagtgagctgagatcgtgccactgcactcgagcctgggtgacagagactctgtttcaaaaataataataataataggcaattttcaaattatttagtccccactctgtccttaatgtgggtgaacaaaaaaatgaatatgaaacaaaccaaatgtccccactgtattcccatctagttggggaagatagctcacatgagtgtatacagcttttttccccccgccaattatgtgtttgattgtgtgatggagataaaagttgtcaccaaagattagagaaggaagagttccatgtgggctagaatagtcaaggagaccttcatacaggaggtgaagatttcagtagatgtttgaagattggtagtacttgaggggaagtagggagagtattcaaggaataagtaatagcacaagtcaagtgctaggcaggacaaatgaaacttgcctggatgggtttaatggtagttggggaaaactagattatagacattggtgaatgctgaaatgaagttttgggcactgttaatatagcacattaaactttttttttttttaattcaggaatgacataaaagggggtagaaaggttaatctggtaagcgaaggagaaaataaggattgagacaaaagcacagtgtagaggctgtcatattggtaatttaggcagataggagcccaactggttgggatggtgagcgagaggtaaatactagagacaatttaaaggaagaaatcattgaatacaggttattggacccaaaacctgttccttttccactacatgactaaaccatgtatgttaacagcaccacaaaaagtagattgccaaggagtataggaaagaaaaacacaggagtttataggaacaaggagaaactttaagcagagttatggctctaatgtaagagaagaggagcagaatagttttgtttgaatgaaggtaaaacttgatgatttcagtaccaaaatggagtaccttttattagactacagaaaaaaatacccccaggaaatggaaacaggaagagccaactactggtttggcagagttggaaagcaaactggtgaaagattatgtaaatgaattagaaatagtgacatatggattttgatatgcatacaagatctaggcttgtttggaagtctattaattgtgtcctcaagtaactggtgtttgaattcacagtactctttccagaagtagaaatgtgcttattttcttccatcacatggtgaagtttgtatttacttaaaaaatattttttcgatacgtttgaaattctagatgcaaagtttcagggtatagaaatggaattgggagtagatattctttagtttatgccaatttggattctcagtatttttttttgaaatggaaattatatcctgagaggcttttgttcttggaaatttgaggtatgactaaagaatttatgatcatatgatacaaaggtgtttttttttttcctcaattcctctgtcattttcatacccaatctggttaagtatacatgtgagctattcccctgaaacttctaaaagcattctgggctttctatatgtggtagaaatgataatttcattgacatataccctgtattttggacttggttgctatgtgtaaggtgaaaaatagcatttttccccctcttaagtactgttttttagggaactgaaaaaattaatggattcctagagtagaggaaggaggagttataagcatagcaacctttcattgtgaaaacctaaagctcctacatttgtatgacttctgaaacattcagatccatgggtggccactggatgtctattagcaaatacctctatttttgagctaattttcatttaacaagcaaaagatttttatgagagagtataatttcatgaactgtgcatttcatgaactgtgcattttttgaagactgaatttgttgccagtacctgagaatggaagaggtaaagaatagaattctgtgaacatggcctagcctctgtgatttcataatgctgaagtatgcttttttaaaaagttaaattcttgccaattttactgtagcgggaataaatacatctagtattctgagagttttaatgaaactagacataaaacaagttaaaattaatggggaaaatggctagatgtccatgactgtcagagtcagtacattgtcagtatcctccagaaatgtcactgatattaaccaagctgagttatttccaggcgttgaatccatgaagaatgataaatgttttctcatcatacttattcttagaatgttgtgatacttttgatatttcagttactcgtctttaaaaggggagtgcccttccctgggccttgcctaagagaagaaagaaagactatattaagacagaaaacatggacattttaaagagacgaatacactgctatgtgaaataccagttctactcagtaaactccctgtaacctataacaaacaacagtgcacattaaaagcacttaatccaaaaagagttctgaagatggatggtggtgatggttgtacaacagtgtgaaagtgcttaatgccacttaacttaatggtgaatatggcaaattttatgtatattttattataaaaaaggtagttgagtcctaaaaatagggaggtgctacattgtctaataagtatagtgtcatatatgtgctctgttcagtactgattttctttcagcaagcatttatataaacacttgacttggtcaaagcctagtcctgggtgtattagtctgttcttgtattgctgtaaagaaatatctgaaactaggtaatctataaagaaaggtaattggctcgtacttctgcaggctgtacaggaagcatggaggcatctgctcggcttctgaggaggcctcaggaaacttgcagccatggtggaaggtgaaaggggagccaggcattttacatggttggagcaggagcaagagaaggagtggggagctgctacacacttttgaataaccagatctcatgagaaccctatcacaagacagcagcaagggaatggtgctaaaccattcatgaaggattcacccctgtgattcaatcccctcccaccaggctcccatctccaacattggggattacagtttgacatgaggtttgggtggggacagagatccaaactatgtcactgggtatgtggtcagagtggaaaatgaggaagtcctcacttttaggaacacccaatctagataacattcaagatccggttacaaagtaggttgtggtaggtgttattctggaggtaccaaataatgttttgagaacatagggagggaacagttagaaattaaatactaatttcgttaataaaattatgtgatagttataagtgaatgtaatatgattagtcagtactcttggtttgcaaacagcacaaggacccgtctcatattagcttaaagaaaatagaatctcttggcttaaacaaatgggaattcaggaagtacacctcaggcttggttagatcctaggtttcgaatggtgtcatcctatagtttctttgtctgcatctactagggctttactttttttattcagttatattttctggccagcgtcactctgggcttttattttcattcgttgttcaggttaaaaggaataacctttctcgacagattctgattgatctggcttgggtcactcatccagccttaagtaggggtgttgcttgtgtgctcacgtgagtggacgtgtatgcatgtaggtggtgggggtttggtctcacccaaccccatgtactaagaacacaggaagatgtgtcttcaaagggtctggccaaacaaaaactgtaccctacatcagtttcaaaaactgatcatacagtcattgattaattattccctatttaaataggttggtcacattgcttttctaagcattatcattagtaagacttaattattattgaaatgaactgtctggtaatattgtgagctggtggagaacagaaaattaatgattggaaagggcaaaagcaacatgtttttgggaggaaggatctgatagtttcttttacaaagtacatttacagatgctttaataatgagaaaaattaatggtaatcagaatgttttccaaaacagtacactgcagattgatcatcagtcactgatatgtaaagaatgttgccattaatattattctaaaaagctcattaaattggtcccacgaataaatatggctctagactatccagctcattatcattatccacctaagagtacgtaagaagtattttatatcatgtcttctttggccttttcactgagggcctgtgccattctcgatgcaaataatcttttctgaatatgggagaattactaacaaatttatacctgctcaccaggacgctatacatacttgcacatgtaattttgcttatagcttcagaagattcgtgggcccttccttcgccaaccatttcatgaacccatgagccccagattaagaactctttctcttggttgttgttaaaatataactacgtagcaggaagaggaccattgtgatccactaccaatagaacatttatagttgaaaatgcaatttgagttgtttgttcaccagtgatgctatgttatgcatttgtttacatctcataacatgtggtaaatatttatgcaagatggctagccagacaaaaagaaaaaaaaaaaggaa

SEQ ID NO: 10302 - DNA, 6000 bp, Homo sapiens
tcatttgatataagaatgcataaactctccactgtgccagttagatgaagtaggaaatactcagctgccttacttgggacaaactcaaaagttggattaggtcttcgaaatgagcagatgacctatgaataagaggattcagtaggcttctctaatattataccattacccctacttctcatgtaacaaaaatcactcgatttgggaagactataggtgaaagggaaatttgacacttgcagatatttagttttagtttgttttgtaatgcattacccatagcaaatttacctctatctttaggaataaagatgacatctgtcatgaagcttcttacattttttgtttgctgcttccagtgtcatatatctgacatgtgataacctccctctattaactctaatgttagggagaaggttttattcactttggctatctacatggctattcttaacctagaattatagtgtctgtttctgacactgaacacacattttaagaattatctttttaaattatctttcttatgtatacttaggcatcagaaaattaatttttgttttgttttgtttttgagacagggtcttactgtgttgcccaggctggagtacggtggtgcgattatggcttactgcagcctcaacctcctaggctcaatctatcctcctgcctcaactgcccaagtagctgggactataggtgcatgtcaccacactcaactaattttttaaactattttttagagacagggtcttgctatgttgcccgggttgagaaaattaaaatataaaaattcaagtggactcgttttatgtggataccttattgcctgccgcaatgcattaataatattttatatcacactaactttttttatggctaaagattaaatcctgaagcatttttttgcaatcatctttgctagagtttaaaaaatagtgttgacaaagatgttgtcttagttgctactgacagctgttaaaatgttgctaaaaatatagtgccaactactgaaaagctaactgctcctgtgaagtcctaatgagaaattctaaatgagtgtttcatcaagttcaacagagacttacatttcccacacctgacccattggattgtctcactttttttgcggttgttactgtacataatattgcagaaacagcttcaaggcataattttaatgagcacacaaatcatgcaattatttatgtaagattagcacagttatttaaaggtgatgaatttcttgtactaaaccaagaatatatgaaaaaaagaggagaaattgaaaatgtctttatttttattaaaatatactgctctaagttcctcccctttttcaactactgtacattatttctaaatttagaacatcagtgtaggcacggtgaaatctgatttgcttctaataatatggcatactaattgtgatgcatgtgctgtttggtgctctgtcatctcaaaatctggccataaaaatgtattaagtttgcatattttctatttaaaatgactacagatggaattaaggtagccagatgaataaataataaggtaaacaaatacagaaattaatgaataaccaaagctaatacaaatattccaagtagtctagaaaattgagtttgggctattttggatattaacaaaaaccctgatatgttttgtatttatcttctggtctacaatttcttatttacttgcagtgtttataaactgtaacatgtgtgctttgcaataaacaaagaagaagttttatcttatattattcctctattcatcttctctctccaacacccccctcctttctctttctgactctccctgtctttctcaactctttccaacagctggtaagagactgaaaaaaaaaaaaaatcccagctttttagaaagaaataaaaaaaaatgccagcatggctaggcttattaatgaagttaactaggaccaaatgcttagcctttaacttttaaaaattattgaatatgattaaattatatgatacctattggtctttactttcttgtcagtaaatagataatggagaagtacataatacatttcaacatatacatgttcaattttttttttggcttataattttacagcttaactccatggctttccccccacccctcagtgtcagctgttgaaggaatggattcggagcagagaactaaggggtggttctgctaaagctgaaatagagagctagggaggatttttttccaacacaaacttagatgatattaggctttgtatctgaagttacataatagaggatgtgatgtcacacatgtaaattgcaaacgctgagtcgtgcactttagtggcaaacctcagggagtttgacattaatgggatgggggggagggaggtgtcctgaggttcagcgactgtgaatagagggagagcaattgtcaaaagggagatgtctgatgctgcttcaagctttcagctatttggcagctacataggagacgaagttaacgtccttttccgtacgataattctcccttttatttttcttgaaaaaatttctatccttttgcaaggaaaaaatacacttacataaaaagacgaaagcaacaaactttgttaagggacatctcagaaaacaactaaatattgacatttactaggcacacatatttctgagttgatcgggctctctatgaatgggcattggaatgaagagtattcctaagcttctaaaaacccatcttctttgaagagatccctctgaggcatcacttgtggggtgattccaagcaaaaccagtgccaccttctcttcagatgagggagactcagatcttatcccaaagttgttcacttttcagggtgtcacaggaccaccttttgtctctcagcagaggaaaatataaaagtggtttacccaggggaaacttaatcattcaaatatttgggcaaatgtttaaagactcagataccaaaaaacaaataaagctttgcctattaataattgcaagatcccctaacatctctcccaaggggtaagataagctgatactgtaaataagggcaaatggactccccacaagctattttgtgaaaaagtttcaaaagaatatccatatctgcttaaaaattcaatcttagctttgtaataccaaactgttttaaaagcagggaagatgaaaatttgagaacagtttgtgtgtgtgtgtgtatgtgtgtgtgtgtgtgtgtatgtataaaatggacaaaagaaacacaggaagaaaccttataaatttctaaaatgttgcagttataataaccccactgtacaccctaatttgatcaaattgtccttaattgaaatcattgattaaaatagtggtgggagtacctagcttaagaattgttatagaaaatcattttgtaaaggaggaaacaataatcaatgcccaatttgtaagttttggaaacaatttacattatataggttaccttaagtgggggggttctttttatccaacattgtgttatgaaaaatttcaaacacacaaaaaagctgaaggaactttacagtgaacacctgtatacttagcacttatattctactattaatattgcattatcaacatgttttatcacatatctatccatccttctgtccattttatcaatccaccaatgttgctgcattttatttttgatgcacgcacttccaaattagtttgcagacatcagtacacttccaaatggttctttttaaaactcactgaatgttatttttcaaaatatctgatacgtaaatattttcttgatcaccatcttaagatataccttaagaatgcagtaaatatgaacctagaagcctttcctacaaataagaaaagccaaaaggttgttttactagaggccaaattgttaccttgagccagctaagaaccgagtcgtgccaaaactgtgtaggtgatggaggcaatgggaagctcgctgtcaggacagtgggaatgtggaaggagaaaggcagtgattgttttaacagggcacctcggtgtttaacacgggtctatgtgggaagggattagcaactttcacagctatttaggaataaaacgggaaagaacccaaagaagggcgggggtggaagggggcaatagagcctgcagaaaaaggagtgttaagccagaaaaggggtgtgtgtgtggtcagttggtggggtttaactgagtcaaaagggaccacagcaggggagccggttaactggtagtgacactcacacttctcccccctcccaaacccccaatcttccatctaagggtgtgtgtaacggtgcgggggaagagtctggggcagaagcgtacctcgcacacgcgcgtgaacacgcgcgcacacacatgcacacgcatacatatctcctgacgtggtgatctccgtggccggggtgggggcgtgggactccggggaggctccgcagaggggcagcgggcgcgggagaatcccgggatccgggttcacccatccatcctctgtcccctgccgcgtgcccgcgcgccgccggccgcccgcctgccgggcccagtcgcccccctttcactttcgcgtctgcgtaggtgtctgcccgagcgggcacgagggcgcgggggcgcgccaggagacgcgggggcgcgcggcgcgccgcgagcggaggaggaggggtcccggctctcggccccttcctcggcttgccccgccgagccgcctccgcgggcgtctgagccgccgtcagagcgaggggaccggtcgcgaccgcagcgccccagccagctccccgcacgcctccgcgcacagacgcccgctccctcctcggcgcccccccacggcgggggtggggcagaggcgcggcgagcccgagaggggcggggagaggagcagcctggcggggtgggcagccgaggagcaggaaaagaaaacttttccctcccgccccccgcgcgaggtccccagccctcgcctccccccgcaggtgggaactgcacctgaagccgggcgcgaggtcagggccggactttggagggctgcgggcagggctgaagggggtgcgtgcatttgggctcagttttcctttggcctccaggttgtcagtggccgtagtgggagggcggctgccggcgcccctgcccgtttcccacccgcgggtggccggacgcggtgccgcctcctcccgctcgtgagggcgtgacccggggaggggggcgcaggctccccctgcgaccgccccctcacacacgcgctcggccgccggagctgtcaccggccacccagggcccggggagggggcgcggagagtggcgctgcggagcggcgggcgcgggatcctcctgccggacttcccggctcccagggacgccgctgtcaacgccgagcggacgcgcagccccgggagaggggcccgccagaggcccggccgccgccgctgggggcgggcgggtgcccgcgtccccctctgcgcgatttggcgccgctgcctcgccgcctcttgtagggtaacagcactattgctctacccaccgtcagcagggcgactgccactgccgggattatcatcctctccatcctcaccgccgatcagccaatattggacttgctggtggcggcggcagcagcggcggcgggagtctagccgttccccttcccccgccccagcctccccaccatgtcctagaaaaggtgagtgcagcgacagtcactttgcgctgacagcggcgagagggggtccggagagcgcaggggcggccccgggcaaggcaggttgcgcgcccagggcagagggcgcgggttggcgagcggaggtgggatgcgggcaggagacgagttgcccgctggcggccctggggcaagggtgctgggtggcgggcgagtgatcgcggcggctgcccctgcacggttctaacctagattttgcaagaagctgagatccagggcaagaccggccctcctcaaaggagataaaaacttagtaaaagagacacgtccattcctttaataatgaataattcggcaacg

SEQ ID NO: 10303 - DNA, 6000 bp, Homo sapiens
aaaaaaaaaaaaaaaaatgcatgggttttgatccattgcaggagatagcactctgaactaggaatttttaaaacaaacaacacacccttctttggttgtgttcaatagttctgttttgtgttttgagggtctatgtttgtgtaagttgcaaggtgctactccaggccttgataccacctgagaccagctgcctgacaggagcctgaacttggcagtcacgaccagctgaagggatgaaaccaaacaccgaatagtgtcagggtgtttacccaaaccaaagacttctttcttcatttaaatttgtcttgttggaaacatttcaaaaaaggacagggtgtagtggctcacgcctgtaaccccagcactttaggaggcctaaatgggaggattgcttgagaccaggagtttgagaccagtctagtcaacatagggagatcccatctctacaaaactaaagaaagttagcctggtacagtgtcttgtgcctgcagtcccaactactcaggaggctgatgcaggagaatcacttgagcccaggagttcaaggctgcagtgacctatgatagcatcactgcactcagtctgggtgacagagtaagacctcgtcgcccccgaaaaaaaaaaagaaagaaagaaaggaaaagaaaccttagatagcaaaaacagcgagaaagtggtaaggttaggtaaggttttgccatcttttatttttcccccagcacgttgcctcaattttagaaagaggaagtgaattaagaatcaaatctgtttctgcacaaaatgtttattcataagaaatctgtttctcggggggaaactgggtgataggtgctacataggactcttctgtactatttttttctttcttgtgagtctataattgtttcaaaattaaaaggttaaaataataaaatgatatttaaagcagagataaaaatgtcagtttcttttcatgtgcactaaatgcatagccgaagctcaaaaaaattttaaacatcttctctttgaatagatttcaggttgttaacagatgtgttacacctgtgtattcttacctgcctgtatttgcaagagaattttatcattttatacattaacaatgccaagaggttagtagtagtatacctctttttaaaggggagaaaggagagaatcagtcaggttatataactcatctacatttatccaattagtgtaactgggtgggatttgacctaagccagtgaaactccaaaacttgacagccttgcaaattagcctcccagcaggccatgcaagaaccaggaaaagctctttcccagccatccaggcaccatggtcctccttgaatatgattgaccttagaagttctctttgggtttttccccctgttttttttctccctgtaattcttccacatgatctacccaagagtttcatgccttgagtagactattcagaaagtgaaaacttgacagaatcactaggtcaagcactgactcagaaatgtcccatttgaacatagatttagctctacacacaccgcacatccgctattaaatcacttacccacaactcaatatttctggtggtcccatactacacttcagtggcactgtgagacaggcccaacaaaagccaagcgggctaatgctaattatagccaggcacatgctagcccattgcaggaggtaagtaattttatcctaatagccactcctctgagtaagtattatcatcctcaagttacatatggctcccagaacagtcaaattccttgcccagatctaggcagccactgtgtgatacatctggataactgtaacctagttggcaaaacccaaacttctctggatttatacttcttgttaagactcaggatccatgaacccaataaactatgcaagagggatatgggggataagaggcaagaactcgtgaagcaatgaacacaaaatgaattatcacccaaagagaagatgaacgcaagggagtccctctaactgtggaatgtgagacaggaagcaagaacatgcaggttggaatttgcagctggcctgagattgagcctcttttgttgcttctgtgtcacgctcttccttgctccctctccatgctagccacctttcgctgtataggctcctctagtgagctatgctgtttttcccacccaggcatccagattgacaatatctttggccttgaatgtgatcccggacacctcctttactccttcccttctcccctccctcctcttccctttcctgcttctttctttcttagaagccttcttttgtttcttccttccttccttctctcctcttccctcctcttttttctccatttctgctccagcaaatttctacctattgtcaacacctcagatctcttgtcacttccccagaggaaatctggtctgaattcacagagtagaacacattcgcctcctatttgtttcagagccctctttgttcctgtctctgaatacatcatcttgatggttgatttcttgttcaatacctctctattatattagattcgaaactccatgaaggtagggacaagttttttttttttttcacctctatatccccacagcttgcccagtggctgatagtagtaggtagaggatgtaaatatctatttgttaaatcaatacatgtctgatcaggcactattcattgcatttaccacaaattgtagttttatatatatctgaagtccattcatttattttcacctcttctaggctgtaagctccatcaaaggagtaggtatatctcttatctaattgtatttttcagcacctaatagagctgctgatgcatggtatatattcaatagataataaattaatgaatgatattccaagaaaaaaagctttaaatatcacctacactattatcagctttctcattaaaccaaattgtcttcaattcttcatgagtaaaaagcagaaatattcatatcattagacttgggttcttattgcagtctagccaccaattggatgtgaacatgcatttttagattatttgccaatgaagaccacaataattcacttttcttcattcaccccttgaatagtcttctcccacatttactctgaacttggccatgtgacttgctttggccaatgggaccatggcatctaggatgcaagcagaggcctggaaaaggctggaggctggagtttcccctctcccactgcccttagtgccccaaacccaccgtgtacatgggcctagctggccactagataacaggaagctatgcagaggagaacagaggcacctggctgacatgattgccaacaaacagattcatgagtgtgataatcttagatcatccaactgcctctcaacccactagcacagaccagatgatcaggtcttgttatgggtcgaatacgtcccagctaaaattcatttgttaaagtcctaaccccccactaccttggaatgccttctgacatggagactgggtctttaaagaggtaatcaagttaaaattgggtaattagggtgagccatcattcactgtgactcctctcctgataagaaggggaaatttggacaaagacacagggagaatgccatgtaaacacaaaaacaaggatacaaagacacccacaagccggggataaaggcctggaacagatcttctcctcatggctctcaggaggatccaaccttgccgactccttgatctcagacttccagaggccagactgtgagacaatacaatttgaccttctgttttgttagccactcagggctcagtcctttgttatgaaaaccccagaaaattaatatgggtccagaccaaaagaagtgagcaagtgacacacacaattatgaactaaataaagtggttactgctttaagcccctaatgcagcaaaagctaattaataaagtggttaaactactcgagtctccctagtcttcagttttcacaattacaaaatgggattttacatatgttccttacatggttattagtaagattaaggaggataatgcttgcaagttgcttagcaatgtaactgactcacaattagcattcaaagagtgcttattttcatgttttccttggggtgtctgttaagtcaaaaccagagttatttacccaagaaaatataaacttctacctttgaatttattgtaaataatgttggagtttgttatggaattcaacatcaatttatataaaactagaatgtcaagtctccagaagaggaaacaggcactcggcaagatcagcttaaatggaccaagattaaggccgaaagaaaatgtattaagcaactgatatgtgcccaaacattactgcatgcctttatttacaatattttgtttatttattgaaatacttctaaaatataaatattatccttccatcacaattgaggaaatatcatttcctcaatgaaggaaatataatcctcaattatccctcattttttaaaaaagtttctaaaatacaaatattattatcactcaaactacttgagaaataaacttcaaagtgcccaagatcctatagctaataattaatacagcaagaataagaggcaggcatttctcctttagttcccaggttctttccttaacacctggtccatgtgtctgggatggtctcaggaagccattgcaaaattaagccaaaagatgatagttaatgtccactattcatataaagtgagactcgcaaaacccaccttccatgcttgagtgttgcccagcagttccttttattgtgttctggtaactatgaagtgccacataaggacaccgtgtgtctttaaaaacaccctttgcattggaagatttcagcctctgaaagcttcacgtattgcactccagcctaagaagaggaagtcctgccagccctcaggtcagacctctcaggtctgtggctgcatttcacaggaaaccaagtctaaaacggacctatcaggaggttttctgctgaagggcactgcttagcatcgagaagaattcaacccaccgccttactaatttccagtgccccaaggtctctgcactgccgcccctcctcacaggagacggacacctcagcctagatcccttggtgctctccacgctgttcaggtaaactcattaggccagttcttctgagtgaggatctcatggtcatctccttgtcataaatgatcatcaggaaagacctgagcagcaagtaaaaatgtgtttctaaagtggaagtctgggccttatatatagcatcaaaggagcaagaagaaagcccttaactcaattgttaaagatcctttcattcttttgggagaaagaatcaggatacctacccacagaaaattaaaagactaaatgttttcaatcttcttttcctggagcttggactccccgactgtttgcaactgaaatctaaagaccaggccccatggctggctttcctggctgaccttcattaagtaagccctctagaaagaaagcctccattcaaagtaggtcattcaaagtataagttaactcctggagccctgtggaaatatatttttaacattttctaaagtaatacgattttctttctgctttggtgtagaggagacttagactttggaatcacgcagacatccttccactcacaagagtaaggagctcaaaagtgaggttaaagttggggttaaattcttactcttgaaaagtgccgggagtcatctctaccaggcttttattggataaagcaaacaaactggaatgagacagaaaagaaaataactatcatcaaaatatggatactttgattttaaaaggtgtcgatatgcctgaactttttatcaatactgtttttattactttacaccagtgttactcatttggcttctctgttatgagtattacttgtctattacctacatggctatttctctggctgtctctgtctatactgtggcgcagctcctcaatagtgttgttctttggatttccaggggcctcccaaaccaccaggaataatcatttcaaatatcaagaag

SEQ ID NO: 10304 - DNA, 6000 bp, Homo sapiens
gacaaattttgcttgtgctacgatgcaaagactgccaccatccaatccaacatgttattataatatgtgacctagatttcattctttcttcaaagttgaaatattattcacattataaaattcatccttttacagtgtacaattcaatggtttctagtctattcacaaggctgtacgactgttactactgtctaattccagaacattttcatcaccccaaaaggaaaacattatacttagaagcagtcactctcaccagtccctgaaaaccactaatctattttctgtctccatggagttgcttattctagacattacacataaatggaatcatacaatatgtggccttttgtgtctggcttctttctcttgggataagtgttttcaagtttcacgtaggttgtagcatatatcagtacttcgttccttttggccatggcatgagcttctgcagtatcctcttacctggtcttcctgcttctattcaggtcccccagagcctgctcttcactgaagctggagtgatctttttcaaatataattcagatcatctcactcctcttctttaaatcctccaaaggcttcccattttacttagagaaaaatctgaactcattattatggcctctaagactcatcaatgatcaagaccctaccctgcctacttcactgacctcagctccccacactccattcagtcactccgtgccagctacagtggcttccttctgctccttaaagctttgagacttgtttctgccttgggacctttgcacttgatggtccctctgtctggggttcctttttcacagttcttcccataactcattccttctcatcattcaggcctcccataacccctcctcagagaggcatgcctagttgatcctagctcaagtatctttcccccaactgccagccaccttctattatttcattaccctggtttaatttcttttatagcatttgctactagctgaaattgctaattttaaaatttactttcttattatctgactcccttgaaaatctgccagctccaaggcagagacatcactgctatatcccaagctcccagaatggagcccagttcgattaatatttgaaggacttcatgacttcaccttgcctagaacccttaaatttgccagatcttgcctctactcttagttcctgaagctggatctctttgcttattactagacttccctatggccaactgactgtatatgtgtatatatgtatgtgtgtatatatgtatgtatgtatatatgtattcattcattcattcatccactcatagagacacagtttcactctgttgcccaggctggagtgtagtggcacaatcatagctcactgcaacctcaaattcctgggctcaagcaatccacctgcctcagcctcctgagtagctaggactacaggtgcacgccactgcatccaactaaattttcttcttatgttttgtagagatgaggtttcattatgttacccaggctggtcttggactcctggccacaagtgatcctcctaccttagcctcccaaagctttgggattacaggcatgaaataccacttagttgcctgactggtttccatctattgctgactctctcattctcctgatatcccactctcctccccttcttaatcctttccatgacaacttttctagacatctctatcacaagctagtaggtcttgctaatctgcaggcccttgaccaattgaaccttcattgttatagattgtcagcagaaagcaaagtccagtttccaatttgtggtgaagaatgcaagagataataggtgagaggaatcagcatggcattaagaatcaaactttcaatctgatacagaataaatggaaatgctctcaaagctgttatatatggatatacaagctcaacttaaatgaatgtgaatttagaagtacagattggaatgtctgtaactaaattatcaagggaccacttcagtgatctgggatttcacttctttgcaatgcttggacaaaggggtacctgtggaatcagcttccatttagtcatctgttcccagaggaatccagtgcctatctgcccccactttccctactcccctatctattttctcgtatcattcaagtcacataatggcatgaccttcaagcctgcaagtcttttcctgaacatttcttcaaaaataacaactcatattaaaaataatggaagaaatagggagaaaatatttgccacatatttaatcaaacaaatgttcccaaatacataaagcattgttataatgaataagaaaaaagctaacaacccaatgggggaaaatgggcgaaataaatttccactgagatatttcacagaagaggaagcaataatggccaataattcgtggaaaattactcaacctctttagtaaactggaattgcaaattaagtccacaataagaagtcacactcgctgggctcggcagcttatgtctatagtcccaacactttgggaggctgaggcagggggattacctgaggtcaagcgttcgaagaccagcctggccaacatggtgaaacttcatctttactaaaaatacaaaaattagccaggtgtggtggtgcacacctgtagtcccaactacttaggaggctgagacaggaggatcccttgaactgggaggcagaggttgcagtgagccaagatcgtgccactgcactccagcctgggtgacagagtgagactccatctcggaaaaaaaaaaagaaaagaagtcacactcaccagacggacaaaggtttttgcatgaatgaatagccatggaaacttcattcatggttggtgggaatgtaaattggtataacactttggaaaacaatgtaaaacagagtttagctagatcatcccctgtgacctaataactccactcctgggaatattcctcagaaaactcttgcacatgtacactagggggcatgtacaagaacattccaagcagcctggttcatgcaggaaaagaaaaaaaaaaacctttaatacacaagttgcttattttgctgagctgctggggatataaaaaacattgagcccactgtttgaggcttctctgctctggctgacatttcactctcacactggctgctgggactggtgatctttcagagcacctctgggagacaccaggaagaaggtcacggggaagcagagccatgttcacttgcttgcatctgtaggtcatttacatcctttgtgctttctttttttttttttttttttttttttactactttggtaataaatcaaagtacaagaaccttgaatccagtattttctcacccatccttgaacttggaccagacgctaaaatccagcctttcttacatgcttcctgtgtataaagaacttaaagaaggtggccattattttttttttacctaatctatcaggttttctcctgcctctcttcgtatttctgacagagcactatcccaatctgccttgtaattcagctatttgagtaagggtttagggtcctttaccaaattgtaactgtcactaaatcttgtatccccaaagctcgggtcttgtttacagtaggttgaactgtatgtgcctgatacattaaaactcttgattgagggagaagtatcttggtggagtagaatagccagtggcttccttacatgctgacagccttgagcagattgtttaatctctcctggcatcataatgagaatttcagtacttttacatcccagagatgccatgaatattaaataaaatagcatgagaaaatgcctgacgcaaaaatgccccttcaaaaatgttaatgtacttcctgccctttcctcagcgttcctcacctttcaaagggaggtcaaataagaccggttttcgccggttttcacacactggggcctatggcgcgggggagagggggcggggaggggcggtgcgggggcaggaggagcatcaggaaaaatagctaatgcatgctgggcttaattcctagctgacgggttgataggtgtagcaaaccaccatggaacacgtttagctatggaacaaacctgcacatcctgcgcatgtaaccccgtaacttgaaataataataataataataataaagaccagttttccctctttctatagaaggaaattaggatgtattagctggtgtcctggaagaggctgcttcctgaacgtttccaatcaaggaaataaaggaaagtatagagatggaaagagggagtcaggtcacggtagaaatcaggatgcaatagcagcagaaatgcatagaaaaaggagtttccttaggcttggaaatccgtaggataaccagcgctccagaccagttagaaatgtgtgtgtgtggtcaagccccagcagtcctttcttctttgtcctttattaacaggcaactgcatttccctaaggggtctgtgattttgcaggaatttgggggagggtcgatagcatcaacatcacagttgaaccaacactgccctgatatgcaccaggcattgcgcttggaactggggataaaccggggaacaaaacagaggtgcttccacagaggtgcgtactagtgactgccggagctctggaagaggtgaaggagaaagggtgtcccacgtagacccaggacaccagagagcgtcgccactaccaagtttaaaaactcagacggcctggtttgccatccacaccctgttcccagtccagtccttccaaaggtgggaatggtgcattatttaaattccattctctttatcccagagcgaaaatgcgtggtactcgggtcagaaactcaggctagggggctcgggtcctgctgcagggtggggcgcgggcaggcagcggggcggggtgaggcgaggtaggccgggggcggcaggcggcgaggtgacgcgcggcggggaccgcgcagcccagcccacttgtgcgcgagatttaaaagttggcggctcgccgggcgctcagtcctgtgtccgggccccgaggcacagccagggcaccaggtggagcaccagctacgcgtggcgcagcgcagcgtccctagcaccgagcctcccgcagccgccgagatgctgcgaacagagagctgccgccccaggtcgcccgccggacaggtggccgcggcgtccccgctcctgctgctgctgctgctgctcgcctggtgcgcgggcgcctgccgaggtaagacggccccgcacccggccgcttccacgccatgcgcgcctctctctggctccactcaccgctctcctccaccctctttctctcacctttacttggcttctgggacttcacttggcttctctggtgccgcggggtttcccgcctcccaggcacaggtcgcctccccagggcaactagcgacgtaggagcaaggggcccggccagggccgaaatacccaggccctgctcgttgatgcccagcggagaccctgcgccgggccggctgcgatagatggagactggtagggttccctcatcctcgggatttccagaccccccggcccgtggaaacgggtactaaaatagtgaacattaaaatgttttccctttgattgcaattattggagagattgatggttgaagcaaaacaagagtgagtttgatacttcatccgctgaggcaaggtaaacttggcgagtgctcagcctctttggtgagtgagctagtgttatgctgagataaacctgagcggtacaacgggccccacgctaaccgcttagaagggaaggagtgggctttgtgccttatcggttttcaggcactagatcaggaaaaggaatagagaacttctcatcacataaagtcggagaggcaagtgtgcaagccaggctttcaggcagtgcgacagctacagcaagtgatggcagatgtgatttgataacaatagggacatgctgagcttggcttagagggaagaaataggaaacgcaaggtcagggaaggagatctgaagctttggagacatagccgagcagaacgcaaacgttccagggg

SEQ ID NO: 10305 - DNA, 6000 bp, Homo sapiens
gacagccgcgccccggacccccacccagcgaggcagggacgcagggctcggcctgcactggcccagcgctgggaaagccgcaggagggcgcgaggggtggcggaccccgctcgctggagccccgcgtggctgcgccgagctacagacgccaacgggcgccggccccgcggaagtccgacgtccgcaggcggccggatttgggaacgactttttcacggtcccacgagttccctgataccccggagggtggggggttgagtttgtttgtctttaggaggcggcaagaagaaggggaagaacccctgggacacaaactgccatttccctcgccccccttctctccttttccgcgaagtccgttaaactgaagatgcccacagctttcgtctccgggtgaagccggggtgggaaatagagggggtcggggttccgcctctggagtcacattattcgttttctagcccttctccctggctcctgggtatcctcttccgtaggccccgccacctccttccttttggatcccaccaaagtcgtagctgggagagagtccaggccacacaaaggggaagacctggagcctgggcgggggttaggaccgagggggcggagaggactcgaggggcaccgtgcttttctctcgtccttgtaattaaggactcactggactgtctgtagccgactcgagttggcagcaaaatcgccggggggaggggttttctggtgtgagtgggggtcactaccctgtctctcctgcccgctcccgagcggggctgggctccgcttacccagtgagcagcgaggccgtctcttctcccccgctcctctgttcttgtgcggggtgggcgcctcgccccccacgcgcagttgaggcgacggcgcccgatgtagaaggaagtgttgatataaaacaagtttgttcccaaactaaacccaaaccaagcaaagccaccaggaggggaaaaaccaacagcaatccagccagcccctagcaattgttttcacggtcggaattaaatcacatcaaaacgccccctgaaacccacatcctgaaggagtgaacctacaacagccaacctccagtcgttcgctcgagttcacacgaacaacttgcctctaacatccgagtgaagggggcggcgggtgcctctcccgcaccgcacccaccacatcccggacctgggatcccactcgcacccgaagaggcggctgcttatgttaatatcagcccccacacgaattagaaaagaccgcccggtgacagaattgcttatgccaggaactacactgaatccgtaagggagggggaagaacgtcttcccggggttacttcgcccctcctgcgtcctcctgctgtttccaaaagacagacttcatgtgcaaatgtcaacctctctcccaaacgaagctttagaaatttggggcgcatggtttttactaaagccccttctaagtgctgctcatcagaagatttacaacaatcctaaagacaatcagctaacacaagttacaccactgtaaggaaaacagccacgcaaatagagcaaggtgctgggtgatttcgttagaaacaatgttttcaatggacggggtctcagtaaaataccaaacgcagccccctacccttggcccttcaagtaaacagtttcccctagttattgttctaaaaattcccatcttcttgagcttctaatcttcaggaaacctggagcataggctccaaattactcggggaatccagagttaacatgaaggagaaagtgggatctgaattagtttcagcacttaaacagcgggggggatgtaagagtcatcatttaatctctcttcggcttccagaaagtaccccctggccattctgtgttctcccctccccctcctgagggtttgatgaaaaggaacctctactctgctttggtgaaactgcattttccacttgttttcctattggtcaaattggtgcagttatgggaggacttttgactgttttcccatgtgtcttttaagaatggggctataaatgtctgacacagctacacgttcacctctctgggacactactcacactggtgcctaactttaagggaagtgacataccaccatcatccaaaaacaaaaattgggtttctcacacactgtagcagaatatactctttttcttctcttgaggcatagcattgtcagctattaaaaatggatttaatgttttaattttcctggattccttcaccaaccccttaatttcaccccaatcttccagatagaatttacatgtgactactggccatgttgtagggaccaattggatcctttgtaaagttttaaaaattgcttcctagtaaattcttattcccaagaagtagtcgttattagtaggtgaagtcattagtgctcacttagatacagcattgtaaaaatctttacccattcaatgttcagcagcctgaaatttcacctttaggaaaaaaagagggatctttgccagacaattcctatataatggagcaaaatctgattctgtagtgttttgcttgttttcgatttaagggagatgaagatacatttctttatgtcctttgtttactgttctgaagttttacagatggttactgtattggatataataattttgcctagatttttaactgagggggtttgagaaccaagggacaaaatgtaatgtgttttcaaacttcagcttcccttctgctgtaactttcacaaagtatctcctgaaaactcctgtctttgtacaaaattcatcaaagagacagtggagactggggaatttttgaggttgtattcggattggtgtcttcaagggtccctttcagttcgcagtccaaggtgccagggactaccccgtcctccctccctcttctggctttgctctcctgagtccttttgccttctcttcccccttcttggattatcttttcattctcgatgaggttcccacacactgcggtgtgtgtctctgaaaacccactggagacctagcacaactctccgtacatcccgtggtgagaacagaatgaaagatatattgtttaaaaagcaataattaaaatctagtcttcagttccttcttcctcgtcatattttttctccgtaagcctagagattttattttcactagtgtgttcccttgtctccaaagagcgtgtgtgtgatattatattcgggaaagctacaactctcttttccttgtccttctgttctctcttaatagttgagcaatgtctgttatattttccccttttcctttttttctcagtcccagattcccgcctctccccactgtcagagcatctatcaatgtggtgtccatcacagcggcagcggctttctctttcatcttcctccctctgccagagccagggagggagagtgggaggcgtcaaggaggtaggggagagactggcagaggaaaaggagtgggtgggtgggggccaagtaaatagatacttagatgatgaagtcaagccactgcggcaatgtttcttgtcagtttcacgcgggcaaagcgtgcctttcggtgggttataagcagcgcccggtccttccttctctcgccaagttgcctgatccttccctccaggcgcgcgcgcacacaccacactcacacaccccaaaaccaagactcgtcctacaggatctgggaaaagaaaaagaaaaaaaagccctcaatcaccacctccttctcgccgactccccctcaccccccgcctcccctccagcgggcagccaaggagagctagaggcgggggaggggagagggaggagaagcgacgcaagtgggtagcttttcagcgccggcgaggcgcgggaggaggagaagcagtggggaggcgcagccgctcacctgcggggcagggcgcggaggagggacccgggctgcgcgctctcgggccgaggaaccaggacgcgcccggagcctcgcacgcggccaagctcggggcgtcccctcccctcggccgggcgaactcaaggggcgcagctctttgctttgacagagctggccggcggaggcgtgcagagcggcgagccggcgagccaggctgagaaactcgagccgggaacaaagaggggtcggactgagtgtgtgtgtcggctcgagctccgggcagaggcatttgggcccgaggcccccgctgtgactccccgagactccgcagtgccctccactgcggagtccccgcgcttgccggcaaaaactttattcttggcaaacttctctttctcttcccctcctcctcggcccccatcttctgctcctcctccttctctagcagattaaatgagcctcgagaagaaaaaccgaagcgaaagggaagaaaataagaagatctaaaacggacatctccagcgtgggtggctcctttttctttttctttttttcccacccttcaggaagtggacgtttcgttatcttctgatccttgcaccttcttttggggcaaacggggcccttctgcccagatcccctctcttttctcggaaaacaaactactaagtcggcatccggggtaactacagtggagagggtttccgcggagacgcgccgccggaccctcctctgcactttggggaggcgtgctccctccagaaccggcgttctccgcgcgcaaatcccggcgacgcggggtcgcggggtggccgccggggcagcctcgtctagcgcgcgccgcgcagacgcccccggagtcgccagctaccgcagccctcgccgcccagtgcccttcggcctcgggggcgggcgcctgcgtcggtctccgcgaagcgggaaagcgcggcggccgccgggattcgggcgccgcggcagctgctccggctgccggccggcggccccgcgctcgcccgccccgcttccgcccgctgtcctgctgcacgaacccttccaactctcctttcctcccccacccttgagttacccctctgtctttcctgctgttgcgcgggtgctcccacagcggagcggagattacagagccgccgggatgccccaactctccggaggaggtggcggcggcgggggggacccggaactctgcgccacggacgagatgatccccttcaaggacgagggcgatcctcagaaggaaaagatcttcgccgagatcagtcatcccgaagaggaaggcgatttagctgacatcaagtcttccttggtgaacgagtctgaaatcatcccggccagcaacggacacgaggtgagcgggccgctgccccagttccgagaggcgtggcgggtccctgggaaactcagagagggaggaagggaacgaaggcgcccggccgcccggctgagggtcccgagtagatccctcgtttgttttggggtgtgtgcgtagctgggcccccggtccgcagtgtgtgtgtgtgtgtgtgtgtgtgtgtgtgtgtgtgtgtgtgtaggatgggaggtagaggggcagggtaacttattccaaatggatcagtttagggggttcggtggctgaacggttggttcgcgggcaggaacccacaatgtttcgccttcggtctttttgttgggctgaggggtgccgtgctttaaagcgagtagggctgaataacgctactgataaattcttccgtgggacggaaaacaaagtgcacacgctatctcttggtagatgtctctgcaaaagtgcgttaaaccaccaaaggcttaggtggagacgagcagagccacaggcgggaggaaggggaggcgggcgtgggctggggcaggcggggccgtccctaccaccggtgagccgggccgcggggagcaggccggccgatggggcgcgcacccgggctgcgggggcggtgcggggttcagtccctgcggccccagcgcctgggctagcagctgggagctgtgggtgcgccgagccgacccaccgcaagggtacaccctggctgtaccgcccccaactctagttttctccaaccgccatcacttggaaacaaacccacaacttttatttggggtttgggaccggatcaggc

SEQ ID NO: 10306 - DNA, 6000 bp, Homo sapiens
gagatacttcatttcaagggtctcatcagcagttgcaacacatcagtgagcaataacctactaggaccccaaaaagagacagggaaagttgggaagaaagggacaggggagagaaaagaagtgccaataaatatttctgtatttaagattgtaacatagatgtacaccggtaacatcaatctcaaattttggaatgcaaagactaaagaatttctactggtccagcaaatttgagaccttatgctataaataaaaggctagagtaaggacgtgtgcactaaacagaaatggaatttcctccccacaagtcgagctcgccgaactgccctcgaggatttttgtgtgtgtggttttttttgtttttttttttttttttggttgttgttttttaatcagaagcagcccagagatacaaaaaagacatgccatgccttcgccccattcattctcccaaaatttctagggctattttcttattgaaggaacaacagaagaaacagaaactggtctctgccaaggcaccaacccacggccagcctccatgatatgcctctatcttcctgagagaagcatagtacaaaatagcgttcagtctattcccagtcagctgtggactaaaacactcatggggtggggaagaacaagaaaatgttctgttgcagaagattatccttgtaggtgtacttgtttttatcattttggagtttggactgttttttagtcattttctactgagcttcaaaacttcgctgtacttggttggggcaaagaggtctcgggaacgtggggttcacactggctttgaacccacagaccagattgcttacacagacctgggcaattacagttctctccaggacagaatccctcagggcgagaaggggtaggccccagactggctcctgctttgcccccaaggaaccgccttctgcgtctccgccgcgcccttcctcctccagcgcgccccttcaggcaagaagggggcgctgagctccgcgttggcctcggcctccctggacccttcgtttgctttccgagcacccatctggggcccagacccttgaaatatttaaggagatacgcgcaagagctcggggtaggagttggcaaactgtttgttctcagactagactcttcctaagatgaggggcaaaggctctccagacgcagactctggtctcgttctcggaaatccgcgtctgaaccgatggggtccgaggagcagaagcgtacacggaggtgcacggccgcgggcacaggtccccccgcgtggcaagaggaagcggcccagccagctgcaggggcgtcctcgttgtggggccgggtagagggagggccaaaggcgaaggaatgaggtcatccccccacccctcgaaaaaaccttcctaaaagtaaaaatgtaagggatctcagcgtaaaggaacctgacttgcaacctcaaagggacaatctctgttttgggaaatggcgcccccagatggctgaatcccatgaaaaaatactcacccggagcagggaaggcctgggtgcacggacccggggagaggtgacgtcacccgcccggctggccagcgcacggctgaaagccaggcggcaacgcggttggagacacccgacaagtcgcgacaggtccccaaggctagcccggtagtcacttcacctcaccgaggcacatgtaacgtcagcagctgtaccacttacggtgtggcccggttcgttacttaacctctccatgcctcagtttcccagtgactgcttgtgtgcaaaatgatcatccgggagccggtgctggattgtgtgaattaaggaactagcattttacacgcatcgttcttctcgctttcactcctcagaaataagggtccatccgctttgattttactacttgagagtgggggtgggaggctcgcttttcccagctcttcgcggaggccaagcggactccctgacaggacagaatctgaacgtgagagtgaaggtcttgcctgtccagaaactcttgtagccagcacaggtttaaacaagaagccaaattgttctggagagattgctgggggctttctttgtgcctcaagcttcttcagtgccctgagcacaggaaacactcaagcagagaagcagagccaaacccaggatacgggaggtcgaggctcttccgtagacctgcagcattggggtgggatgatgttcattctgtgtgtgttctggaccaagcccctctccagggacctatgggcagccccctttaagcaagatgcccggtggagtgggcatccaccatcacttaccctgggcttgggtgaatagattttccgtgccttaaatgggcagggagggggtaaacatggacggtccattggtacaaataaaagcctttggtgggttttgatcaattgcaaggatcgaaggagacctgtggacctgaggtcaactggcagcagagaagagtctgggttcgtgaaggcgccgccgcggtgccgcgccacgtgtgagcatcccagggaccagtctggggaggcgcgctgggatgggcacccagtgtcccatccctgcgctgctcatatgggcagagctccgtgcccgcgtcccagcctccgcgggaggttattgccctgttccccagtgatcaattggaccggtcttagcccaaaagcagaagggagtggggagagcgacttgaggtgggaaaggcagcagcagcgagtgcagggtcgggaccagactaagtggcgtgggttccgggaggagcagcgatgggccgcaggggacgccgcgggccgggcaaacaagctggccagaggtggacactgcgcacggcagggatggagactcaggcgcgactcccagcacctcctggcggcaagccgggcagcgagggctcccaaaacaatgcagccggcgcgcggagcgcgggggccgccagccacttccgggcgtgcggcagcgcggggctcaaaccagccagaccagcttcgggctccttgaactcccaacaaggggctctgcggggaggaggcgaccccagcggagggcgttggggatttaggggttggccggggccggcggggggttgggggggcgtgaaagcgagagggcccttatcccactcccaggcccaagtcgtagcatctctcagagctcacgctctttattagctctttcttttggtgtgcttctgtttcctttgtggtttcattgcaaagtagtttatgttgggaagggggcttttaggcctcttggtgctttcgttagagacgaaaaggccctgaaccaatttggggaaagagaggccttttgcagctaccccgggcccttccccagcagagcacccggaagctgggctcttagggacgcagattcttggagttcagaatgtgcattctctccagatgacgattttcctggcgtgtttacggtcagcagataacactgagtgggcttttgccacccattcattcattacccggctcctctaagcagctggaccgcaaagtgtgcctgataacttgggcctgggagccgccaaggccaacgcatcttccggaaggagggaaattaggaagccggggtctgagcctgtgaatgactcttaagtggtcgggaagtaataacaatgcgcccaccttacatatgaaagaacttcgccctccggggattatctctttggatcttcacagccacccggagacagcggctgaggagagcgaaggcctcctgtccccatagggagactagggacaattaggcaaaaggagcccaccccccaacccagaacttactgtttgcagtcagagacactagatcccaggctccacgagagcagaggccggcctgtttgttcatttctgcacatccagcgcccagcatggtgccccctggtacgtaggggatgaatgagctaattctagccctcgtggatctctaggcaggactccttcctctacctcgctccctcccagcctgcccatcttttgtgcccgtcttttgtgccggccaccagtctttacaaacagtgccctgggggcccatactccagctttccagagcgcacagctgcaagggcggctgtgtgttagagcccgtgatgccttcgagtattgagtcatgccattcatttaagaaggaaaaatctctccaaaacggggaaatggtgggcagtcctgtgtgactggtgagactcttgtaggggcgtttctacaacgacgaaacccttcctaggcactcactccaacagaataacaagcccattttattagtatttcgttttccatgtaaagttctgctcatacgaatatatttataattctgatttttttacggcattggggagcacaccgacaggctgctgaacggtggctggagattcgagggaaaacgaagttcgccgaggcggcctcgggcgggcaggtcccgggctccatcacagggcacacgcggctaccagggacgcagccccccaacacacacacacacacacacacacacacacacacacacacacacaccctctcccactcatgcctggcaacccagcagaaacttcggactggggcaaaacaagcccgggccccggcggcacgcggggctaggcgcgttcccgccagtacctggtcgcgaggccgctcgcggggtgccctgcgtgccccccactcccgcagcccgcgccctgctcgctcactgtgggggcgcagcggccaggcttctctgtttgttgtttaaagaaatcctagggcgggcgagcggcggcatctaggggagggggcgcagccagaattcccttccagcaagcgcgtgaggggcattctcaacgcaaaaccagacccagaaagtagtgaccagccctcctcggattacccttcattggctcctcccttgctccccccaccctccagatttgcataaaaaaggccaagaaaactctggctgtgccccagcaacggctcattctgctcccccgggtcggagccccccggagctgcgcgcgggcttgcagcgcctcgcccgcgctgtcctcccggtgtcccgcttctccgcgccccagccgccggctgccagcttttcggggccccgagtcgcacccagcgaagagagcgggcccgggacaagctcgaactccggccgcctcgcccttccccggctccgctccctctgccccctcggggtcgcgcgcccacgatgctgcagggccctggctcgctgctgctgctcttcctcgcctcgcactgctgcctgggctcggcgcgcgggctcttcctctttggccagcccgacttctcctacaagcgcagcaattgcaagcccatccctgccaacctgcagctgtgccacggcatcgaataccagaacatgcggctgcccaacctgctgggccacgagaccatgaaggaggtgctggagcaggccggcgcttggatcccgctggtcatgaagcagtgccacccggacaccaagaagttcctgtgctcgctcttcgcccccgtctgcctcgatgacctagacgagaccatccagccatgccactcgctctgcgtgcaggtgaaggaccgctgcgccccggtcatgtccgccttcggcttcccctggcccgacatgcttgagtgcgaccgtttcccccaggacaacgacctttgcatccccctcgctagcagcgaccacctcctgccagccaccgaggaaggtaagccttccctcttgcttccccactccctgctgggctgagacgctcccaggagatcccgcccctgccacgcatcccagtgcatccctgcttggggtgccagtagcgggaagggcagaagttctgcctgacctggtctgtcatcacaacaagcctgtatcaaatttgaggcacccctcccacgccgcccaagtctcgcgcattctcctcccgagttgtaccagctatacttaagggcagtttaaaaataaaacaaacaaacaaaaacaacaaaactaaaaaaacgaagaactgaacggcggtttaaaaaaaaatagatacac

SEQ ID NO: 10307 - DNA, 6000 bp, Homo sapiens
aaataaacattggccaggcaagggggctcaaacctgtaatcccagcactttgggaggctgaggcaggtggatcacctgaggtcaggagtttaagaccagcctggccaacatggtgaaaccccgtcgctactaaaaatacaaaaattagctgggcgtagtggctggcgcctgtaatcccagttactcgggaagctgaggcaagagaatggagtcgcttgaacccaggagacggaggttgcagtgagctgagatcgcaccactccagcctggtgacaagagtcaaactccatctcaaaaaaaaagaaataaacattgctcatatcccgtgttgtgtgatccaaacccatttaatttgatattgatggaatacattgatgatgcctggcctagaaagcccctctgagctctgggggtttcaaagggggatttattagctctcataatgccaatccaaaggcagcagacttcaggatgtacccgatccaggagctcagtctccactctggtagcagttccagcctgaggaacaaagaacagttgccccagtctcattggcctgaattgaacatacttgggctgagccagttcctgcagtgagggaaggtctgcatgggtgcctgaagcaagcactgtggcaaggcaggggaattacccttcacctagaaggttggcctctggagcagaggggagatgtggcagctaacaaattgagggtactattggcaacactgttggttggcaggtaacaaggtcttcccctgccccctcctggactgagcagccgcttagagctagcttgagagcacgtggggcctctcctcatacaaacctaggtgggagcaggcctcggaccattccctaaagttgtggcctgggagtaggcattgtgtgatagagtgatggcaaaatgtctgtgtatccctgccccttgccttgtgactttacacctcccatcgagaggtggagtctattcccccagcccttgcatctggtctggcctagtgactttctttggctaatagggtgcaacagaagtgaccacgtgccagttctgagtctgggcctcaggtggccttggagctcccacttgttctcttggaaccttcgccaggccccatgtgagcatgactagggtggcctgctgggatcagacaccatgtggaggacaccatctcagaggccatcctagactagcagagcacaaaatgagagcgcagccggacaagaacctcccccaaccctgctgtcttatagattcatgagcaacaataaatgtctgtcattcaaagtatcaagctttggggtggtttgttccagagcaacagctaaggggcacacccttaagagcccagggccttcacactgggggcccctgcctcccctccctgcacaggcagctaaggggcacacccttaagagcccagggccttcacactgggggcccctgcctcccctccctgcacaggcagctaaggggcacacccttaagagcccagggccttcacactaggggcccctgccttccctccctgcataggctctttacagagaatcaagctactcccccaaagggggccagccagagtgagatatggcccagctagtgctgacaatccctctctgaacctttcctggctggactgcctggggagtggacattttgcctgagtacaggctagtcagaagatccttgttgatagcatctgagacccacttgggcaggggctttctttggaaatagtgaagaaacagatttagtagctggtgtgaggcccaggaacctgcattcagctggtttcgacttgtgggactatgggagcaccaaggtgccggtcttttctctaagctgcaggcgttcagggcccaagggaagcgctatttgtgaaggaacaagttcagtgcaagtgaggcttggagaagacttgaaagcagcttttgtttttgtttttgaggcagggtctcgctttgtcacccaggctggagtgcagtgacgtgatgatagctcatacagccttaaactcccgggctcaagtgatcctcttgcctcatcctccctactagctgggactgcatgcacttaccaccatacccagctaattttttatttttagtagagatgaggtctcactatgttgccctggctgaaggcagtctttgagcatgaaactggtatttatagagactttttcaacatcacatcttcaatatattacagttacaaacagaaaaccctaacttttccttaggctgtaaaatacaaattactaatattactttttctaaatctgattttttttttttgagagagagagggtctcattctgtcaatcaagctgacgtgcaatcacagcttactgcagccatgacctcctgggctcaagtaatcctgctgcctcagcctcctgagtagctgggaccacagggacatgccaccacacccggctaattattatttgtgtgtgtgtgtgtggagagggggttttaccacgttacccaggctcatctataaactcctcagctcaagcaatcctcccacctcagcctccgaaagtgttaagattacaggtgagagccaccatgcccgccctaaatctgatcatttttaaccaccattttgattaatcatgtacggccccatttatgaactgaaattctcttaaacattttcaactgcatttatacacgtagaatctaattttattttttagcatttcagttgtctgccttatcaagtattaatatttaaataattctcatagatatattaaatgtcttcatttcttttaaacttttaagttctctttgctccaattataatcacaaacttcggaaaatgttatacctttcaacttacagtcgctatcaaaaatcaaatacttagggcagggtgtgatggctcatgcctgtaatctcaacactttgggaggtcgaggtgagcagataacttgagcccggggcttcaagacaagactgggcaacatggcgaaagccagtgtctacaaaaaaaaaatacaaaaaaattagccaggcatggtggcacacacctgtggtcccagctactcaggaggccaaggtgggttgatcatctaaacctggggaggtcgaggctgcagtgagtgagtcatgattgtgccactgcactccagcctggctgacagagtgacacctcgtctcaaaaaaaaaaaaaaaaaaaaagactgggtgcggtggcccacgcctgtaatcccagcactttgggaggccgaggcgggtggatcacgaggtcaggagatcaagaccatcctggctaacacggtgaaaccccgtctctactaaaaaatacaaaaaaaaaaaaattagccaggcgtggtggcgggcgcctgtagtcccagctacttgggaggctgaggcaggagaatggcgtgaacccgggatgcggagcttgcagtgagccgagatcgcgccactgcactccagcctgggcgacagagcgagactccgtctcaaaacaaacaaacaaacaaacaaaaaacacaaatacttagatattttacatgagaattacatttatctatcagatactctaccatgccagatttccttacaattacgaaaaatagcaaacacatattgtttgtaaatgcaacacaaaaacgttaatgctctggtttctatctgccttgtcattccgttatttgactccattttcgaggttagaaactcactgtaaggtggccgggcgaggtggctcacaccagtaatcccagcacttttggaggccaaggagggtggatcacctgaggtcaggagctcgagaccagcctggccaacatgatggaactccatctctactaaaaatacaaagaaaattagccgggcgtggtggcaggcgcctgtaatcccagctattcgggaggctgaggcaggagaatcacgtgaacccaggaggttagagcttgcagtgagccgagatcgcgccactaaaacaaacaaactcactgtaaggaaacaatgtaacccaaggcatttggggtgaccttcacgttgcctgagggtgccgagggaccagagatgctggccatggactaaggtctgggtattctcaggcagcagggacaaggtgggcttttttcctggttgctaaacccacgtcaaagtcgagctcagggactggagctcaagaaacccaccgcccattctccagtccgaccggggacctgcatgcacctctgccgtgctgccctgagtcctccaatcctccacactcttcctctgttatgtacacgtctccacccaggcctgcaaaagtcccagcttcctcgcaggggcagggacccgcacgccggcccagggcttggcacgcggggatgctgaaacagggccaggcctggtttccagccgatcgtcagagtcccaaggcccagcaaccttcctcacaaaggcctcgttaagaggcgaggaaacaagagccgggagaggggcgcggaacggcgggcgggacgaacgaccagctccgcgcctccggccagctgcgtcgagccaggggcaccgcggctgttgtgcggctggaaatctaggaatgggaaggttcggggcctgctcggctccggaggcagctggcgggtcgtccctggcggcgttggagcggtcagtggcagccgggcacgggcgaccgggtcgcccgggtcgccctcagaccgtgactcccgaaaaaccttgcgggcggggcgcgcccgcgccgtctcttgccggaaggtgcgagttagtgcgctcgattgtgggcgggggcggaaagaggcgcgttttaaagtggtaacagatggttttcttatccaataggattaaaaaatttgtccttacccggccgaccgcggaagtagagtaggcgggcggccaatggggacatgatggggggcggagccgaggcctccgaagcggaagtgggttgctgttgaggcggcggcatctttctcgaggagctctcctgggcggctgaagaaggagcttcttctccggagtgcgccggcggtggcgcctgcggacctaactagctccaggttaggccgagctttgcgggaaagcagcggtaagtcagggccttgcagatgcgaggtttaggcagcttcgcggcctacagaggcctcggcccgcgcctcttgggggagccgcgctgcgcggcttgacccagccgaggctttgcagcccgggacctcgagccagctctggtcgctcgcactgccgtccgcgcgggcgcaccgagcccggcttggcgcgggcaacagaagttaggaggtctgcgtctgggtctcggctcaccctggggggccgcggccatggggcttagttcctagcctaggaagggaaactgagactctgggaggggcaggaacgcccccaaggtcacttggaaagtcgggcaggatgtgctgttagggggaagacccgggcagggtttttgttccccgctgacgacgcctcctttgtgtgttcgcgccgccgccccgccatcgtggggcctgcgagtttgccggggtgcgtgggccgcgtggcggggccttttgtaggtcgggaggatctgagtacgggtgcgggcctgaccgtgggggcgccgaggtcgcagtctaaaacttagtagggcctcgatttccgggcgcgcttccgggccccggctggtggttggtggaacgtgcgactgtgaggcttgcggcccagccctgcaccgctcgggcccttcaccgctctggcgcgcctatagacaggtgtatgaagattctcacgacccgaaacagagttgctagtaaacaccgcttttccgcctttgatccatcgagggaagagggaaaaggatagagcttgggcaagccgttttggtagggatttcagcttttgtctttcacttgtcagttcccatagacgttcacaaacttaataatcttcgttctgtttctgcaccaagttcttgagccagacgtagggtctcagctctggagcctggcttagactgtccaactgactggggag

SEQ ID NO: 10308 - DNA, 6000 bp, Homo sapiens
tgtacctcagccagtgccaatgtctccatcattcaccccactgctgccttcattcagttcattaaatgctccttccagcctgaaaacctgtacacctgcaccttctcttttgtctggaatactctcccttactatgtccaccaggccaacttcttcttatcctgaggatctcaatttaaagcctgaatttcctggcgggcgctgtggctctcacctgtaatcccagcactttgggaggccaaggcaggtggatcacctgaggtcagaagttcaagaccagcctgaccaatacagtgaaaccccgcctctactaaaaatacaaaaattagccgggcgtggtggtgcacgcctgtaatcctagctacttgggaggctgagacaggagaatagcttgaacccaggaggcggaagttgcagtgagccaagattgtgccactgcactccaggctgagagatagagtgagactgcgtctcaaaaaaaaaaaaaagtcttttcctcagggaagtccttcccaacctaccgccctactcctggggggtacatcctctgttatatgcccaaacaacactatattttcttccatagcatttatcaactgtattgccaaaatgatggggttaattatctgcaaaagcttttctctaggaaagaggagtgtgggaacaggtctggctttcccctactgtatcctgggtcctcagggactggcatataataggcatcccataaatattcgttgtatgaataaaatttaagatactaacatataataactttttccagcgtgccttttaaggcataaagatataaaatatgatttaacaaataatctaaacatgacatataaaaataaggcaaatttcctttctaaaatatatacatggagacatatctatcttcaatttctcttcaaccctgatttaatttctagaaatacaagcctaaaacaactcagtagaagataggaaaaacacttaaagattttttacataggaatgagataactgaatgccttatttgaaataaagaaaaaaatttgtggaaattcccaaagctaaataatacaagatatattacaattttccatttacaaagaactttataacaagagtgtaggaaatggtaaatttgctaaagccaatagttaactactcaacaatactagtcttactaatgctaattatacttttggctcaatgtagctacatgctgcctatgggagaagaggaaaacaaatttgatggtttattttcatttggaagatttgtggcatgatttatattcacatacttaaaaagaagtgctttggtttattagctgccataaaaattacgcttgtttatgtttcagaaagaacattaagaaatacagcaacaaacagcaaaaatcctacaatatctaatatgtgcctgatatttaaaactaccatttcttttttcctttttttcgagacagactctcactcagtcacccaggctggagtgcagtggccctatgtcagctctctgaaacctccctgtcccgggtccaagtgattcttgtgcctcagcctcctgagtagctgggactacaggcacgcgccaccacacccagctaatttttgtgtttttagaagagactgggttttcaccacgttggccaggatggtcgcgacctcctggcctcaggtgacctgctcatctagacctcccaaagtgctgggattacaagtgcaagccatcacgcccaaccaacactaccattttcctttttatttatttatttatttttcagagacagtctcgctctgtctcccaagttgaagtgcagtggcacgatctcggctcactgcaacctccacctcctgggttcaagcgattctcctgcctcagcctcccgagtagctgggactacaggcgcgtgccaccacacccggctaatttttgtgtttttagtagagactgggtttcaccacgttggccagggtggtctcaaactcctggcctcaagtgacctgctcacctagacctcccacagtgctgggaatacaagcgcgagccatcgcgcccgactaaccgaccaacactaccatttcttttcttttcttttcttttcttttcttttcttttcttttcttttctttttttttttttagagacacaatctcgctttgtcgcccaagctgaagtgcagtagcgcgatctcggctcgctgcaacctccgcctcccgggtcaagcgattctcctgcctcagcctcccgagtagctgggactacaggcgcacgccgccacggctaattttttgtattttagtagagacgggttttcactgagttgcccagtctggtctcaaactcctgagctcaggcaatccacccacctaggcctcccaaagtgctaggattacaggcgtgagccaccgcacctggccaacactaccatttctatttctcattaaacttctgcaaaatcggtgttgcaattcccatttcacatatcgggaaactgagactcagagacattgtgtaatttacccaaggtcacgactactcagttgatgacctgaaaagtgcatccagatctgcaagaagttccgcccttgtgatactgttaagtgcctgccaaaagatgacggtctctaaaccccagtgggaaccaggctttttcagatttttcttttttgagactgagtctcaatctgtagttttgttgactctttatttgcttactaccctatgccactacctccatatatgcagggatctttgtcttgtcaccactccagcacctaatttcttattacaatcatctaacattttcaaactcagaggagcttcagaatatgaatgttgtgttaataagaaaatgactgaagttatgtctttccagaaatgctcatttatgtcgtcatatttttagcacttttatctgattatattatctgctgaaattggctttggggctttttcacaaataaattggagaagatgtttattacagaatcatgttaaactcaggaccagtataataattgtgaaacacacaaggaagtaggcaaatagaactagggtacccagtaaatttccttccttccttctttctctctctctctctttttttttttttttttttttgacggagttttgctcttgttgcccaggctggagcgcagtgtcgcgatctcggctcaccgcaatctccgcctcccgggttcaagctattttcctgtctcagcctcccgagtagctgggattataggcgcgcgccactacgcccggctaatttttgtatttttagtagagattgggtttctccatgttggtcaggctggtcttgaactcccgacctcagttgatccgcccgcctcggcctcccaaagtgctgggattacaggcgtgagccaccgcgcccggccaagtgtccctcttctagtccagcatccgaacagtagatttcaaacaaatacaaagttaagtggaataggcaacaaatggaaggggtgtgagacttcaaaatgtctcagagataggacccaaccaaatccttggcctcgccaagcgcccccatcactctggcagaacagctccagagaccagccctggccagccctgggtccccatctgtcctcccctccaagctggtagctcccgcgccctcttggtctgtcctttaatctcgcgcggcggggaccggcaggatggtggtctccccgcggttttgcctttcaggctctcaagtaaagaaaaccctcgaaactcctgatctcgagcacagcacaagctccgagctggcaccgggctgagtcaagatggcaagccccggactgaacattcgaatgtccctcagtcttccccgcgcccaagccccggtgcctctgccctagccgaggcctctgcggtcttcccgggcgaggagccgattgggggccgccggacggcggaggaccctgctcctgcttcccgaactacagatcccagggtgcctctcggactcgcgctccctccctcccttgctccctcccttcgtccgtctcctcccccggcccttgttgttttggctggaagcactccggcggagtttcagagaaagtctgggcagaaaccggagccgggcctgaacgtgggaaggggaggaggagagggaggaagaaggagcccggcggccgggagagggagggagggatcgggatctggggccgagccgctcaggacctgccgcgagccccggggtgggggaggcggcgggggaggagcgcgaggggacgggacagcgggatccctcccaggagccaagccgccaagcgcctcgttcctctgctgctccccgccctcttcggcggccgcgagagcggacccaccctccggcttgacctgcgacctccctgcgcccgccgctcagaaacgccccgcgcttcgctgccaaccctgcggctccctctgtgacccgggaccagccccgcgcccgctgcccgtaggcggctcgcggcttcccctttcctcggcgttcaccgagcgccgcgaagtgacccaccctcccccgaggagagggaaggaggatcgctccgggcgcatcgaaaccgagggcgggtgggcgggcgagcgggcaccgcgcggggcattgtgtgtgtgtgtgtgtgtgtgtgtgtgtgtgagcagcgctgtgtctgtttcggaaagcgctctggggaggtcttgtccctagggggcggagcgcaaaggacagaagctccggcaccgagtcggggcagagtcccgctgagtccgagcgctgctgaggcagctggcgagacggcacgtctggaggcgaggcgggcgcactgaaaggaggccggcgcgcccgcggccccggctcgcgttctgttcaggttcgtgggcctgcagaggagagactcgaactcgtggaacccgcgcaccgtggagtctgtccgcccagtccgtccggggtgcgcgaccaggagagctaggttctcgccactgcgcgctcggcaggcgtcggctgtgtcgggagcgcgcccgccgcccctcagctgcccggcccggagcccgagacgcgcgcaccatgagcggtggtgaagtggtctgctccggatggctccgcaagtcccccccggagaaaaagttgaagcgttatgtaagtagagctgcgggcaccactccgcgggcctcggcgtccacacccctccccagtcggctcgccggcggctgcagctggccgcgcgcggggctggttcttaaacgaatgccggtctctttccccttggcccctacccctggcgggctcgggacagggtgccttgcactccctcacgcccaggcatccacttggccggacaactttcttcctccaggttccagacagcctgctttgcgggcctgttcgccccataaaaggacctagacgtccagctaaactcctgctgcatgctttttttcttccttaggaaggatggggtgcgatggagagaggagccttcttcctgctttattcctgcatctgattattgggctgatgtgtgctaaagctcccgcaccgggaaaactgccgaggttttagggctcactagccctttctttggtgggcgctccctctcctccgcccctcgagatgggttgcgggaagcgggctgtggagctgaggagttggtagtagagacaagcatatcgaacgcgcgcaaaagggaaagaaagaaaagttattacgcgccctgccgtttgcttagcagggttcacattttcgcggttttgaattgagggactttggagtttggcccgggagccttggcggtttgctgcgagaggagggcgctgggggggagcctagtggctggtgtttgggcgccttggatgtgctgtcaaactcggcaggaggggacagctgaagccagaagggatttcagttgcggtcctttcccagggaaccagagtggctttaatggtgtttgtgtaattgatacaagatgctatgtgttaaaccgttttagctgttaggaaaaatattccttgaaagtatcaaccttgctt

SEQ ID NO: 10309 - DNA, 6000 bp, Homo sapiens
gaactcccgtttataaaaccattatatctcgtgagacttattcactaccaggagaacagtacggggaaaattgcccccatgattcaattatctccacctggccctgcctttgacatgtgaggattgttaaaattcgaagtgagatttgagtggggacacagccaaaccatatcaactgatgatctcctttcctacaacttccaataacactttcctcatttccacctgtatcctgttcgtagcacttttaatgtccatatttgtaccagcagtctgttcatgatgatttatgatgatttatgtattccctaagatgatacagattttctctaccatgcctctcactttcttctgaggcctcactagcagagttagcatccatgtttctactaacaatgtgttcaaggcaatctaggtttttattttattttattttttattattatactttaagttctaggatacatgtacacaacgtgcagatttgttacatatgtatatatgtgccatgttggtgtgctgcacccattaactcatcatttacattaggtatatctcctaatgctatccctcccccatccccccaccctgcaatctaggtttttaaaatgctggctacacacaattcttccagcctttgccattgtccaataccaaagacactttgacatttagtttcctattactattgtaacaaattacccccgaacttagtgcttaatacaacacacgtttattatcttacatctgtggaagtctgaagtttgaaatgagtctcattagactaaaacctaggtgatggcagggctactttctgtcccagagactctaagggaggataattttctagccttattcatcttctagaggctgcacatattccttggctaagccccttctattttcttttcttttctactttttttttgttttgagacggagtctcgctcttctcgcccaggctggagtgcaatggcgtgatctcggctcactgcaacctccacctcccaggttcaagcaattctcctgccccagcctcccgagtagctgggattacaggcacctgccaccatgcccagctaattttttgtatttttagtagagacagggtttcaccatattggtcaggctggtctcgaactcctgacctcaagtgatccacccgcatccgcctcccaaagtgctgggattacaggtgtcagccactgcacccagccccctttctattttcaaagccagcaattgcttatcaattctttctaacatagcatcactccgactctgactgactctattgctttaatctttcttttacaaggacccttttgattgcatttggttcacccacctaatctggaataatattcccatctcaagactagctgattagtaaccctaattctatctgcatccttacttctctcttgccatgtaaaattgcatattcacaggttctaaggattagcaggtagacatctttggagtgccattattctacctaccactgtatttactgctcacaaacaccaactccttggcaaaaatatagtggacagcatttctgttaccatcagaatctcttccagtccaggctgctttgtgaatgtctataccaggactagaaatgcgtggacgccaacctaataagatctagtttttctaactaaagctttacattcatacaaaagagacattttggagtctttgcatcatcttactgcaagttaccagtgtaaactttaaccaggtacattaaaacaaattgaaaatgaataatactaagaaaaggaggaaataaggagccagaagtttatcttatttttcttatatttgagaggttatcctaatttggtaaaccatacaatccatagtttgttcgtttgctaaaaataaaacaaagctctgaccctgacatatatgtaacacttctctcatttctacccttttactgttctctatctcgttcttaattccccttggtttatggattttttatggtccacaaagtcagtagagatgaaaccattagtcccattactttatttgaactgacatggcaatagtaacccagaaaaataaagatgcaggttctaaaaatccctgaatttagaaagattcatacgatgtgttttgaggcttatcatacttaatgccttgatagtagaccagtgcttttcaaactttaatgtgcataggaatcacttgaggattctgtttaatggatagtctgattcagttggtttagagaggggcctgaacttctgtatttccaacaagattgtaggttatgggatactgctaatatagaaaccatactctgagtagcaaggatttagatactatctctagttgccattgtcctttcatttgcaagtgtgaaagtaatgtacatttaaatgctttcatgctgttgtcaattgtgggttgtaggtacaagaaaaacaaagcatcttgagaggaaataaaaatttcttgagcttttctgccagcatcaacatggctaaggagattgctttacactgagtaattttccttgttaacatttttattaagttgtcatgacaactttcttattctccataaagtggaggaaagtaggttttaacccataagtcaactataagaaagaagattggacctggaagatgatgaaatattcaggtattcatttatccactcagcaggcattttagtgaatcccgttatgaaccattttcattactaggaaattaggctgtgaagattagtatttccctaacaacaaggaactcttgttacttttttagagcatatcaaacatccagattacagaatgtcttttgcagtcaccttttggtggttctagccacccttatgtttagattggttgcttcctcttcttacccattgtctgacagtcagaaaggatagaggaggaagaagacaagacactatccagttgagagtctactcttagtaaaactcggtagctcctggcagaatgtactggggtcaaatgcaatactaatcaaggagtttggtgtgccataaaacttgagaatggtaaaagtagaaattaatgggttaaacaagtcattttccagaatgaaaggaatattggtaatggtatcaacagacgaggacaacagcaacaacaaagtctttatacaagcctgcaacacgtgacaactgcggatcaggcatctgaacccggcctatctttccaccgtatcttcctacacttttctttatgtactttttatttctaccagatggtattactccttgtttcttgaataacagtgtcatgcctttccaacctctgtatgtttgctcacaagtttccctctgtcagagaaaagcaaaaacaacaaaaaagtcctctattttatctttttccaaacataaccaatccttcaagtcctatctctagtactgttcctttatgaaccctgtcagacaatatctcattttcttctgaatgttcatagcatttacttaaaaatagtatgacttccctcttctttttactaatgaattactgtgtattttttaagtttccttctacatctgaagttctaaatattcttagtacaaatgtcctactgatctaagagagtatcatgggttaaatgtagaggaagagaagtttctgagatggcaggaaggcaaaagtttctgtgactacctgtgcttatattgctgactttcttaactgttcctgacttatttaaatgtatttttttcctgattctgattaatgttcactatgaggcaagcacagtaggcaagactgggagaaagtttgcaaatgtgatgagcttacaaatgggaccagattagatggtgtacttgggggagatataaaagaggaagataaccatgaattgaactgaattgaaaatggatcacataaagatcatgattaattgttaattcacaatggaacagcatgatgggatttttttaagtcagaaaggtgactaaaagcataatatcacaacacacacaacggtaacaaatataactaaatgcactgaaccaggcagaagccagaccttactgaaaagatgtaaaatctctgtaaccataaaactgcatctgcaaatgagtagattggcttcaaatctgaaaaccaggacaagagagtcatcagcgcagatgtcaacttccccagcagaaatgttggagtttttaactgtggaaaactacagtttttccacaccagtgcatagtggagaagacatgtttttgtttttctttttaagtgtgccaaattttcctggagtcccctccaatttttttctttctctctctctctctctttttttttttttgtcccctgcccctaggtctctgtctccacacagtgatttctgttatggcgattgggcggctgcagagaccaggactcagttcccctgccctagtctgagcctagtgggtgggactcagctcagagtcagttttccagaagcaggtttcagtgcagagttttcctacacttttcctgcgctagagcagcgagcagcctggaacagacccaggcggaggacacctgtgggggagggagcgcctggaggagcttagagaccccagccgggcgtgatctcaccatggtgcgttttggctgctactttctttttcagtctttcggtgcggagaaggggaggaggcgggcagaggtctgaaaaaatcgaatgccttatggaaaggaactgcaagggttcctttggggtgatcaaagagggagacacagacacagagagacaaaggcaaggaggactgtctgggagccacgcgggcgatacagtttccgaggcacgccgcgtcccgcctagcctgttgaacaggtagacatgagcgacccaagcgtaagtgccgctgccgcgagtgcccagggtgcactcgcgcggggaccgacaggtgccactgcagggtcccctctcccgctcactgcctgccacccctgacgcctgctctctttctccattcgcagtgcggatttgcgaggcgcgccctggagctgctagagatccggaagcacagccccgaggtgtgcgaagccaccaagtaagtggtcgctgcatccccacgcgggtcggggttcttcagacaggcggtccctcttccgggacccccgcttgggctgggtctccttcctctcctgagaaaccttcggtacgctcccagttgcccagccctgggaagccagcatcgggttcccacgctggggaggagcgagaggaaaggagaggacgcccgaggggccggcccagggcccgggggacccgcggcgcccgagggaggagcacagacgggggtgggcgccgagcagcgccgcgccggctgctgagctcgcggggccgggccgtgagaacgcgcggggcgcgccggggccgctggtctcccacggccagggcgcctgggccccagagcccatcagccgcgtgcagcgctgcggcctccggcgcgccggcaggcaagcgagcgggcgcagctgggggatgcctggaccccggaggcagcagggctggaggcggtggcgggcttcagggcaacttcacccggccggctgcggcgtgggtaagaggcgcgtcctcctccacagcaaaagctgcgatcgctgggctgcccagagaaggcagccggctaactgcccagcggctccacgaggtgtgcgcgtgtgtgcgagagagacaaatgatttactgcttagcagtcccatttctgttttcgttaggactgcggctcttggagaaagcgtgagcagggggccaccgcggtctccgcgcctgtctgcaccctgtcgcctgagctgcctgacagtgacaatggtgtgaggggctgcgttgcaatgtggtcatgtgatttcaggctatggatttcgtgcgtctttctctgctcactgattttcacatggttattctttcattttgcactcgataaacagtttacatcttctgaagtaagccagaagattgtatggctcacttaacgatgactggttgaaggcatctt

SEQ ID NO: 10310 - DNA, 6000 bp, Homo sapiens
atgagcccttgaggatattatgccaaatgaaataagtcagtcacaaaaagacaaatactgtatgatttgcggtgattaaagcagtcaaagtcatataaacatggaaaagaacagtggttgccaggggcttggaggaaggagaaatagaaagtcattcaataggtacagcatttccattttgaaagataaaatgttctggagatcttttgtacaacagcatgaacatactcaacactacagaactgtacacttaaaaatgattgagatggtatattttatgtgttttttaacaacaactaacatttaaaaaattattctttttgaaagtggtagtggggcaactggatcattaataataaagcaagatccataccttaataccttatacactaaaccaggataaaatataaatgaacaggccaggcacggtggctcatgcctctaatcctagcactttggaaggctgaggcaggtggatcacctgaggtcaggagttcgagaccagcctggccaacatggcgaaaacccatttctactaaaaatacaaaaattagcctggcatggtggcgtgcacctgtagtcccagatactcgggaggctgatgcaggagaatcacttggacctaggaagaagtggttgcagtgagccaagattgtacaattgcactccagcctgggtgacagagtgagactctgtctccaacatatagatagatagataaatagatagatagaccaaatacctaaatatcaaaaataaaatcagagtatataggataagacaggcctatctatgactcttttaaaaactgataaattcaattaaataaaattagaaacttttttaatgtcatgagatatcaagagccaagtcgaaagacaaacggcaaaatgagaaaacaatctgaaactcctaacgcaaagggataatctccttaacatacgtggagtttcaagaactgaagaacaagaccaagaacccaataaaatatgggaacactatataaacaataaggccacaacaaaggaaatagaattggctcttaaatatataaaaaacttgctcagcctcactcaaaatcagagaaatgcgagtcaaaactatcttgagacatcacttttcacctatcagactggcaaacatccagaagtttgattgcacattttgctggcaaggccgtggggaaacaagcaccatttaacattgctagtggaagtgtaaattggttcagccctttgaaaggcagcttggctgtatttatcaaaattcaaaatgtaaaatccagtaatcccacttgtgggaattaatactatagataaacttgcacaagtgtaaaatgtcatgtgtggacgtttgtaacattgtttaatagcaaaagattggaaacaagtcaaatgtctatcagtgggattctgattgaataaatcgtggtgcatttatccaagggaatgctatgccacattaaacacaggcatggttactctgcactgatatgcatgtaagtctcatcgtgtccgtcctcttctcaagaccctccaatggctgtctgttgctctgagggtaagtcctgaaatacttacactggtttagcgggtcctacaccatctggctgtcctgtctctctgacttcatatgacattctacatctcactttctctgtttcagccacattgtcccctttgctgttcctcaaacgtgctaggcatggtccctccttaaggcctttgcactagcttcttctgcctggatcaccatactctccaaataatcccaaagctcactgactcccttaccatgatcaagtctttgctcacacgtcactgtctcaagaaagctgcccctggccgctccgttttaaattaaaattccccactgacatccccaacccccattatcttgctcagtgtgttcaactgctcttattatgtcctaactcaacacagaattaacttgtttagtatgtttgttttctgcctaatgtgccccttgcccaagatataaatgccaagggacagaaagttttgtcagcttgtcccctgctgtgttaccaacatacacaatagtctgtggcatgaagtaggtcttcaacaggtgtttgtttccaaacaaatgaattaatgaacatacaatgtggaaaggactataaagtgtatatgtatttaagtgaagatgtaagacgaagcccagttattgttctgcctatagtattttttttttttttttgagatggagtttcactcttgtcgcccaggctggagtataatgacgcgatctcagctcactgcaatctctgcctcttgggttcaagcaattctcctgcctcagcctcccaagtagctgggattacaggtgcccgttgccatgcccaactaatttttgttttagtagagatggggtttcaccatgttggccaggctggtctccaactcctgacctcaggtgatccgcccacctcagcctcccaaagtgctgggattacagacgtgagccaccgtgcccggccctgcctatagtatttttaagaaataaagaaaaagtgtaagaatgtatttaggccaaaagaaacctggaagtctacagagaaaactattatcagtggttacctggagggagatgtatggactgggcatatggggaagagtggtagaaaggagactgtggtgcatgtacttttatataaattatgtaaatgtattacttattcaaaacattaaattaacaaaagaaaaataaaagctgatgtcagctcccaaagattgtaattcagtagttctgagcagggctcaggggaatctgcattttcaacaagctcccccaccctcccatcccttcctgggtggggtagatcaccctcaaaaatcactgtcaccactacctctcctgaccccaaaacgccacaaaccgcgtaacgttgggatagttctcatttggagcacaagcaaatgggcaggcacatcacagaaactaatggcagagttttcagtaacatttgacaccactaacagctgccacccaaaaggcagcctccttgtgtggaagaacagcagaaatttcatctacccttcagtttcatccccacaagcaagcaggaccagtaaaaggagtgtcctctctgtctaagacatttatatatgttgggtgtttagactaaatttcagacttctaaacattcacaggtttagcgaaagtagttggaggggcttcttcagatttctgcgctcatggtgatcatatactgaaaccctccaaatttttccttcctctttcgcccaggcattttaattaatacaatgtccttcctaattcacagaggaaagatctttctaagaacccttgctggagatgagaaaggtggtaaggatctgaaatgtgtcttagcaagactcacccaacagggccaccctgcttcattgtgatgcctttcagataaacgaagtattcggctcttgttattcaatgaccctaataaaactttacaactgaagtgtagaggaaaaaaataaataaaaagatctaatgacatacaagaagggactgaacctgtcaaccccagaatattttcagtctgaaaagcaacctcatccttattaactttacattgattcccaaagagcggaaaatttaataaggaagaaaaaattcaatatttcatgactcaccacttcctcgggataataaatacgaactaaagatatatacactgaacgcttttaacattttattttcacttcaaaaaatactgtttgcactatctctactattgacctctcaagatgattctatttccggaacgcattttttgatatggtttctaattcaaaaatctgtcacatctttgatatttcataggctccattaaaattaatagcttcatgggtccctcatgagtttcttccttaaattttcaaacggtttgtggtctgtttctcagactggccaatgacaagcagttctgggactggaagatggaagtagtgaaataatctttaaaaatgtgtaaaaattaagcactgtctgccaggggctttagagttggcaaatagctaggtctttattaaacggttggttttgtttctcctgttgtttcttcctgatatccgtctgtgtggtaactgagtcactatgacataataccgcagagaaagactgcaggacaaccagacgtacacatgttcatccctcaatgagtcgcaaccttgggtctgttccctagacattggtggaaagacttgattaatggcagacttgttcaacataaaaaagaacaaagaccagatttattcttggcattccctttcctaggggcttacttgtaatggggtaattaatttatggctttgcagtaaggcggcatcagaggagcaatttaactcacaagaggtaacgcagatggagagtacaactgaaagataccttgtgtggaagggtacagaaggaacctcaagctggacgttgatttcttttatcagtaatacaaattcactactagctgcttcttggatttccccccttgagagctgcaacgtttcctaaatgaacagaggtctttagggaatgcctcaaaccacagctgaatggggagtggctttagaaatcgccggtggaacttgcctgttaccttcttacaattccccccgcccctgggcaacgcaaaagccgtcctaagtgcgataagagcatggagtgaagggagttatttctggagtttagcagcattcctccccaggacacaccctctccccctccccagcagcccggcactccgacacactccgcgcacacgcgcccctcggcgagacgcggcgcattcgcgcgctggagaccggcggcctctcaccgagcctgagtcgtggccgctgcgccgccaggaggcttcccgggagccggcggggcccaggacctctcgagcgcagcaggcaaggggccggccttttggcagcgcggctgccagttaattttctccgttgcattctgcaaacgagatcgcattcagagcccagaagttgcaagctgggaataagcgagatctgaaagacccccaagaggagcttgtttgggagtgggggcagacggcgttttgcgcccaactggtaagtggcagcattaaatctatgcagacatggaggaaataaagctttgcagcctttccaggcagtggcatgcaagtactcgtgcgaagagtactgtttggggtgtttagttgtagtggactcagaataccgtgttccgccacggttttcctaatcccttcttcggactcctctttgggggttggcgggggcgggtcctgcttcgcgggacttttctgttgttggagttagggtgggggaggggagaaaggcgtgaggttgaataatctctcctacccacctcacccttttttttttccattaaaaaaaatgatacttttagagaagcttctctttcatgtgtttaacttgcctgctgcgatttgagcccaatgagtttgtattttctctaattactttgtaatcggctccatcctcggttgaaatagaaggaaactttcacaaagcaatcaatttctgacagcctaagagctgctcagttgctgaatgaggtctagctggaaacactttgtttctcacaaggttttggtgatttttcccatgagaaatctgggcgttttcacacctgttgcttttcagttgcctcaaaattgtttgcttgtttgtttgttttcttgggtttcacttgattgcagttctttgtctaaccaaatccaatgctactttcccggttctcctctccctttggacggggtccctgttgttagcattcagttggcggtggttcttagggaacaagtggcaggcagaatacaatagggaagaatgcattcctgatgactcctctaccatggaaagactgaaaaactgacattctccattagtttttatggaaagcattgctgacgcttataaatattcaattttggtgagttcctgaaattatttaatccagaagtaaccagcatga

SEQ ID NO: 10311 - DNA, 6000 bp, Homo sapiens
ctgatggctcagcactaaaacagcattccatattgccacataagaacaagtttcccaaattcagattcaggaataaaactgacatatttctgactccaaaatccgtgatcttatatcataagacatagtgattaagaacatcatgcttgtgtatttctcatcacggatacatcacctgagtgaatgactgttttgcccattagaggcatattttctctttgaaaccttgcacaataaaatgtattcagttcctaggtggtgatgtgtatcagctcctcttgagagggctcaatgtctggcacacaggagctgcccaatagatgatatttctctcgtgtgtatgaatgataaaactccatgtaaactccagatcattattttccttcatgacatgtgtgaacaacccctgctttcgacctccaggggcaccttcactttgatttgcaggaataaataagtgtaaatcccactgaatctagagaaaatgagaacaagcaattttggcaccctgagatcagagtcctacacccagctgtgtagtcagtatggctgccctcctagttacccagaagtaattatgaaccaactctcgggccaactgggtctgtcctctgatgctatcaaagtcatataggtaggattcagcttcgtggttggctagtaattaaaaagctgcaagctgtgagggaacatagctgaaatccagagatagagtttgccagaggttgcagacatggccagtgatacttttgcaggagcagcaggtgtggttggcttcgagactcaataaagatggtcggtgatgagggaatagaggatgtcaagatagtcttctctctctcttactggcaagattaccagctgctgatagaactagttgacttaactagcttatcaccacttgggaaacttccagctgaacaaaatctcctactgactgtccacaaggttagagttttcatcattatggtctttgaaaatgtcacaaagaataataaaggctctgatgtacttaatgcatgagtttgttatcatgtaagtaatgtaattctttgtaaaacatttaagatacaaaaatatatacataaagagaaactaccactaaatgaatcattgaaaaacggtaaatggtattggatatttccttttaggctttccaataaaactatccattctattttgtttttaacttgaagtatcatatgtataatgtctcccaatgttattacagtcgttttatagctatgcaatctttcaatcccttaggcatcccatattttatggtcttccactgcaggaaaacaacacaactcatgaactaatttgacaaattcaattaacataatcatgcccaaatattaagaggctgcattttgttacatggaaataaggaaaaacaatcatcctaggaaatattgtgaactaaaccagtgtttggagaacctgatccatgatgatagtttataacagaatagtatttgattataaaaacatacagagaaatcagtaataaagtccagcatttatgattgctattttagccatgaagtccaaaacactggtcatttgcatgtctataatttgcattggcccaacattcccctacagatgagacataagaaaggagaaaacttgacttcaggaaaattttgttaagttcaagtacacctgacagtaaaattgtaaaatgattgccaaaagtttttaattaatatgatttgggaccaatatcaggaagtcctagaaaatgtatcccttggaaaggaaaaaaaaaggaattcctggagatctagatgtgtaaaatttcagaattcctggtaaagagagatcaggtcacaaataagaggaaagaagtacttgccataagccagatatcagttgcctccagcttggttcttcattcttgacttccattcttctctgtattttttatgggggtggggaggattttttctgagagaggttagaaaggattctgttgaggtaatccgtgaaaggagatgataaagtcaaatatttatctgtctcccatactggggagaacaaatacttcaatagaagtatagctctgcaataatccaacagaaatattggttggccatgtgccaacagagccgtgacattttaggaacttagcctccctgagtctcattttctttattaaatgaaatcgttatagtaactatctcaaagggttgttgagaaagttaagcgacttaatgtatacagtgtgtgtagcaccgtgtctggtacatagggagcatgccataggcgctgtagccaattgaatcaggttgctgcaaaagtaatcacacttttagcaattaccatttttttgtgtgttacgttttgttttctttgagacagagtttcgctcttgtttcccaggctgtagtgcagtagcacgatctcagctcattgcaaccttctcccgggttcaagaaagtctcctgcctcagcctcctgagtagctgggattacaggtgcctaccaccatgcccagctcattttttgtattttctgtagacacggggtttcaccatgttggctgggttggtctcaaactcctgacctcaggtaatccacccgcctcacctcccaaattggcaatttcttttaatagcaaaaactgtgattacatttacaccaatctaatactttccaaagatggctacaacaacgtatcccaccccacatgcttttctgcagtgtatgctgacacttcccattcaagggtgaatctatttctccacctcccttaacttgcatgggcctacagcagttttgaccaacagagtgtgacagaagggacactgtgtcgggtccgtgcatagtctttaacagtctggccagctctgcttcctgcctttagaagccaccttcctccaaagtcatatgctatggccgctctactgtagacacccaagccttgcggagaagccctggggagacaccctttggggagatagggaggctggggcactaggcacccgccttgagaaccagggatccagtctgggcgttcagctcagttcagccctgaaataaccatctgaatgaaacagcaccagagacccctagaggaaaccccccagctgagaaccaggagagataaaaacaaaccgtcgttttaagctactgttttggagtggtgtgttaggcagcaacagatgactggaacagatactgtcggctggctatatcatcatcacaatcattgcttcatgcaagggcctttgctgttagatattcaggatacaatttaaagattcataggacctgatattccaccatgaagaacattcattgtaagtgagaataataataaatcagcaagtgatagtgggtgagcaggatgctaataagaggtcctctgttctgagtgtgtgcaaagtgctaagaggacacagaggagtgagtggttattctacttggagcaaatcctgggaaggggtgtggtggcattagaggagacatcctcacagaggcagtgacgtgagctgaccttgaggaacaatgggatgttaccaagcagcaaatggaggagacagtggggatagatttcctcaagtaattacagcagctggagaacttctacccagatttaatgtaaagaataacattaagactgataatttgacttctgttgctcaaaagctgattctaagtaattggaaagataatttgactacttaggatagatggtggaatttgatttttcatatctctcgattggcggggagaagaagaagctgcagtgcaaaatcagaaggagaataaaggcctgaatctggctgacaatttttaaaatcctgtgttggccgtctggattctgctgccctgaaatgcctccttttgggtaggctgcaattagaggcatttgtgctgccatttgttcccattgttgtctgtttgaacaaaaattctgtgaataacggaaattatacatccagttcatcttctgtagatttttctaagaactctatctgcaaagattcgaggagttttatgatgaagaaacatgaagtatttctctaccatctttgtcaaggtttcattttctcttttaatgttttcaattgctttaaatgttgattagatacaaaggaatacttataaaatatgcataaggcataaagaacaataaaacatattagatatgtgtatgcattctcagtttttatgaattaccattaattctgatgttttcattcctcctttcatgttcacaactcctcacccctaacaagcaaaaactatcctgaagtgtgggttaatcattcacttgcttttatctttagtttatatcattataaatactttggttttgctgggttttgagattcctgccaaaagaatcatgttacagattttatcttgcacccagactgccgagttttgataactggttctaccagttacgagctatgagttcttgagaaagttaagaagtctcagtacctgttttgtcatctgcaaaattaaaataataatagtgtgtactttgtagtattcttgtgagaattaaatgagctaatttgtataagacatttaaaacagcatctagaacataatgtgagctatgtaaatcttagttctgattgttctatagtctgttttatgactgccccaatgtacattccaaagataatccatgctattgtggatagccatatttatttccattttatggaaatataatatttttatgtgcatataataccatttatttatacactctccagtcaatagacacttgagttgtttcctaaatattgctaatacaagtgctgttaagaacaatccagtttacatgtcctaaagcatagattcaggagtatctgtacagaaggtatattcctaggactgaaatttctgagactcagcgtatgcacacctctgattttactaggcgatgtcacaattaccaaagcagccaggtcattttatgctttctacccacaagtgtgcctatgtgacccagttacttcatgactttggacaaagtcatgccagtccttccatactggcagttttaatttttacgaaaccagtgggtgattttaatctgtattttttgactatagtatagctttaatctgtattttgttgactatggtgtagctaagcatcctttcagatatttattagccattaagcttttctcgtctgcacacaatgcttgtcaaatcttttgccaggcaaaagatttttttttttttttttttttggtcaggcatttgtcgttttcatattgatttgtatgcattatttatttattctgcacacttttctcattttgtgacttgagttgttattctcttttgatatttccttttggtgaccgtaatttcaggtcaatgagtcatagcgaacttttccttatgattcattcattttgtgtattgtttaaagaaacttaacatgagatcatagcttcctacgttgaattccaaacatcacaaaatctgcctttcacttttaaatctttaatagcctgcaattgattaatttgtgtatagtgtggaggagtttggggatcttttctttctctctttttctttttcgcatggataaacaatttacccggctctatatattaaaaatgctatcggccgggcgcagtggctcacgcctgtaatcccagcactttgggaggccaaagcgggcagatcacgaggtcaggagatcgagatcatcctggctaacacggtgaaaccccatctctactaaaaatacaaaaaactagctgggcgtggtggtgggtgcctgtagtccgagctactcaggaggctgaggcaggagaatggcgtgaacccgggaggctgagcttgcagtgagccgagatcgcaccactgcactccagcctgggcaacagggcaagactctgtctcaaaaaaaaaaaaaaaaaaaaaaaaaaaaaatgctatctatccctcctccactcatctgcaatgccagctctgtcgtaaaccaagttttattaggtagatcttttct

SEQ ID NO: 10312 - DNA, 6000 bp, Homo sapiens
atggtcacagaaaagagtcaaagggagcagagagagaaagaaagagagctatatagagagccggcctctgctgagggttggttttgctttagaaactggaatgtgtccaggcttgatttttattttcaattcacatttcagatccagctccccaaactctttgatctttctccctgtctccttacccggaagagaacccttggccttctcagctgggagctgggagcacacgtggaaagactggctcagatccatattcttgccaaatttagtcacacaaaggggcctgcgagggaaaaaagaaaggatgaaagcggcagccgccgcgacttcaaaggccgcgccgccgcgcggggccgtgcgcaggcgcctccctcagccgatataaggcacggctcgagcgcgcgagcggcctttccgcgcgcgtccccgacccggggggcgggccgagggacgcggagggccggtgggaaggagggcgaagggttggataccgcggccgtgctacccgccggcttttcgaggccggtccccatgccaagttcaggcgcctgagaaaagtttttcagaaaggagggacaagaatgtcacgtcctgcccacgaaatgagcagtcctgtggcccgcaaaatgactccagctcccacctccattctagctccgttctaggcattccccgtgcgtgggagcctgggttcccgtcacggagcgcagccgagcgaggagggcgcgtggccgggccctgtctggctccttcggctcccctgtgcccgccttgcgttcctggttcccgtgcgctctcctaccggcgcgattcctctcccccttgggcagccttaggacgtgtgccctcgcctcccagctggcagaagggcggcctgcagagcggggtgggatgcgccccttccccgcgggccgcaggaggaggcggccctgtggacagccgcgccccggacccccacccagcgaggcagggacgcagggctcggcctgcactggcccagcgctgggaaagccgcaggagggcgcgaggggtggcggaccccgctcgctggagccccgcgtggctgcgccgagctacagacgccaacgggcgccggccccgcggaagtccgacgtccgcaggcggccggatttgggaacgactttttcacggtcccacgagttccctgataccccggagggtggggggttgagtttgtttgtctttaggaggcggcaagaagaaggggaagaacccctgggacacaaactgccatttccctcgccccccttctctccttttccgcgaagtccgttaaactgaagatgcccacagctttcgtctccgggtgaagccggggtgggaaatagagggggtcggggttccgcctctggagtcacattattcgttttctagcccttctccctggctcctgggtatcctcttccgtaggccccgccacctccttccttttggatcccaccaaagtcgtagctgggagagagtccaggccacacaaaggggaagacctggagcctgggcgggggttaggaccgagggggcggagaggactcgaggggcaccgtgcttttctctcgtccttgtaattaaggactcactggactgtctgtagccgactcgagttggcagcaaaatcgccggggggaggggttttctggtgtgagtgggggtcactaccctgtctctcctgcccgctcccgagcggggctgggctccgcttacccagtgagcagcgaggccgtctcttctcccccgctcctctgttcttgtgcggggtgggcgcctcgccccccacgcgcagttgaggcgacggcgcccgatgtagaaggaagtgttgatataaaacaagtttgttcccaaactaaacccaaaccaagcaaagccaccaggaggggaaaaaccaacagcaatccagccagcccctagcaattgttttcacggtcggaattaaatcacatcaaaacgccccctgaaacccacatcctgaaggagtgaacctacaacagccaacctccagtcgttcgctcgagttcacacgaacaacttgcctctaacatccgagtgaagggggcggcgggtgcctctcccgcaccgcacccaccacatcccggacctgggatcccactcgcacccgaagaggcggctgcttatgttaatatcagcccccacacgaattagaaaagaccgcccggtgacagaattgcttatgccaggaactacactgaatccgtaagggagggggaagaacgtcttcccggggttacttcgcccctcctgcgtcctcctgctgtttccaaaagacagacttcatgtgcaaatgtcaacctctctcccaaacgaagctttagaaatttggggcgcatggtttttactaaagccccttctaagtgctgctcatcagaagatttacaacaatcctaaagacaatcagctaacacaagttacaccactgtaaggaaaacagccacgcaaatagagcaaggtgctgggtgatttcgttagaaacaatgttttcaatggacggggtctcagtaaaataccaaacgcagccccctacccttggcccttcaagtaaacagtttcccctagttattgttctaaaaattcccatcttcttgagcttctaatcttcaggaaacctggagcataggctccaaattactcggggaatccagagttaacatgaaggagaaagtgggatctgaattagtttcagcacttaaacagcgggggggatgtaagagtcatcatttaatctctcttcggcttccagaaagtaccccctggccattctgtgttctcccctccccctcctgagggtttgatgaaaaggaacctctactctgctttggtgaaactgcattttccacttgttttcctattggtcaaattggtgcagttatgggaggacttttgactgttttcccatgtgtcttttaagaatggggctataaatgtctgacacagctacacgttcacctctctgggacactactcacactggtgcctaactttaagggaagtgacataccaccatcatccaaaaacaaaaattgggtttctcacacactgtagcagaatatactctttttcttctcttgaggcatagcattgtcagctattaaaaatggatttaatgttttaattttcctggattccttcaccaaccccttaatttcaccccaatcttccagatagaatttacatgtgactactggccatgttgtagggaccaattggatcctttgtaaagttttaaaaattgcttcctagtaaattcttattcccaagaagtagtcgttattagtaggtgaagtcattagtgctcacttagatacagcattgtaaaaatctttacccattcaatgttcagcagcctgaaatttcacctttaggaaaaaaagagggatctttgccagacaattcctatataatggagcaaaatctgattctgtagtgttttgcttgttttcgatttaagggagatgaagatacatttctttatgtcctttgtttactgttctgaagttttacagatggttactgtattggatataataattttgcctagatttttaactgagggggtttgagaaccaagggacaaaatgtaatgtgttttcaaacttcagcttcccttctgctgtaactttcacaaagtatctcctgaaaactcctgtctttgtacaaaattcatcaaagagacagtggagactggggaatttttgaggttgtattcggattggtgtcttcaagggtccctttcagttcgcagtccaaggtgccagggactaccccgtcctccctccctcttctggctttgctctcctgagtccttttgccttctcttcccccttcttggattatcttttcattctcgatgaggttcccacacactgcggtgtgtgtctctgaaaacccactggagacctagcacaactctccgtacatcccgtggtgagaacagaatgaaagatatattgtttaaaaagcaataattaaaatctagtcttcagttccttcttcctcgtcatattttttctccgtaagcctagagattttattttcactagtgtgttcccttgtctccaaagagcgtgtgtgtgatattatattcgggaaagctacaactctcttttccttgtccttctgttctctcttaatagttgagcaatgtctgttatattttccccttttcctttttttctcagtcccagattcccgcctctccccactgtcagagcatctatcaatgtggtgtccatcacagcggcagcggctttctctttcatcttcctccctctgccagagccagggagggagagtgggaggcgtcaaggaggtaggggagagactggcagaggaaaaggagtgggtgggtgggggccaagtaaatagatacttagatgatgaagtcaagccactgcggcaatgtttcttgtcagtttcacgcgggcaaagcgtgcctttcggtgggttataagcagcgcccggtccttccttctctcgccaagttgcctgatccttccctccaggcgcgcgcgcacacaccacactcacacaccccaaaaccaagactcgtcctacaggatctgggaaaagaaaaagaaaaaaaagccctcaatcaccacctccttctcgccgactccccctcaccccccgcctcccctccagcgggcagccaaggagagctagaggcgggggaggggagagggaggagaagcgacgcaagtgggtagcttttcagcgccggcgaggcgcgggaggaggagaagcagtggggaggcgcagccgctcacctgcggggcagggcgcggaggagggacccgggctgcgcgctctcgggccgaggaaccaggacgcgcccggagcctcgcacgcggccaagctcggggcgtcccctcccctcggccgggcgaactcaaggggcgcagctctttgctttgacagagctggccggcggaggcgtgcagagcggcgagccggcgagccaggctgagaaactcgagccgggaacaaagaggggtcggactgagtgtgtgtgtcggctcgagctccgggcagaggcatttgggcccgaggcccccgctgtgactccccgagactccgcagtgccctccactgcggagtccccgcgcttgccggcaaaaactttattcttggcaaacttctctttctcttcccctcctcctcggcccccatcttctgctcctcctccttctctagcagattaaatgagcctcgagaagaaaaaccgaagcgaaagggaagaaaataagaagatctaaaacggacatctccagcgtgggtggctcctttttctttttctttttttcccacccttcaggaagtggacgtttcgttatcttctgatccttgcaccttcttttggggcaaacggggcccttctgcccagatcccctctcttttctcggaaaacaaactactaagtcggcatccggggtaactacagtggagagggtttccgcggagacgcgccgccggaccctcctctgcactttggggaggcgtgctccctccagaaccggcgttctccgcgcgcaaatcccggcgacgcggggtcgcggggtggccgccggggcagcctcgtctagcgcgcgccgcgcagacgcccccggagtcgccagctaccgcagccctcgccgcccagtgcccttcggcctcgggggcgggcgcctgcgtcggtctccgcgaagcgggaaagcgcggcggccgccgggattcgggcgccgcggcagctgctccggctgccggccggcggccccgcgctcgcccgccccgcttccgcccgctgtcctgctgcacgaacccttccaactctcctttcctcccccacccttgagttacccctctgtctttcctgctgttgcgcgggtgctcccacagcggagcggagattacagagccgccgggatgccccaactctccggaggaggtggcggcggcgggggggacccggaactctgcgccacggac

SEQ ID NO: 10313 - DNA, 6000 bp, Homo sapiens
gagtacaatggatctcagctcactgcagcctccacctcccgggctcaagtgattctcctgcctcagcatcccaagtagctgggattacaggtgcccaccaccacacccggctaatttttgtagttttagtagagacagggtttcaccatgttggccaggctggtctcaaactcccgacctcaggttttctgcccgcctctgcctcccaaaatgctgggattgcaggcatgagccaccgggcctgtgcttttctttttttctttttgagacagtttcgctattgttgtctaggctggagtgcaatggcgtgacctcggctcactgccccctccacctcctgggttcaagtgattctcctgcttcagcctcccaagtagttgggactacagccacgcgccaccacacccagctaatttttgtagttttagtagagacagggtttcaccatgttggtcaggctggtctcgaactcctgacctcgagtgatccgcccatctcggcctcccaaagtgctgagattccaggtgtgagccaccgcgcccagcctgtggtgttgttcttatactgaagactcatctggaagctgtttttctctcattaaaagcggggacagtcagaattgttaccagtgaggaaacactctggcgaccctgttcttatgcaccccagtagttgtgtgtgtatcacctgctgcttgccagcagcccctgggctcagtgctcaggacaggcctcagtttggtaccatccacaggcaagctgggtatgactcacaagagaccataaagactcagtacgcgcactgtcatggctggggcactgggagtgtcataccctttccaggtgtccacacctaattagtgggtcatcttggcagagggtgggggcatgttggagctgtagaaagctggggtcatttctagccacagaagaatttgcttttgctcccagctaaacccaaggctttccccaagggccagcactgttaccagagcctccttttctagatttcatgcggacagtacattgtgccggccctggtaagtttggtcctgatggtgaggttgactgattgtccccagatttcccttttcaccgtctgcagtctcctctaagaggaaaggggagcacgtttcagtggctccacgtatgtggattatattctcatcctcaaatcaaagacctttatactcagtcctgcattcttcctgcatggccgtttgtgtatgtcaggatgccatttgggaaacaaaatccactctaattattcctaagcttagtggattttaacatggaaggagaagcctaaatcagcagtgtctgggctgggtctccaggaataactcttgacctcgaagcattgacccacctagggagctgctgtgtctgctccatgaagaaggtctggaggcggcatccaccccctgcactcatatctttgggttcgtgtagacagtactgcagaccctttctagggaggagaggcctgggctcaagacatagcagcctctgccagaagtgtttcttcaggatgcagctgtgcctgccagtgccaacaccctcagcagctcaaatcggcctccatcccctgccctgccagtagcatgagtgtgtctgtttgagggaactcggttcacgtctaggatcctggctgcacgggagtcagagtagaggattagagcttcttgtcactgtagggcaggatgtcctgcccaggggacaggcagggtgaggtgagcagtagggctttggtggtgagaactttcctgaaacagcccctcctacgtgctcagcaagagggaaagggcgttccactggcccccctagatgggtaagagcacttggccagaaggtgggaggaaccacgtttgaaactgttggagcagaaattgtctagatgtaagttctgagctggcaggtgagaggcttgtcaggttcttaggcccccaggacagagaattggattgtgttcaatccttggtgtgtgtcacacgcattggtcatgcatagcctgcttttctctgttagttacttgtaacaacctactgagcaatgcaaatcctcctccacatgaaggctccaccttggcagtggcctacattggtcgcgtcagcttgagagagcatcatgcccctagtgctgtctaaatgttcactgcctcacgtaaccctcacaacagcacagtcagatgtgggctctggtgactctgcttcagaagagaaagctgcagcccccagatagtaagtaaggtccccaggtcttgcagtcagcacatggtgtggctgtggcagcccccagatagtaaggaaggtccccaggtcttgcagtcagcacatggtgtggctgtggcagcccccagatagtaaggaaggtccccaggtcttgcagtcagcacatggtgtggctgtggcagcccccagatagtaaggaaggtccccaggtcttgcagtcagcacatggtgtggctgtggcagcccccagatagtaaggaaggtccccaggtcttgcagtcagcacatggtgtggctgtggcagcccccagatagtaaggaaggtccccaggtcttgcagtcagcacatggtgtggctgtggcagcccccagatagtaaggaaggtccccaggtcttgcagtcagcacatggtgtggctgtggcagcccccagatagtaaggaaggtccccaggtcttgcagtcagcacatggtgtggctgtggctgtgttcacgctccaggagactccactaaacacccagcagggagagacacagcacatcagctgggaggtggagtgacttgggaagtgggcttgactgactgggagaggtgcacagatcctctgtgggtgggaggagggtggggcctctgctgctcaccagagggttccacagagggtgtcacacgtcagaaaaaagaaatggcttcgtttatcacttatatcaaactgattgcttctttctcttttgtttttctccttctgtttacaagattgttgacggtgagtggtttcgtttcctttttcactgggtttggagaggaaactggcataggtgagagccgcggtgctgcaggtcttgccagaccatccccaagggcttggagcgctccaagcaggaagatgccttcgcagatgctgtggtcagacccacacagccagtcccccttgtgcctgctgaagaaacttcaccactatcattgagcactgagctatagtcctttcttgtggcctaccagattttggagaaggctggtagctcacagcaggggttggggggtttctcctgggaagataagatagtggcctccagagctgggcagaaccttctgggttatagctgagcatggcagcagtttgtctctgggggtcccaggcagggaaggaagagggtcttaagaggcgtcaggatgggagtggtgaggatggtaagagtagagagcctccaacctgaaaatgtgacctcttaccttagaaagaagaagaccaaggaggaatgctaggaggctgccccaggaccatgctgacagctgtgtggtgagcagtgacgatgaggagttgtccagggacagagacgtatatgtgactacccatactcccagaaacgccagggatgagggcgctacaggcctcaggtaccaacgtgcccccagctctgctgccgccatgctaggatgtggggccagggcatgggaatacttttcagcaaatctgtgagcccttggccctggaagggcttgcccaagcctctacccagcatctggatacagttggaactgggtccagaactgagtccagctattcccactgtaaccagaggatgccaagcgctgacacagtgtgtgcagacagtcccagtggccccagacagggatcctggggctggtaggggcctgggggagggcagggtgactcaggttgtgtgcaccttctcatgttcaccctcccacatgcccttggggcagttggctttcctgaaagtctctcggatgcccgcgctaaggcagagtcaggaggccagggacgggactcttgtaggggataggggccactcacgtgacagggtataataaaatgtttgcgttgactgagaaactaacgtgaagcactgtgctcttaggccctcaggtactgtcagttgtcccatctgcatggacggatactcagaggtaagtaaaccaagctgtatcttccaggcttctggtttctaaacttcactgaaagaattggatgagacaggatcttccccctcggtgggattggacacccctactcacagtcatgcctgggccgtcacttattgcagatctgcctgtgaggggagaatgtgccagtttctccttggaccctacaactttcaccttcagcccctatactcctgtatgccctgagcttccgggtgcaaatgcgtcctccttttttgtgccccatcctggctctaactgaaagctgctagtgtttactggggtccctcataaccctcttgggctgtcacactgttgagatgccatggcccctgcctcctgctctccagctgagagagaccacagcagacacagttagctctccagacccctccctgttgtagcctggcccttgctttcctttaattagtcatcttaggcataggtgggtgggattctctggccccatggctgctctgggacaagggcaaactcggaggctcttctttttaatgccttctagatcgtgcagaatggacgtctcatcgtttccacagaatgcggccatgtcttctgtagccagtgcctccgtgattccctgaagaatgctaatacttgcccaacttgtaggaaaaagatcaaccacaaacggtaccaccccatttatatatgaagtattcagagccccccaggagagacggatggacagacagacagccaggttctccagtggtatctgcctccattttcctgagatcaaaaagactgtttcgaaaccaacatctgatatgtaaactgctcttttgtttccaaccccttccttttgttatctccagtttgatgctatggcgctggacccagggccctcccaggccatctctgttcctctggggtggtccagttctagagtgggagaaagggagtcaggcgcattgggaatcgtggttccagtctggttgcagaatctgcacatttgccaagaaattttccctgtttggaaagtttgccccagctttcccgggcacaccaccttttgtcccaagtgtctgccggtcgaccaatctgcctgccacacattgaccaagccagacccggttcacccagctcgaggatcccaggttgaagagtggccccttgaggccctggaaagaccaatcactggacttcttcccttgagagtcagaggtcacccgtgattctgcctgcaccttatcattgatctgcagtgatttctgcaaatcaagagaaactctgcagggcactcccctgtttcctaagaacgaaaaagtgcaataaaggccattcgttacctacttttcagcagcccacaagatgtagcactattagtgtccccctcagaggcttaatgttgcctgtggagcagtgcccatcccagcccgtttctgcccaccagttgttctcaggaaccttacccatgctccagcgtccttcacctggcacaggacatgcaagataaatagggcaggcacgtgtttgggtgtcctctcttttctgataaaatccatcccgtgtttgccacacgccctccagtcctcagttcccactgcctaacgtctgcccccgtgtagatactgagaggtggtggcagtaattgtggccttatcagccgctcagttccaggcttttgcccaggtcactgttgccccatgttcggagaacctggcccacctgtcttggctttctcatccttcccaacccagtgccgtttatttcagaagcttcctggccactgggcttggatgcttcgggcttctgactgctccataggttttgactggtgaaacaggggcccagatgacaacct

SEQ ID NO: 10314 - DNA, 6000 bp, Homo sapiens
ccaaacaacactatattttcttccatagcatttatcaactgtattgccaaaatgatggggttaattatctgcaaaagcttttctctaggaaagaggagtgtgggaacaggtctggctttcccctactgtatcctgggtcctcagggactggcatataataggcatcccataaatattcgttgtatgaataaaatttaagatactaacatataataactttttccagcgtgccttttaaggcataaagatataaaatatgatttaacaaataatctaaacatgacatataaaaataaggcaaatttcctttctaaaatatatacatggagacatatctatcttcaatttctcttcaaccctgatttaatttctagaaatacaagcctaaaacaactcagtagaagataggaaaaacacttaaagattttttacataggaatgagataactgaatgccttatttgaaataaagaaaaaaatttgtggaaattcccaaagctaaataatacaagatatattacaattttccatttacaaagaactttataacaagagtgtaggaaatggtaaatttgctaaagccaatagttaactactcaacaatactagtcttactaatgctaattatacttttggctcaatgtagctacatgctgcctatgggagaagaggaaaacaaatttgatggtttattttcatttggaagatttgtggcatgatttatattcacatacttaaaaagaagtgctttggtttattagctgccataaaaattacgcttgtttatgtttcagaaagaacattaagaaatacagcaacaaacagcaaaaatcctacaatatctaatatgtgcctgatatttaaaactaccatttcttttttcctttttttcgagacagactctcactcagtcacccaggctggagtgcagtggccctatgtcagctctctgaaacctccctgtcccgggtccaagtgattcttgtgcctcagcctcctgagtagctgggactacaggcacgcgccaccacacccagctaatttttgtgtttttagaagagactgggttttcaccacgttggccaggatggtcgcgacctcctggcctcaggtgacctgctcatctagacctcccaaagtgctgggattacaagtgcaagccatcacgcccaaccaacactaccattttcctttttatttatttatttatttttcagagacagtctcgctctgtctcccaagttgaagtgcagtggcacgatctcggctcactgcaacctccacctcctgggttcaagcgattctcctgcctcagcctcccgagtagctgggactacaggcgcgtgccaccacacccggctaatttttgtgtttttagtagagactgggtttcaccacgttggccagggtggtctcaaactcctggcctcaagtgacctgctcacctagacctcccacagtgctgggaatacaagcgcgagccatcgcgcccgactaaccgaccaacactaccatttcttttcttttcttttcttttcttttcttttcttttcttttcttttctttttttttttttagagacacaatctcgctttgtcgcccaagctgaagtgcagtagcgcgatctcggctcgctgcaacctccgcctcccgggtcaagcgattctcctgcctcagcctcccgagtagctgggactacaggcgcacgccgccacggctaattttttgtattttagtagagacgggttttcactgagttgcccagtctggtctcaaactcctgagctcaggcaatccacccacctaggcctcccaaagtgctaggattacaggcgtgagccaccgcacctggccaacactaccatttctatttctcattaaacttctgcaaaatcggtgttgcaattcccatttcacatatcgggaaactgagactcagagacattgtgtaatttacccaaggtcacgactactcagttgatgacctgaaaagtgcatccagatctgcaagaagttccgcccttgtgatactgttaagtgcctgccaaaagatgacggtctctaaaccccagtgggaaccaggctttttcagatttttcttttttgagactgagtctcaatctgtagttttgttgactctttatttgcttactaccctatgccactacctccatatatgcagggatctttgtcttgtcaccactccagcacctaatttcttattacaatcatctaacattttcaaactcagaggagcttcagaatatgaatgttgtgttaataagaaaatgactgaagttatgtctttccagaaatgctcatttatgtcgtcatatttttagcacttttatctgattatattatctgctgaaattggctttggggctttttcacaaataaattggagaagatgtttattacagaatcatgttaaactcaggaccagtataataattgtgaaacacacaaggaagtaggcaaatagaactagggtacccagtaaatttccttccttccttctttctctctctctctctttttttttttttttttttttgacggagttttgctcttgttgcccaggctggagcgcagtgtcgcgatctcggctcaccgcaatctccgcctcccgggttcaagctattttcctgtctcagcctcccgagtagctgggattataggcgcgcgccactacgcccggctaatttttgtatttttagtagagattgggtttctccatgttggtcaggctggtcttgaactcccgacctcagttgatccgcccgcctcggcctcccaaagtgctgggattacaggcgtgagccaccgcgcccggccaagtgtccctcttctagtccagcatccgaacagtagatttcaaacaaatacaaagttaagtggaataggcaacaaatggaaggggtgtgagacttcaaaatgtctcagagataggacccaaccaaatccttggcctcgccaagcgcccccatcactctggcagaacagctccagagaccagccctggccagccctgggtccccatctgtcctcccctccaagctggtagctcccgcgccctcttggtctgtcctttaatctcgcgcggcggggaccggcaggatggtggtctccccgcggttttgcctttcaggctctcaagtaaagaaaaccctcgaaactcctgatctcgagcacagcacaagctccgagctggcaccgggctgagtcaagatggcaagccccggactgaacattcgaatgtccctcagtcttccccgcgcccaagccccggtgcctctgccctagccgaggcctctgcggtcttcccgggcgaggagccgattgggggccgccggacggcggaggaccctgctcctgcttcccgaactacagatcccagggtgcctctcggactcgcgctccctccctcccttgctccctcccttcgtccgtctcctcccccggcccttgttgttttggctggaagcactccggcggagtttcagagaaagtctgggcagaaaccggagccgggcctgaacgtgggaaggggaggaggagagggaggaagaaggagcccggcggccgggagagggagggagggatcgggatctggggccgagccgctcaggacctgccgcgagccccggggtgggggaggcggcgggggaggagcgcgaggggacgggacagcgggatccctcccaggagccaagccgccaagcgcctcgttcctctgctgctccccgccctcttcggcggccgcgagagcggacccaccctccggcttgacctgcgacctccctgcgcccgccgctcagaaacgccccgcgcttcgctgccaaccctgcggctccctctgtgacccgggaccagccccgcgcccgctgcccgtaggcggctcgcggcttcccctttcctcggcgttcaccgagcgccgcgaagtgacccaccctcccccgaggagagggaaggaggatcgctccgggcgcatcgaaaccgagggcgggtgggcgggcgagcgggcaccgcgcggggcattgtgtgtgtgtgtgtgtgtgtgtgtgtgtgtgagcagcgctgtgtctgtttcggaaagcgctctggggaggtcttgtccctagggggcggagcgcaaaggacagaagctccggcaccgagtcggggcagagtcccgctgagtccgagcgctgctgaggcagctggcgagacggcacgtctggaggcgaggcgggcgcactgaaaggaggccggcgcgcccgcggccccggctcgcgttctgttcaggttcgtgggcctgcagaggagagactcgaactcgtggaacccgcgcaccgtggagtctgtccgcccagtccgtccggggtgcgcgaccaggagagctaggttctcgccactgcgcgctcggcaggcgtcggctgtgtcgggagcgcgcccgccgcccctcagctgcccggcccggagcccgagacgcgcgcaccatgagcggtggtgaagtggtctgctccggatggctccgcaagtcccccccggagaaaaagttgaagcgttatgtaagtagagctgcgggcaccactccgcgggcctcggcgtccacacccctccccagtcggctcgccggcggctgcagctggccgcgcgcggggctggttcttaaacgaatgccggtctctttccccttggcccctacccctggcgggctcgggacagggtgccttgcactccctcacgcccaggcatccacttggccggacaactttcttcctccaggttccagacagcctgctttgcgggcctgttcgccccataaaaggacctagacgtccagctaaactcctgctgcatgctttttttcttccttaggaaggatggggtgcgatggagagaggagccttcttcctgctttattcctgcatctgattattgggctgatgtgtgctaaagctcccgcaccgggaaaactgccgaggttttagggctcactagccctttctttggtgggcgctccctctcctccgcccctcgagatgggttgcgggaagcgggctgtggagctgaggagttggtagtagagacaagcatatcgaacgcgcgcaaaagggaaagaaagaaaagttattacgcgccctgccgtttgcttagcagggttcacattttcgcggttttgaattgagggactttggagtttggcccgggagccttggcggtttgctgcgagaggagggcgctgggggggagcctagtggctggtgtttgggcgccttggatgtgctgtcaaactcggcaggaggggacagctgaagccagaagggatttcagttgcggtcctttcccagggaaccagagtggctttaatggtgtttgtgtaattgatacaagatgctatgtgttaaaccgttttagctgttaggaaaaatattccttgaaagtatcaaccttgctttagtggaaacctgtgtcctcttcagaggtctgggatcttattcttcctccccattggttgttttgttgctgctcccttgcaaaggaaagaaatgacacttttgtgctgacatctggatcaaatatttttctagtaaaatgtgtttgcaaaagcaaaatttatgcccccttaaatataatataaatttaatgcctgtacgaagggaacccgtttgtcgttgaggaatatctacacccagtattagagctcaggttaatcctgttagtcactgtttgcttgtatagaacagagtgaagtacacagagtgaagtatttaacttcactgacaactcaccagtgaatttctgatttactttctgccagaatttattatagacaagtaattttattgaaagactcgatgccacaaatcataagaaagctctccagagatgtgtaatgcctccaaatcctgtccatctatcagttttcctgaatatcctagtaaaaatgctaactttattccaaaaatatgaacgaggcagtgtttttttttccagctgttctaaagagaaaggt

SEQ ID NO: 10315 - DNA, 6000 bp, Homo sapiens
gcctcactagcagagttagcatccatgtttctactaacaatgtgttcaaggcaatctaggtttttattttattttattttttattattatactttaagttctaggatacatgtacacaacgtgcagatttgttacatatgtatatatgtgccatgttggtgtgctgcacccattaactcatcatttacattaggtatatctcctaatgctatccctcccccatccccccaccctgcaatctaggtttttaaaatgctggctacacacaattcttccagcctttgccattgtccaataccaaagacactttgacatttagtttcctattactattgtaacaaattacccccgaacttagtgcttaatacaacacacgtttattatcttacatctgtggaagtctgaagtttgaaatgagtctcattagactaaaacctaggtgatggcagggctactttctgtcccagagactctaagggaggataattttctagccttattcatcttctagaggctgcacatattccttggctaagccccttctattttcttttcttttctactttttttttgttttgagacggagtctcgctcttctcgcccaggctggagtgcaatggcgtgatctcggctcactgcaacctccacctcccaggttcaagcaattctcctgccccagcctcccgagtagctgggattacaggcacctgccaccatgcccagctaattttttgtatttttagtagagacagggtttcaccatattggtcaggctggtctcgaactcctgacctcaagtgatccacccgcatccgcctcccaaagtgctgggattacaggtgtcagccactgcacccagccccctttctattttcaaagccagcaattgcttatcaattctttctaacatagcatcactccgactctgactgactctattgctttaatctttcttttacaaggacccttttgattgcatttggttcacccacctaatctggaataatattcccatctcaagactagctgattagtaaccctaattctatctgcatccttacttctctcttgccatgtaaaattgcatattcacaggttctaaggattagcaggtagacatctttggagtgccattattctacctaccactgtatttactgctcacaaacaccaactccttggcaaaaatatagtggacagcatttctgttaccatcagaatctcttccagtccaggctgctttgtgaatgtctataccaggactagaaatgcgtggacgccaacctaataagatctagtttttctaactaaagctttacattcatacaaaagagacattttggagtctttgcatcatcttactgcaagttaccagtgtaaactttaaccaggtacattaaaacaaattgaaaatgaataatactaagaaaaggaggaaataaggagccagaagtttatcttatttttcttatatttgagaggttatcctaatttggtaaaccatacaatccatagtttgttcgtttgctaaaaataaaacaaagctctgaccctgacatatatgtaacacttctctcatttctacccttttactgttctctatctcgttcttaattccccttggtttatggattttttatggtccacaaagtcagtagagatgaaaccattagtcccattactttatttgaactgacatggcaatagtaacccagaaaaataaagatgcaggttctaaaaatccctgaatttagaaagattcatacgatgtgttttgaggcttatcatacttaatgccttgatagtagaccagtgcttttcaaactttaatgtgcataggaatcacttgaggattctgtttaatggatagtctgattcagttggtttagagaggggcctgaacttctgtatttccaacaagattgtaggttatgggatactgctaatatagaaaccatactctgagtagcaaggatttagatactatctctagttgccattgtcctttcatttgcaagtgtgaaagtaatgtacatttaaatgctttcatgctgttgtcaattgtgggttgtaggtacaagaaaaacaaagcatcttgagaggaaataaaaatttcttgagcttttctgccagcatcaacatggctaaggagattgctttacactgagtaattttccttgttaacatttttattaagttgtcatgacaactttcttattctccataaagtggaggaaagtaggttttaacccataagtcaactataagaaagaagattggacctggaagatgatgaaatattcaggtattcatttatccactcagcaggcattttagtgaatcccgttatgaaccattttcattactaggaaattaggctgtgaagattagtatttccctaacaacaaggaactcttgttacttttttagagcatatcaaacatccagattacagaatgtcttttgcagtcaccttttggtggttctagccacccttatgtttagattggttgcttcctcttcttacccattgtctgacagtcagaaaggatagaggaggaagaagacaagacactatccagttgagagtctactcttagtaaaactcggtagctcctggcagaatgtactggggtcaaatgcaatactaatcaaggagtttggtgtgccataaaacttgagaatggtaaaagtagaaattaatgggttaaacaagtcattttccagaatgaaaggaatattggtaatggtatcaacagacgaggacaacagcaacaacaaagtctttatacaagcctgcaacacgtgacaactgcggatcaggcatctgaacccggcctatctttccaccgtatcttcctacacttttctttatgtactttttatttctaccagatggtattactccttgtttcttgaataacagtgtcatgcctttccaacctctgtatgtttgctcacaagtttccctctgtcagagaaaagcaaaaacaacaaaaaagtcctctattttatctttttccaaacataaccaatccttcaagtcctatctctagtactgttcctttatgaaccctgtcagacaatatctcattttcttctgaatgttcatagcatttacttaaaaatagtatgacttccctcttctttttactaatgaattactgtgtattttttaagtttccttctacatctgaagttctaaatattcttagtacaaatgtcctactgatctaagagagtatcatgggttaaatgtagaggaagagaagtttctgagatggcaggaaggcaaaagtttctgtgactacctgtgcttatattgctgactttcttaactgttcctgacttatttaaatgtatttttttcctgattctgattaatgttcactatgaggcaagcacagtaggcaagactgggagaaagtttgcaaatgtgatgagcttacaaatgggaccagattagatggtgtacttgggggagatataaaagaggaagataaccatgaattgaactgaattgaaaatggatcacataaagatcatgattaattgttaattcacaatggaacagcatgatgggatttttttaagtcagaaaggtgactaaaagcataatatcacaacacacacaacggtaacaaatataactaaatgcactgaaccaggcagaagccagaccttactgaaaagatgtaaaatctctgtaaccataaaactgcatctgcaaatgagtagattggcttcaaatctgaaaaccaggacaagagagtcatcagcgcagatgtcaacttccccagcagaaatgttggagtttttaactgtggaaaactacagtttttccacaccagtgcatagtggagaagacatgtttttgtttttctttttaagtgtgccaaattttcctggagtcccctccaatttttttctttctctctctctctctctttttttttttttgtcccctgcccctaggtctctgtctccacacagtgatttctgttatggcgattgggcggctgcagagaccaggactcagttcccctgccctagtctgagcctagtgggtgggactcagctcagagtcagttttccagaagcaggtttcagtgcagagttttcctacacttttcctgcgctagagcagcgagcagcctggaacagacccaggcggaggacacctgtgggggagggagcgcctggaggagcttagagaccccagccgggcgtgatctcaccatggtgcgttttggctgctactttctttttcagtctttcggtgcggagaaggggaggaggcgggcagaggtctgaaaaaatcgaatgccttatggaaaggaactgcaagggttcctttggggtgatcaaagagggagacacagacacagagagacaaaggcaaggaggactgtctgggagccacgcgggcgatacagtttccgaggcacgccgcgtcccgcctagcctgttgaacaggtagacatgagcgacccaagcgtaagtgccgctgccgcgagtgcccagggtgcactcgcgcggggaccgacaggtgccactgcagggtcccctctcccgctcactgcctgccacccctgacgcctgctctctttctccattcgcagtgcggatttgcgaggcgcgccctggagctgctagagatccggaagcacagccccgaggtgtgcgaagccaccaagtaagtggtcgctgcatccccacgcgggtcggggttcttcagacaggcggtccctcttccgggacccccgcttgggctgggtctccttcctctcctgagaaaccttcggtacgctcccagttgcccagccctgggaagccagcatcgggttcccacgctggggaggagcgagaggaaaggagaggacgcccgaggggccggcccagggcccgggggacccgcggcgcccgagggaggagcacagacgggggtgggcgccgagcagcgccgcgccggctgctgagctcgcggggccgggccgtgagaacgcgcggggcgcgccggggccgctggtctcccacggccagggcgcctgggccccagagcccatcagccgcgtgcagcgctgcggcctccggcgcgccggcaggcaagcgagcgggcgcagctgggggatgcctggaccccggaggcagcagggctggaggcggtggcgggcttcagggcaacttcacccggccggctgcggcgtgggtaagaggcgcgtcctcctccacagcaaaagctgcgatcgctgggctgcccagagaaggcagccggctaactgcccagcggctccacgaggtgtgcgcgtgtgtgcgagagagacaaatgatttactgcttagcagtcccatttctgttttcgttaggactgcggctcttggagaaagcgtgagcagggggccaccgcggtctccgcgcctgtctgcaccctgtcgcctgagctgcctgacagtgacaatggtgtgaggggctgcgttgcaatgtggtcatgtgatttcaggctatggatttcgtgcgtctttctctgctcactgattttcacatggttattctttcattttgcactcgataaacagtttacatcttctgaagtaagccagaagattgtatggctcacttaacgatgactggttgaaggcatcttgatttggaacctatggaaacagtgctgagttttaaataggacagatttttttttctttcatttgaacttcatttataacatatcaatagtgatgttttaggatcagttctcctatggtaatttcactaaatgcctatttaatgaattgatttgatttcatacatctctaccacttactagaactgtctttgtacaaacgtcaaactttcctgttacatatgggtaagcatagaagcacttgatataatttttttttatcttggttcagagtgtagaagtggtctgttgcttttcctaaaattgctatacatattttttctttaagagtgatcatttcaggtaccctattatgtaca

SEQ ID NO: 10316 - DNA, 6000 bp, Homo sapiens
ccactgggttctagttatgtctatataagtacaaacagtcccatttcttttttcccgatccattctcccttatcttaataaaaagttgtgaacaaaccaaagagccataaagttatctttaccaataggatagatgaatttgttttcatgttcaaagtatgagttgtcctcggaggggtgccctttccctcctcccctactagtctgtcttcatgatcagataatgcatgaggctgagcctctttagaatacccacattttggttttttaaagtttctcacttttgttaaaataattactagttgttgatatggagacaaatgtgttttgtataaaatgttacacttaattacagagtccaaattcaaaatagtccaagattgttaaaagttgcttattcttaaaaatgaatggactaaaagctgatcttaagcattctactctcagaaacattttcccaaacataacattactatgaagcaatatcaggtaaaatctataattaatctgttatttccttagtcttgttcttgtttgataaatgtagttgggagcccttgcaaaggtagcaagtacaatagaagaaacaggccattcaggcaagattctgtgactctaaaaaatatagtaagagctaaatcaagtttttaaaaataacatcaaaggccaggcgcggtggctcatgcctgtaatcccagcactttgggaggccgaagaggcagatcacaagatcagaagttcgagaccagtctggcccacatagtgaaaccctgtctctatttaaaatacaaaaaattagctgggtgtgatggtgcacgcctgtaatcccaggtactcgggaggctgaggcaggagaatcgcgtgaacccgggaggcggaggttgcagtgagccgagatcacgccattgcactccagcccgggtaacactgcaggactccgtctcaaaacaacaacaacaaacatcaaaacaccagaagtgaatggaacaagatcctgatgctgacctgattatcagaacatctgttatagacaacattgatcactctgaggaaatacatagcaaaagcctccttgtagaaaatgtgccaatccagaagccaggaatcttctaggaaaatctcaagttttggtaattttcattaaaatattaagcaaaatgccggaagatatattaatattcctttgctgctacatggaaataaaataaatgaaaatatagattttgggctttaattcttaagttagaaaagcgtgattgaacaatgtcgatttgtggtagcagtaaaaagacatttacttggtttgctaatcatatctactttataaaatattatcatgttacctatgctgagcattttgagctagatagtgtgcaatacccgtcagtagttagatagatcaatcagtcgattgataaatagatagatctgtgatttggtttcactgccaatatcttctttctttagtgaatactgttggtttttagtgtctttcgttttagtgttttagtttttaaccacctatgtttcactattttcattgtgagaaaaatatgaaaaggaatgatttgaaggttactttcaccctttccacttttctccccaaatacttggcgaattgagcccaatgtttcatctcaaagtaaatttgcatgtttgaagccttaggcctctgagccaaagcctgtgaaggtaaagccagagatgcacggcctaaagcagagactctggcagatacagccagcgaagctggagggagttccttgagtgtcactcctgacgaaataaaagttcattgtgtatttattctctgcccctttcatcttatctcaaatccacagagcgctaagttttagtcaaggaagaatgaaataaaagtaatagaaggagaagacttgatcagaatcttcagtgttcagaggaggatggaatattctttttcaaacttggcagaaattctcatcagtgcttctactgatactagttttagcaattctgaggcttgttcaaagtgatggccaagatgtatccacacctcccacggttcgtgtgtaaaaccttcaaagttgcaaacattggaatattcagtgttttgcatcagtgccttaaatcttcatggatttcggcactgaaaagtgaaaactggtccacgtgtacgcatctttccgggcacctgtagttggaataaggcagacacacagagatgacagatctaatggatcatccttcttttgctgtctcctcagagtaaaggaagtgcgtatgtcttctcacagccaatcaactctccaagtctattctaccccacagtcccttccatggccggtaaacactacaggtggtaatatcagacatctgttttattctttctgctctttatgttgtgaaaggactcctaaatcataaaatcataaaatttaagaagcgtaacttaaaaatccatcagattaatcccattattgtggaaataaggaagcttcagagtcccacagttaatggcacagatcacacgtcctaactctcatctggtggcactctttagtcagtgtcccatcacagcctgcaagaaaaccctgctgcaggccacgtgatgtcattgctgcagccctaagggccctttgacatgggcgtaaacaagctgagaattcaaagaaaggtgaagctaaacagggaaatactgttagaaatattagaataggcaaagtgattttcactctttaaagtttgtgttccaggacaatgaattgttggtctatcaccctctcaaaaatgcaagagatgataatgctttgtattatccccagaaagatgactatggtcagtatattattaggttaaaaaaaataggttacaggccaggtgcagtgggtcatgcctataatcccagcactttgggaggccaaggcaggcggatcacttgaggtcaggagttcaagagcagcttggccaacatggtgaaaccccatctctacaaaaactacaaaaattagctgggtgtggtggcaggcgcctgttatcccagctacttgggaggctgaggcaggagaatcgcttgaacccaggaggtggaggttgcagtgagccgagatcacgccactgcactccagcttgggtgacagagtgagactttgtctcaaaaaaaaaaaaaaaaaaaaaagttataggctgagtgcggtggtcacgcctgggaggccgaggtgggaggatcacttgagatcaggagtttgagaccagcctggacaacatagcgagacgttgtcttgaacaaaaaaaaatgttttaaattagctgggtatgatggcacgtgcctgtagccctagttactcaggaggctgaggtgggaggatcacttgagcctgggaggtcaaaactgcagtaagccatgactgcaccactgcacttcagcctgggcaacagagtgagaccctgtctcaaaaaaaaaaaagttacaaaattgtatggaaacaattatctaagctattttaagtgtgtgtttaaatacacatccaaaagcctggaggactatattttaggcagctaacaatttatctctgggagtaaaatcacagggacattcaattttggtttattgtttaaagaacaatatttggtttttaatattttacagacatcgttattcatttaaaagtcaataaagatatttccgagagaggaatagactacctggctgaagacagtgaacctagcaatgctagtgttagatatcagtaatgacggcaggatacagttacagtactaaaccctttaaacaagtggtctactggctattcaaaactagttagcatttattggcagttactgagtgaccacgttaccgaaacagcctggcacaacagtaagttcagtaaatggtagatattaccattcattcattcattcattcatgcattcattttgttaacagcttattgtgtgtgaaagatttggtcccagtggccaaggagcacactctggaaggagaaagaagacagaaattgttgtgacatggtgtgccaacccagctactggaggattatacacagagccaggggtgtccttagctgatctggtgaaagaaaagttggtgatctggatttagggctaagcccacaatctgtcacaaattttgcatagaatattaattctggaacgaatgagtccagttcctctttgaaaacacttctacagaagttcctgtgtagatgagcgttaaaataagtgactcagggcctccagtagtttatgagctaagaggatcacaggataggatagggaccgggttcctcagatgttgctagatcaaatgctttactcttctcaccctaagggctcctgaatttagctttttattacacagaacccagtaaactaattaatggaaatctaaaaattatccttcctcttcttagaaaagaaatatactgcatgatgatttgtgcttttcgatttaatgtcacacaatcgtttttacactgtatgtgctttccctccccacagccccagtcccagccccagtctcgcagttccattccttcagggcagcttccattctaccgtgagtttttattgctttcccctaaaacgctgccctggagtcgcgtttattggacactctttagtctgtaaaggaaaaaaacacaaacaccggaggagaatcatcctaacaagccgacaacatatctatgggcctaaaaaacttaaattctttcccgttattagcacttctcgatcgttccaggaaagcccgatttgtagcttggctgccccaggaaggggcctgcgaccagaaagatgcaaagggcgggacaaggttacgagtgggtgcggggaagcctccctaacctgggggccgcgtcccagagctgcgagccacgcctcctctctcccgcccgccgcgccgccggactcttattttgaagggcggcgggtgaaggctcggagcctcctgagtcacccggcgggcgaggtataaagcccgatacctgccccgcgcccggtccgcggagcccgctgcagctcccgctcgctccggacgcggaatcgggcagcagcgggaggcggcccggagagccgaggtaggcgcggggaatcggccctgaggctggtggaagaaatgtgtgaattaaagggagtgcagcgtgcagggtgggccgcgagtcgggagtgcagggctcgggacagggtgggggcggggaggacaagagactcgtcagcgcactttccacccggccggttccttcccgagccctctccctcccccggcccgcgggagcacagatccctgaaagcggagctccagataggaatgtctgcatcatcttggcagggcccagacgggagaagatgctctgctgccacggacgatccctcccgctctcctaactcttctctgaacacctcgcacccccacggccccccgcccctctcttaatcttggccacgctccctgaggggtcagacctggggtgggagagcagagaaagcggggctggcagagacaggggtgagggccgggagaggcgatgacatcattccctggcagctggcggggagagggtggggacggaggggtccccccgacctgagccgagccctcccttcccaagcccatcctcctttctttgggatggttcaccccacctgggcgccattcaaaggaagtttgcgcgtaactcggggcgtcctttccccggccgggtgctgtgcccggcccgcagtcggtgtttcttctgggcctgggggcggcgtggagccggcggctcagtcccctcagtcccaggccttggcagccgctttgttcacgccgggcgcgggccgaacccgaacctcagctgcagcactggcagcgcgcaccggccacgcgtgggttcccggccacggccgggccaacaagggagggtcccgtgagcagccaggctggccctccccgggcctgggtgagctcccaaagctggagcgcagggctctaggccggccccgccccggggctgggggcttccc

SEQ ID NO: 10317 - DNA, 6000 bp, Homo sapiens
agcgactgctggcgtgctgtttatcttgcatggattgccagatcgctgcataggaggtggaggttgtggtggcccggagaggctcccatatgtgtcgtttctgggaatgctccagtctgaggtgacggcctacctgtgtcttccttctttttatgcttgtgttcagaaatccctgtgacacctgtcacagactaacaggaaatgtgtacaggattcacaaggtgatgacacttgactacagataatctcaggcttggtttcattgtcttaaatagcaatggcagcataatgacagtgtggttagactcagttatgcgtggactgcagtttttcacatcctggccattgttccaggatccctaggtgcattcatgggagccttttgatggcaagtgccggaaacaaatggtgctcacttaaggagaaaggggaaatgtgttttaaggatataggagcatcttgtggaatccaaggacagtagagcagttgggccaaaaagaaaactggaaattggaaagctgtccagacactttccctgctgcttccatctgtccctccctgaaaatcacttcctccttcccttcccagattgactctctcagttctctgagccttatgtttagagcactcaagctatatgttgttacaatatcatctcccaaagagacaataattctttcaaattctgtagaagcgactctggttagcccaacttgggtcaaacttccaccccaatctataatcagctgtggccagaggagaaggtcacattgtacaaaatggctgtcaggagctcactgctctaacagtgttggagttgggataatggagaggagagctggacagcagcccgacagatgtccgctatagctcactaggaagctgatagttggggtggttttatctagacagctctgtgttaataaagaaattgggttgggttcatgggtacagtgaaagcttttaagaatgggcagtatcccttccatcaattatcttttctctccttaatgatcagaagagctagaattgtgtttaagttgccttggggagcagaaatagagaaatagaccctcaggtagcaagactgatctgatgccattaaaaaataatagcagagggagaggagtatatgaggttcattaaaaccctcttgaaatgcttcatgtttagtattgttcatgaaaacttaccaaatggaattaagatcaatgcactagaatatagaataaaaaagaagtattttggataaattttgtttaatagaactgtttgttactgagttgtgaggaactgtgtggaaatgagcccttctggataatggagtttttcagagaagctatatggtttacatctttaagtgtcaaaacatgtaatttttcaaagcacttttggatgcaactctgtcttcttcagcagagtacattgaaattgatttgaatacgaatacctcatgccattattttacagtgaatattatatatgccacaaggagtatggtgatttgtataatactattctaaatgaccccaaataacatggaattttaagaaactgctttttaataattcttttgtggcttcctttgctgtttgggactataccctgtacccacaataatatgtttcttctgatctgtgtggatttaggaaccaggaaaatgaagcttaattgaataatatgtaaattaaaagtaaatggggtctgatttggggtatagagaaaggctaaaatgtgctattttaagaaaggctaaaatgtgctatttttgcacataaatttcatgacattactgtgataccttgagatagttttaacgtgtttttcctcagcagtgttcttcataaatgaagctaccatgttactgagagccagatgagtgggaaatcctgctgctcatagctgtctgtgacctttagcaaagtaactttattctttttgacagaatgaaagaaaaattaaaagcattaaaaattaaactcactttttggcataaggtttacatcaatctctacactaaatttttctaactgcctatatatcgtttttgtgaatctaactttttttttgtattgggattagtttttctcagctagcatcatgcttttagaagcattctgtttcataagagatattttaattaattggcagaataccctgttggtcttaattttctaccagaagttctgtaatagtatgaatcttgcttgctgccccgaatgtgtcgtgtgaagttggaacagcagaaatggtcccaacctgtatggaccacctgccacattccagaggctttaacagatgcttctgcatgtgttgcctcctctcgttctgtagcagccccattgtggggtggaggggacagatttcagttctgtctgaaggatgagaaaataatcacttgtccagggccatgcagctggcgagtagcagcgctgcgtctgcagagtgaattaccatcagctctgagccccagttctccatcctctgctgttactgcactcactacgctgcttcagggcgtctgccctgcactcgcccggctctgcacatacgtctcccacatcccgcagcgcacctgatgaggtagagcagcttcttatcttcactttacagatgaggaaacaggtttggtacgttcagagtgcatgcccgagatttccaggtggtaaccgatggacccaggatccaaacccaacccaggactgtcagtccttagagcccacactctaacccatacaagttatcacctccctgtgcttaaccagatgcacaggtgcacacacaaatgctggcataactgtggaagggcttggtttgggtaaacaaaacaaaaaaagaccaaagtgtgccctgatcctgtcacctcatttgtagaaggtgaacttaacatctttagtgtgagagaacgtctgttgagagaaatgtggattggatagcgtttggaggtgagtagatgagggaggtctacctagctagttattaccctctggaagcacttcagctgacagaactacaatgggcttttgaggctctctccttcaaaacttgctcaagaccatttctcccatgtttcccgtggtaggaaggatctagcggtcatgacctgcaccaggaggtctggcctaccaataggacacatgtcctcacagaggagacaaacacagagggctaggctgatcaggaagagaaaccagtagctacagaaaaattcccctggagtaattcattaacggtcacaggcttgtctcaaagtcatcttgacattgccaaagtctggttgagctgatggtaattcactctgaatagccacaggagaggaagccttgccttggtagaacatgaatccaggagtggcaatgacccctttcctcccacctccagcttctgggaatctttttgctttagagctttgtggttaggggattaactaactagtcttgaatgctgggactaaggagtcattcagctgcagaaataaaactcagtgttaaccttcctaaccacacattttcatttttcttttttctcaaatgttgggtaatgtttactgtcaaggagctgaagctggcttttgtaggttatatttccagtcttagggacttaaatttcaaagttaacttatgcgtttgtttctctttatcatctttcttcaaacagagcgtgatatcctgggggtggctgcactgttacagatgtagactgcctccaccaggatacaggggttgttgcctggggatggacagacagaatgatggaaggtaggaaggagagaagaaagtgaatgataatttagttccaaggtatggtggagagaacacatgttgagagttcagaggctcatcctgctgcctattagttgggtgacctttggcaagttactgaacttcaggtagcctcagtgtccttatctgtaagtgggtgggaagatgcaaactgtaatgatgataatgtgaaattctaaagtccatgtctcagtgcctggcaaatcagtgcgtagtggacagtgtttttgttccttccccctcaccagcttcttgcagacaagaccaccttcaagtcaacaagactgtcacttttatgatgccaggaggcctggggaacagcccagcactgggactctctaggggtcaccatgggccagtcattttatgaccatattcctaagtctctgctaaaaaaacaggattagactagctctgtcacgcttgcttcctgctgtagaagtctgtacctctcttccttcatacacacatgacattgtgcagcagaagagttcacaccctcaaatcacaggcttttgtcagtttttcccaaggtgtaaaaatggagacaattggcatgaggtgtgtggtgtgatgctggaattccatttttgcaattaaaatctgtgaatctgtttacctctcataaaaccaatctctaatattctcccctcaaattgcacatcgtttaaggctcctgcctcttgttagtagcatttgagagtggcgtaaaaggaagaggacgacgaagaaagggtcttttattccaactcactttttttgtatcctcaccaattctgaataaggaagtgatattacatgatggggcaggggtgcattttgttcctggacaccagctttgctgcccttgccttggcctggacagcttaaactgactggccagtgagccctgagtggcaccctgacagggctggcccttgcctgctcctgaccctccactccaccacctcagagctcacccatagacttgtctccttggccctttcttccagaggacagcctggggaggaacccccaggacatgagctggccaagcgctctgcttttggtaggattttacatttatttgggcttagagagaaggagtttccccctttccctttcttcactcctgagtcagggtctgtaaagccctattggcccagggtcggtgctgttgacctcccagaaacaggcccactcttgaaatctttagattcacctttattgcttgggcttttagtaaggaactctacccatttgggttcatggttccatttggttgatgggatattttgtcaagattggaatttggtccaggagagcatcaggggggttcggttatatggggtggggtggggtcttgtgccgcctttgcatccccagtacaaatgcgtggtgactcctggtggagggagcccaagtctgaacatatgtaagatgggccttgcctcactccctttgaagcccagccgcagccggagagcagtaattgctggctttgattgcgcagacttcactggtgggttgggctgtgccggggctcgcctggcctggcccagcttcagccgcagccccccagtgaagccttagatgtgggaaagctccagcccctggagcctcatgcctgtggtttcttgaaaataatctggactggacctgttttatatctgtaaagcaacactacaaggcccccgtttctcccacttggaagtaagacttggtctcccctgacatccctgtattttaaaagagccaccagggacaaactgcctcatttcatagtgaaggaatttctttgctcttttttttttttaagcactagtccctgaaagggattagttgctttttggtaagcaactgtacagaggttctctgaagccaactttccaggagaatttgcaaggtgaccccatggaataaggaaataacaggtgggaaaatgtgagactgtggaaagaaatgactttattaggagatatagactctttcttggcaagtgacatactatcctttaggtaaatggctatctctgggcacccatgtttgtgttaatcactatattatcacttgtactcagcttaagagaggaggagaaggcacccttaggtaaggcagtgaagggacaagaagactggtggagccggaagtgcagggtgctctagattggaggtgttagccctgcttgagaatggggccacagcagggccatggaagttgtctgtacctcagtacttca

SEQ ID NO: 10318 - DNA, 6000 bp, Homo sapiens
cgtctcgactaaaaatacaaaaaaattagctgggcgtggtggggcatgcctgtaatcccagctactcgggaagctgagacaggagaattgcttgaaccagggaggcagaggttgcggtgagccaagattgcgccgttgtactccagcctgggcaacaagagtgaaactccatctcaaaaaaagaaaaagaaaaactgtcacagctgccccaaccttcattagccactgccctgatccatgagcagccatcatcagggcaagacccttcaccagcaaaaatattacaactttgtgaagactcaaatgatcattagcattttttatttattttttaagagaatatctccctgttgccccagttggagtgcattggtgcgatcgtaactcactgcagcttccaacttctgggttcaagagatcctctcacctcagcctcccaagtagctggggctacaggcgcacgccaccgcacctggctttttgtttgtttgtttgtttgtttttgagatgtagtctcactctgccgcccaggctggtgtgcagtggcgcgatctcggctcattgcaagctccgcctcccaggttcacgccattctcctgcctcagcctcccgggtagctgggactacaggcacgtgccaccatgcccagctaattttttgtatttttagtagagatagggtttcaccgtgtttgccaggatggtctcgatctcctgacctcaagatccacccgcctcagcctcccaaagtgctgggattacaggcgtgagccacctcgcctggcccacacctggctaatttttaacaaagttttgtagactgggtcttgcccttttgtccaggctggtctcagactccagactcatgatttaatatctatggttgagtgattccctacttcttactctcttacagaaccactctataagatagttgttgtagttagccccattttactcttcctgaggcactgggagatcagggtcacttgcccaaggtcacacaattagtaagcagagctcgaaacttcaccccacccctgactcctacctttgttccttttgttaggctttgttatgtcatctgctttttttgtgtggtgggaaagcacatggccaatgtttctagaaacttcaaatagtaaaaacaaaatagtatctttatttttgctttcaccgcagaggagtctgataattatcctcaagaaaatttattgattctcagtaactgtattgtattcctcaaagttatttttcctaagttttctcctctcaccagctaagggaagttgtcctagggcctaggcatttccctgtctgccacacctcacctcttactttagccaaactactgctaaattctgctcctaaatatggcagcattctgtgttacctgcactaaaatttgcttcccttgtaagtaccttcttgatgtcttccagtgttggttctcgcctcctactcttgcaagttgaaaagttgaaaatgcctcaggtagaaatgttctctcctattctcccatcatgatcatctgtgtttttttgttttttgtttgttttttgagacggagtcttgctctgtcacccaggctggagtacagtggcacgatctcagcactgcaacctctgcctcccgggttcaagcaattctcctgcctcagcctcctaaggacctgggattacaggcatgtgccaccacggctggctaattttttgtatctttactagagatggggtttcaccatgttggccagcctgtctcgaactcctgaccttgtgatccacccacctcggcctcccaaagtgctgggattacaggtgtgagccaccacgtccagcccttttctttctttcttttttttttttttttaatttaagagaaggttgtcttcctatgtttcccgggcaggagtgcagtggctatttgcaggtgcaattatatagcacagtacagcctaaaacttttttttttttttaaagacagaatcttgttctttctcaactcacttcaacctccacctcctgggttcaagtgattcacctgtctcagcctcccgagtagctgggattacaggtgggcagcaccacgtctagctcatttttgtatttttattagagacagggtttcactatgttggccagcctggtcttgaactcctgacttcaggtgatctgcccgcctcagcctcccaaagtgctgggattataagcatgagccaccatgccctgcctacagcctcaaactttaagctaaattaatcctcttgcctcagtgtcccaagtaaatgggaatacaggtgctgatatggtttggctgtgtccccacccaaatctcacattgaattcctacatgttgtgggagggacccagtgggaggcaattgaatcttgggggcaggtctttcccatgctgttctcatgatggtgaataagtctcaagagatctgatgctttaggtcgggggcggtggctgatgcctgtaatcccagcactttgggaggccaaggcgggcggatcacgaggttaggagttcaagatgagtgtggccaacatagtgaaaccctgtctctactaaaaatacaaaaattagctggacatggtggtacatgcctgtagttccagctacttgggaggctgaggcaggagaattgcttgaacccaggaggtggagattacagtgagccgagatcatgccactgcactccagcttggacaacagagtagacttaatctaaaaaaacaaaagagatctgatgcttttataagggggagtttccctacacaagctctctttgcctgctgccatctatgtaaggcatgacttacttgcttctccttgccttccgccatgattgtgaagcctccccggccatttggaactggcttttgtaaacttcttgcttttgtaaattgcccagtctcaggtatgtctttattagcatcgtgaaaacatactggtacagtaagttggtaccagtagagtgcgatgctgctgaaaagatacctgaaaatttggaaacagctttgcaactgggtagcaggcagggattggaacagtttggagggctcagaagaagacaggaaaatgtgggaaagtttggaactcgctagagacttgttgaatggctttgaccaaaatgttgataaggatatggacaatgaaatccaggctgagatggtctcagatggagatgaggaacttgttgggaactggagcaagggtcactcctgttatgtttcagcaaagagactagccgcattttgcccctgccctagagatttgtggaactttgaacttgagaaagatgatttagggtatctggcagaataaatttctaagcagcaaagcattcaagagatgacttgggtacagttaaaggcattcagttttataagggaagcagagcataaaagtttggaaaatttgcagcctcctgtcaatgtgctagaaaataaaattccattttctgaggggaaattaaagccagctgcagagatttgcataagtaacagggagccaaacgttaatccccaagacagtggggggaaatgtctccagggcatgtcacaggccttcatggcagcccctcccatcataggcccagatgcccaggaggaaaatatggtttcctgggctgggcccagggttcccctgctgtgtgcagcctaggggcctggtgccctgcgttccagccgtctcagctgtggccaaaaggggccaacatagagtagaactcaggctgtggtttcagaaggtgcaggccccaaaccttggcagcttccacatggtgttgagcctgcgagtgcgcagaagtcaacaatgagggtttgggaacctccactagatttcagaggatgcatggaaacacctggatgcccaggcagaagtttgctgcaggggcgggacactcatggagaacctccgctagggcagtgtggaagggaaatgtggggttggagcccccaagcagagtccctactggagcaccacctggtagagctgtgggaagagggccactgtcctccacaccccagaatgatagatccactgacagcttgccctgtacacctggaaaagctgcagacactcaacaccacccagtgaaaacagccgggagggaggctgtactctgcaaagccacaggggtggagctgcctaaggccatgggaactcacctcttggatcagcgtgacctggatgtgagacatggagtcaaaggagatcattttggagctttgagatttggactgctctgctggatttcggacttgcatggggcctgtagcccctttgttttggccaatttctcccatttggaatggctgtatttacccaatgcctgcacccccgttgtatctaagaagtaactaaattgcttttgatttacaggctcataggtggaagggacttgccttgtctcggatgagactttggacttttgagttaatgctgaaatgagttaagactttgggactgtgggaaggcatgatttattttaaaatgtgaggacataagatttgggaggggccaggggtggaatgatatggtttggctgtgtcccccacccagatctcatcttgaatttccacatgtgggagggacccggtgggaggtaattgaatcatgggggcaggtctttcccatgttctggtgatggtgaataagtctcatgagatctgatagttttataagggggagtttccgtgcacaagctctctttgcctgccgccatccacgtaagacgggacttactcctccttgccttccaccttgattgtgaggcttccccagccatgtggaactgttaagttcattaaacctctttcttttgtaaattggccagtctcaagtatgtctgtctcagcagcgtgaaaacggactaatacaggtgcacacggctgtactgtcccccgtcctgcttttaaggctttctttgtttcctaattgtgactgtttttacttgcaatgtaaaggcttcatttcccccatctctgaaattatttttttctctttcaaaaacactctgccatcttttcaaggtatccgccatctctttcaagcatgtgaggagcttgataacttttgttgggggtcggtgttcagaatgacaagggtcttgcccaggctggagtgcagtagcacagtcataactcactctagcctcaacctcccagggcacaagcgatcctcccatcttagcctcctgagtaactgggactacaggcacgtgccaccacaccctgctaatttttttttttctttggtattaatattttgtagagaaggagtttcaccatgttgcccaggctggtccagaactcctgggctcaagcaatcctgccttggcttcccaaagtgctgggattacaggcatgagccaccatgcctggccctagagcttgataatttcattcattcattcttttttttttttttttttgagacaaagtctcagtctgtcacccaggttggagtgcaatggcgcaatcttggctcactgcaacttctgcctcccgagttcaaggggttctcctgcctcagcctcctgagtggcagggattacagatgcccaccaccatgcctggctaatttttgtatttttagtagaggtggggtttcaccatgttggccaggttggtctcaaactcccaacctcaggtaatctgcccaccttggcctcccagagtgctgggattacaggtgtgagctcagaccttgataatttcagtgaggaaaaaaaaaaaatctcatttacatgtttgtgccaagtgctgtgctagtgggtggggacaccatgataagtatttgataagttatgtttcttgatttaagggagtatagaagaaatggttaagtcaggactaggaggagtgagagaaatggaagcaacctttgaggtaggccctgaagaacgagcagaaattccctaaagcggggtgggagcggcaggaccaacctggccaacttcggaccttctttgaggtccaaagtcaggtactttg

SEQ ID NO: 10319 - DNA, 6000 bp, Homo sapiens
agtctcttttcctacaacataatggtcctaaaacgtatgtatttctttgcatcttttaaaatgcagcataaatggggtattctaatatcattttgtttttcttcaggtttctcttttgtacattttaataagtttaaaatatataaagtggccaggcatggtggctcacgcctgtaatcccagcactttgggaggctgaggcgggcacctgaggtcaggagttcgagactagcctggccaacatggtgaaaccccatctctactaaaagtacaaaaattaaccaggcatggtggtggatgcttgtaatcccagctactcaggaggctgaggcgggagaattgcttgaacccaggaggcggaggttgcagtgagctgagatcacaccactgcactccagcctaggcgacgagagtgagactccatctgaaagaaaagaaaagaaaaaaaagaaaaagaaaagagaaagatttatatttgcttgcagtgaaaataaatgcagaattttccacagtgaaaagttaaagtttttctctaacttcttccctcagcctctgtccctcctctcaagataagttacaaccctccaaaaatatattgttcagtgaaaccacgatggtatagaatagaagtctacagttagtctacgatgtgttgttgacagctgcgtctaacattctttttaaagattgcatagtatttcattatgcaggataccataatggccgtttcctttttgatggacatttaggccaagttttcctttgtgaaaagtgctgaaatgaacattcttgtctttcctgtgtctttgtgtccttttgtgagtaaattaagcacaacttcttagaaatgaaactgctgggtcaattgtatatgtatcctaaattttgtcaaattctttttttaacagcttacaccaaattatattcccacattggttatagcaattttcaatattatgagttttggcttgtattttaaatatcttcattttccttttagatgttcacatagctcccaactggaaaactgtacccataccctgccaccatctccaccaagaaccctcttgccctatgcatatcatatgtgtataacagtattaccaagtataatagtactttctgaatatccctttctttcctcctttatgtaaaatatgtacaatctgatgatattatttgctaaatacataaatgtatttacagatggctttctaaagactaagtgatataatccaaactttagaaaatcagattttgctcacaaggggtttggaaagtgccttttcaggatcgtaattaaacttagctaattgtaattccaagattgatgcaagaaggcaaaaggttcaagaatgaagtcaatttttcctgaggttaggactaaatctgtaaattctggttatatgaatcgctaaagaattattgcgcagggatcaataaatcacttctaaagcagtgttagaaggctgttccacctcctcagtatactagttattaggctcaagagtgttgggcaaactggttcttttagcttttaacattgcagtaaatggcttggcaacagatttaacattttctttgtaacatccaaggttagctctttttttttccttaagatctggaatgttcccaacacaaagaaatgataaatgtttgaggtgagggacattccagtcactctaactggatcactacctgtcacaaacatgcatcaaagtaacacttacaccctagaagtgtgaacagtcaccatgtatcaattaaacaaacaaaaaagcccagcccgaccttggaccaattaaaacagaatctctgaagatggaactctttttttttcccccccgcaaggttagctctttagtcactggccagaaaacctctaatcccagcagaattttagagctattaagtactttagttcttagccacttagaaatcacaatgacataatgatgctttacaagaagaagaggtaggggaggagggaagaatttctactcctcctcctcagtgacatgagagtaaagaagaaaaatgagaggttataaccatgaatatctgcatgttatgtttacttgaacaaaaatgcaaattttatctcttattgaaaagaattgtttttgaacaaaagtgaatagctaaaaatagtgattctgtacaaccaactgagggactggttttcctttagtttttttgtatttgtttgtttgctttgtttttgttttggcttctcaacactgagcatagctggtggggcagaggcagattcaacactccacaccctctcaggagggtaggctctgagggttaaaatgttgaggggcagatgtcgcttgtgaagcgtcacataccgcgtgaccatggcagagagttccttgagcagtgaaaagcactttcctttcccaacagatagtcttatgtgtgcaccaatcccaagcagaaatcatgattttctttactctataggtgataagcatgagattcttccccaagaagaatgctgaaaaatcagaaaggatataaaaatggaggaaggggtgggatattcaggaaactaccaaaatatgtacatgtgaaaataaatttcatgaaactgattctttggttaaatagcgttttaaaaatctcttcaaagctctcaaatgggcctttgaaaaattaaattacaccacattggatctgaatttagcatgtaattttctaacacatttttatttttttattttttatatgtttttaattatactttaagttctagggtacatgtgcacaacgtgcaggttaacacaaacattttaaagttagaggttctacgtcaatgaaataaggctaaaacatgaaccttgggaagaaacattggaaactttagtacaaaggaagttacgaatgaatatgattaagtttagaaagctttcctaggagaggaaatgtgagatgttgattcaggttttcgttcaaagaatgaaagcattatttaaaatatattttgtgatgcaaacagggaaacatcatagtatttttgtgtgtgtgtgctgaatctaagctccattttacagctagtgtgtccccaataaaccatcctaattagaaagcccctggaaatctccagcattatcttaattaaattagcctaatctaataaatgcatcataattaagaggactgtgccattctttagtgttcagcacaccaggcattagatgatttgtcccactttcagccgtcagttgtcatgcttgctaaaagaaaagaaaaatgatagcaccagtcatcgtagtccctcaaggaatcatccatctagttcttgaattttctttacaacacctctgtcaattatttcttcctcttcagagcatctagtgacagggaactcactaagccattttgatctatttcatctttgaacatatggaataattttagccataagaaacctcagggaattttttttaattccttcaacatagacctaacatagtacccagacaactatttttacgtccaatttcaaacaacctggaaaaacagcggatcagtggaacactaaaggctatagggagactatgatcattcttgcccaaaggaattgcaaaaaggcaggtgtgtaaatagtatttacatataggatggacctctccacctttttctagtacagattaatttttaattttcccaacatctataaattgccagaatggtaaggtagtggggaaacactttctcacaatgtacacagacttgaaagctgttgacctgtcctccttatgacagacagttcttggcaaccccaaggagagatatggctgaggcagaaatcacattatctagctcttcggctatacacatattgggctctgataattagaacattgatccacaagacaacctttgagtatgctgttcttttccttcacagcaaacacgtatagtcattatcgtttgcttgtttgtttgtttgtttctttctttctttcttttttgagacagagtctcatctggagactcccaggctggagtgcagctcactgcaacctctgcctcccgggttcacgccattctcctgcctcagccttctgagtagctgggactacaggcacccgccaccatgcccagctaatttttcgtatttttagtagagacagggtttcaccatgttagccaggatggtctcgatctcctgacctcatgatccgcccacctcgacctcccaaagtgctgagattacaggcatgagatcagttattttttttttaagacacagagtctcactgtgttgcccaggctggcttcaaactcctgggctcaagcaatccttcaacctcagccttctaagtagctgggactacacatggctcatcagtgataattttaaacacaaaaatacacatttttatttgcttatgcaaacaaaggaacgattataatttcctgcaactagtaaatatcatatgctaaatcctttttttctaattccacctcttccccaccacaccatgtaatagctttagagttgttttttttggggaggagggaaggggtgttatgtgtatttttttgtcttttgccaagtctctaagtgcctctgaagccaatttttaaaagttgtgcattgtgagatcacagttgctttagggcatacaggatataagcacaaaatgatggactgtagccaggtagtgaggctctaattgtgtcagaaagaagaacattttcatcatgacataacgaaaactgtatttttcaaagaaaaagatctaaatctgtatcaagtgataacattagttttcctacttttaaaaacaaaatctagtctattattaatagaatgaaatgtcagccttaggcaatttgctgtgaaaaaccaactgaaatgaaacatggcattttattcgttattcaaatggccaaataaaacaaggtgtaattagtcctgacttcctgttcttgctcacacacctgaggcccctccccgctctgctgcagctctgcataaccaggctctcaggggaagcagtggaggcagccttcttggacaacagctcacttgtctacacagtcaaaagtatgtatttgatcaaaatggttgggaggaggacaggtgttacttagagaattacctgtgtaactagaacaagaaaaggaggcagcatttgcagaatgtttgcaaatctttcaggaacttgattcaaggagtgtgtcagatgttaaatccaggcatatatgtatatggctacttgtgtgtgtgtgtgtgtgtgtaatagtgtaatttcacttttttaaaaaatgaagacattcacaattttagccagaatagttggtgcaaggtccataagtgctacctgctaagaatataattccttctacctctaatgtttcattatcaaattaaaagagttctctcctcagtggatacttcatttatcatagctctccttggaaagctgacctctaaacatgaacttctagaaggaacacagaataagaacaagggaaaagcattcgggaaggagggtggctttgaaaggagttagctgggaaaacccttgaaaaagaaagtgaatccatttctgtacatacaattattgactgacggggcagtttacagttttaagttcgtgtgcactcatgccctgtttgagatgcctgttttgtggttcctcagagaccacactagccacatttgaacaccattagattagactagagccaggactctgcaaagggaggctcttcctcagcctctgacagaatcaccaccaaatctggctgtcctccttgccctgagcaattgaacttggctctgtggagggagcctcaaccaactgaagcatcatttggagaacagatgaaaaataaagaagcgaagccttttgaattctaaagttttagctttttccaaaagtaaggcattttcctctcattctcaatctcttcttccattcagttttctcctcccatattcttagtcgtgattacatagattaaggcaaggaactg

SEQ ID NO: 10320 - DNA, 6000 bp, Homo sapiens
tttattactatttttttcaaattttattttactattcaaaacaccaatgtgcactcgtctgtcttcattcaattttatattactgaataatgacataatgataaaaggataatataatgatataatgatgttattctgtctttgtaaattccaagacttattttatttgcttaaattcaataaaatctgcttttgaaattaattttactggctttttcaccctaaataatacttgtctctacatttggacccttgtaaggcagatagaaaatgagattatttctaaggatcataatagctaactgtaccccaatactcgtatacagacatagattttgtttccagactatctcaattctacttctattacctatcatcataagattatgtttctctcttcatttttgtgcatatgcacaagttagcaaacatcccaagtagcagaaacatgtgaccaaaagatcacccacaggctcaggctacatttatgcagatttaatcacagttcataaaatcgagctcatgagggacaaatctggagttccctgctacgtacagatagatataccagtttaatcagacaagtctttggggccatacctgattctgtgacatgtacacaagccagatacaaagtatgaggaagaagtagaaagactggtcgtggcttgaaagacacttgttcccaggatccccagatggaccattgggacaattctgcaagtgtttcatgcctccaattttagtgtgttccttgatcagccttctcaattaccattttctcacatgctccgtgatccttgtttcctggtggttgacgctgggaatgaagagaggaataaaagtgaaaagggagtaagtagacttgtttcttgaaacttaggattttcaaacttcctggatcgtaagaaaaagaaaacgtccaagggggatgaatgagcaagtctgctgcattcctttgcacacccctttcatcaaggaaactttgaatacctttactttttctattggctgcccaagagtttgtatctcctaaaacaaagtttgtaaaccagtatcctcgattgacctgaacctgggaggcagactgatagataatctcaaaacagagtgatctacagcctggaaattctggtgaagaagaaaaatcagtgtatgagagagctagaggaagaaagtttacagtcaaataacatgtttgaacgtgcagttgtgaaaacagagcatgccccaatgtggctataggactgatgggttaaagggaatagaggtgtggtagccaactgccaagatgaccaccaatgcattgtcttgccaactggtttttacgcctctatgcagtctcctcccacagtggatactgccaatttgtataactaaaggatactgcgggaaagacgaaatatgacctccaaggctggatcataaaagatataatggggccgggcgcggtggctcacacctgtaatcccaaaactatgggaggctgaggtgggtggatcacctgaggtcaggagtttgtgaccagcctggccaacatggtgaaaccccatctctactaaaaatacaaaaaaatatctgggcgtggtggtgggcacctgtaatcccagctacttgggaggctgaggcaggagaatcacttgaacccaggaggtggaggttgcagtgagctgaggtcatgccactgcactccagcaacaagagcaaaactccactttaaaaaaaaagacattgtggcacaatccagctgccatgaagctaggaaactcaggcagtgacacagagaagtcaacagggttccagccaataacaggactaactttccaggcacgtgagtgagctgccttggaagcagattttccagccccagccatgcttccacctgaaagaagctggggcaacatcttcagtactatctcatgataccctgatctggaattacccagctaagactaatggattcctgacacatagaaactgtgtgaaataacaaatatatattgttttaagacattaatttttgcagtaatttgttatgaagcagtagataagttatatctgattttggaggtggaggaggtctgtttgtgtgatctgtaagaggaacagagatgaagattcatagagaaaagcaggtccaaaaccaatatgccaacatatagaatagacaaatgggtgctgagtcacccagaataatggcagggtgtggagtgaagaagagaaccaagagcccaactagatccaaagtcttaattttaaaaagtgggatggaggatggttgatgcaaatataagtgcttcaaaagagcaggaatttctataagaagaagtaatcatttgaaagctgaactggagccccatgaaggagccacagactccctttcccaaccttcgtgcacacagaaatgggctctggtggaaaatatgaaagtgcatgagaaatgatattactgtccacacactaatctcatccttaatatcaactggaccttgctatactaacttaagagtgttgatcaaactttctaaatttttttgatgccaattttctaaggaaaagaacttcttataagatttttaaaacaagcttggtttgctgcactatttgcaatacacacacaaaaaggtcacatttctgtgtccttttgagtaaagtcatatccatctttgaagcctctctcaggaccacaagctgtttttttttcttttttcttcttatggcttcatcacttcactggtgttataccaggatttaggaaccaagcaatccaaagaaatgtgggagaggcctcgtctggccagtagtccaacatgattgcctctggaattcaccatgagactcacagttcaccagaaggcagaggcaaaaatcagagttgccaattaaaattatttctaaagatgggttcactgcttcctattcccaagcctttctgagactccatggggtgaatcacttgcttcttttctgtatctcctcctgcaggcatttaagctttgtaatttagttacatgcatacttatatttatctctttccaacaattttgttcatttctgatatcttctattgtcttccctcccaatttctgcccttttcagtttttactattatcttgtggttttaggaaaaagcagatataaatatgtgtttaagcaatgctatggtttgaaggtttttgtccccttcaaaatttttgttgattcctaatcccctatgcaacagtatcaggaggtgtaacgtttagaaggtgattcaggaggactcctcatgaatgggatttgatgcccttagggcttgatggaggaagtttgaccccctcttgcccttccaccttctgccatgtgaggacacagtgctcaaggcatcactgtggaagcagagacaggaacttcaccagacaacaaacctgctggcaccttgatcttagacttcccagcctccagaactatgagaaatcaatttctgttctttgtaaattacccagtctgtggcattttgttataatgacacaaactaagacaatcaatcagagttatatttccttgtaagtataaattttatttttttatttttatttttattttttttaagaaggagtctcgctctgtcacccaggctggagtgcagtgatgggatctcggctcactgcaagctccgcctcccgggttcacaccattctcctgcctcagcctcccaagtggctgggactacaggcacccgccaccacgcccagctaattttttgtatttttagtagagagggggtttcactgtgttagccaggatggtctcaatctcctgacctcatgatccacccacctcggcctcccaaagtactgcaattacaggcataagccaccacgcccagccgtaagtataaattttaaaatcacttcttaattaatataatagatgaaatgacccacagaagtatccactcacagaaaggaccatttctaaaggaccagtttggcctataaagaaaatacaatagcagaccttcacaaattttctaacatcagaaaagaaaaaatatttagatattaaactgaatcaaatgtgatggtcttacccagacaaaggaagactcagcaccccatttccaagttaactgggagcttttgtgttgctctttttgccccccttatatttgattctgctacctgacctttaaacagaaaagctttctcttcttgctatctatgtttgttatttaaaagatcaaaatattaaactcttgctatatctatttgtcatttgaaagatcaaaatattaaatgattgtgaaacattttttgcaactgtaagagggttgatacttttcctgaatattattcattcaacattcatttatttctttgacaaatatttaagagatgctcatgatgtcctaggcattgagctaagaactcaatgttgcaatgtggataagatccagtccctgtgtgttcatacttatttaatactattatagacaaggcctttaatacataccatagtcatatatcaatttttaattagcaatatgaaataagagaacaatgggactttccactcaatttgacaggtggctaaattttcagttactgaatttactattttagggtaatctagcacatgaccaaaatttaaatgcacagaacagaagatcagagtaagaagagcttccatttggattatcactttttctacttggagtcacatactgtactttaaattgattaagaacatgttaaaggtccaggtggtgatttccagctacaagtccaaagtatagaagaatgtgtttaaatcctacgtttatcagatccataaatatagttccttctatgttaagtggctttatttctaagaacccagccctcggtcctgggggtgcttcccagcccgctgctggaattcctgatcgtggcagtctgctgaaacatgagctcagttaccaaatatagctgagtggagtaagaggacagatgagagtctgaggccacagttgcctcaaagtgaccacggaccaggcagtctctaatgaataggcaaggccacaacctccattctcccagaaaagaagaaatgctcatctgaaattcatcacctctctggagtcttcaaactgaccaagcattgaaaaggtctgtaaggtgtatcttaatatactaactagtagggcaacattttaaggacttaaaaaaaaaaaaactaaaaatacaaaagtttttctgaagatatgatactatttacaagataccttaattattcttttgcttggagaggaaacgtaatgagaatgttacggttttgccaaaaacagataatacgtaagatttgcctgcccacttcatctctgcctttgctgtcagagaattacactttctgttataagcttaagcatgctaagatggtgctatcaattccaaaaggattaaatgtatttatggagccagcttttgtcaagatcgtgtatgtgttatgtttcacagaaaaggaaaacgcagctttctagaccctcacccatatttaagctagataagtgatgatggcttaaagtgatagaccttagatttcagtaacattataaattgttaattacactttcaaaagattctaaaagtaactcactggacataattaaatgagttgggatagtaacagcaggtattttaaattatattcatgcataaaatttacatacatatttttaataagataacgcttactaagggaaaccacagtgcaatctcgagtccagtcaagtttaaacatcacagaataatttttatcatgttgttttaagttgcacatgaaattgtcttgaatccaatataggaggttgacataaaatgatttcaggctcatattacttattaacatttgctaaaaatactaattgccttctagtatgaataatgtggtgacatataaagccatttcttggcaatataaaactattacaaatctattcaatcacatatatgcagaaattaaatcctcatttcatgataa

SEQ ID NO: 10321 - DNA, 6000 bp, Homo sapiens
taccaaccgagcaggacagaactcattcagcctggagcttgtggttgctggtaggctcatctgtgaatccttgctctctgacagaatgaacatcagacttacaaatgtaaactaattctacattactaaccaatacggaaaataaagtattgaaaaaatagattgtatcatcaaaatagccaatgaggacatggttataaggcctagcaaaacagaaacagaaatctttcatttctcccactaacctggcaaagagagaaaaagattttattagctcttttgggtcattcgacctcctgtgtgtatagtggcccctagtgttacatagagaaatagtaacagcagcatggactccaagaaccaaagaatttgcttatatataaagttttatatttatatatatatatatatacacacacacacacacacacacacacacacacacacacacacctggtttttaaaacaacactgtcatctaccctcatagtcattgtcaaactacactcagatttgctttttcactgattattgtgtaggtaaattctgtaaaagtgctgttacatgaagtcttatgctttgagaagcctaaaaggaaaacacatttatggaaaggtttttataccatccttaagagttaggtgttgagtacctgatctcttttaagaaagaacataacaaaacatttatttcttctacctctttatgcaaagtgcttcatgtacattatgtatcagttggccctcacatgagccttatgagataatcagagcaaatcttctctgaattttccagggtcccacttagtaagctgatgattagatttaacacaagactcctagtgctcttctaaacacactacgtcactgagctctttcaagaaatagagtagcaatgagaataaaacccaagaagtcttgacaaaactcttggattatgattctgataatggtaccaagatgttttcacataaaaatgtggtaaatatgtggactgtggtgctacaggttagccatgctttcaagttttgtacaaagtactctatattcttacatgctacaattgatttcattcctctaacctcaaactaaaacttcacttttctgctgttaaatatgccttttgatcacatagatacctcagtgcgcatcagctggcactcctgtcagaagacggtgatgcacagtaattggaagcaaagtctttggggtcagatctgctccagtcccggctcttgtcgattttactagtgtgacatttggcaaatagctatctctgcgacttagtttctccatatataaaatgggaatataatgcctcacagtgctttcctaaggattaaatcataaaaatgtgtatgaagctctgcataactagtaccctgcacagcaatgctgcaaagtggtagatgttattcttactgatgagttgctatgacattaagacttgttttatacattttatgttctttgcaaaactggagccccagaaagaatacaaagtgagcttctgttcccacttctcccagaatagcctaggatgggcaaccatgtaaaattcaataaaaatccaaccttctaactaactcgtggtgttggagagtattaagcatttgaaaagttcaggtagaattttcatcctttttgagctctttcctagctgctttgctgtgatatatctgtcactccagatgagggagtagtggtggaaaaggaatgcattctcagattcattgttggtagttcaaaagaaaataagtaaaccttattcattctctgaagtactttccaccactactacaactgatccaagaaaacaatttcccattggatggtattattcagagtgttattaacaatcagtcctgaatttttcagaatagtactaaagttgtcttttttttttaatgggttccttccttcaaggttataataaagcttttttataaccttcaaagaatacaaagtggaatttgtaatttataggatatacattcctagtttacaggtaactatttaaagctgccaaatttagataaagatgcctcccctttaaattgccccctttaaattctatggcatgtctcacttaagagttacaaatattcagaatattcatggcaaacatggcaaacggcagtgagggaatctaagtggtcaaattcctagaaatacttgtcctcagcaccactaggtggcagtagttggttgaggctgtgaatgatcggtaacataatcactagtagtgaagccatcacagatgctagcaatgacttaggagtctcccacagctggtcagacaggcattctgtgaagcagatggccagtggacagtgtgagcctatcagacttgaattaattgaggaaataaatgagcggaatgaagtatacagacctttgcttggtaaaagaataatttggagaggggactagcatcttaccacctggagtaaaaaatggtatcataaaagatctattcaagcaatattccaaaagccttctgaattctttctagtgctccttttgtatatcattgatagagaattcatctcatgttttcttagctaaagaagcacacaaaccccctgtgtttattgagaagctccaaaacacaggagttgctgatgggtacccagtgcggctggaatgtcgtgtattgggagtgccaccacctcagatattttggaagaaagaaaatgaatcactcactcacagcactgaccgagtgaggtaagactgcacaatgagaacctgatccttaactgttcagtcctaatgatgtatcaaaagatacattttatatagcatggaaatctatgtgtaaaagccacatagatgttttgatttttgatgaaatcaatcaaagacaaaaaccatgcgttacccaatgtaggattaagcttttagaaggaagctatgggtgtttgatctaatggtgatttcttaaaagtgtttatcattctatctaaaagaaaagatgaattcatttgctttagtgataaaagactattcagtggtttttgtaaaggcagatcctcaactaggaattaagcacacagatgtattcaactcttgacgtctgttctttctcccattaactttaatggagctagtaatctctacagaataagtatgaccctattatcagctacttgcacaattctgtttctaatgatctaattaaaaatgatgcttcatgtccaaagccacttttaaaaaatttagaaccctaatgactttatccttttctccagcatgcaccaggacaaccacggctacatctgcctgctcattcagggagccacaaaagaagatgctgggtggtatactgtgtcagccaagaatgaagcagggattgtgtcctgtactgccaggctggacgtttacagtgagtgccacttcatctcatttcattgcgtttactcattaaattatgaaaaattagacatctggacagcaaatcacattactctttataaacaactattgtgttttatttgtcaaaaaaattcatattgctctctctctctttctatttgtagtttctcgacattaatagtgaaccacaccaggagaacaaatacccaagtatcattcaggaactttgaattattagcaaaatatgcatgttgatttctcttacattggctagttagttgtggcttccttactcaagcatccttaggagttaacagtaggcaaaggcataaccatgtttttcacatgttcttgttactgtgttctgcaaatgactgccttttaacatttcttcctatattctatcgcagtgtcctaatgcactctaaacgtgtgttccattgatcctggaatgcgtacttttgtggcttagtgcttttctcattaatatatcttaagcagccagcagtagacttgtgtttgtatatttgtgtacatgcatcccaaatttaaagaaaattattcctattgaatttacagtctagtacaatcagcattatgttatccattgacataaaaaaaacactagaaaaaaattaagaatttatttaagaatttatttcagattttgcctcttcttgaaataactatgtgagggtcatcaagaaatgtgtggcctcaaccttccctactgtacgattcctttcagttgattagtgttaaagcatccacatccagcagaattcctaagtgctataattattttagagaaaatattttttaaaaggagaggggggatgagaattaggaagcttatcagctattccaaaggattccctgtgctgcagtgtttacttaaaaaaaaaaaagataaactacacttgacctttgtaatctagctgctttattcccactatcctgtatagacagtaaatctgcaacatgtgagtaaaatgcaaaagtgttcctaaattttccatgtttctaccatggatgtgttcaggtgccttgcatctatctagacattctgtatttatttgaaatatctaaaggctttccaagtatatcttgattaaaaatcttaatttactctttttctttgtagcccagtggcatcagcagtcacagagcaccaagccaaaaaaagtacggccctcagccagtcgctatgcagcactttcggaccagggactagacatcaaagcagcgttccaacctgaggccaacccatctcacctgacactgaatactgccttggtagaaagtgaggacctgtaatccagcattcttgttaaagctgaaacactgaaacagccattgccttgaccaacatattcctttgtcacattatgtaaaaggcagaaacatacctttgactataagaaattaaaaaaaaaacaccaaaataatatttttcttacttgatataccaaacttagtttaagtagataatgctaatacaaatatacacattgcacagaaaatacacatttactgtccaatttaaaactttggaattgctgtgattaaagtgatcaaaatgccaaaatactaaaggaaatcaattgttcacaggtaactacaatttgtattatctacaagtgcctttaaacacaagatataggtgctgtgtagcctgatagtgtgaaatgtttaatgagggagttgtaccacaaacagtactacaatgattctgaagcacagtgtattcagacagatacagtgaaccaagtgcaatatgtaaggatgaaagaagaagagatgacaaagaaatccaagtaaatgccttgtctttgcaaatgtttttatattaaatcataaggaaggaactacttgccttaaatgttaatatcaaaagagttttctaacaaggttaataccttagttcttaacattttttttctttatgtgtagtgttttcatgctaccttggtaggaaacttatttacaaaccatattaaaaggctaatttaaatataaataatataaagtgctctgaataaagcagaaatatattacagttcattccacagaaagcatccaaaccacccaaatgaccaaggcatatatagtatttggaggaatcaggggtttggaaggagtagggaggagaatgaaggaaaatgcaaccagcatgattatagtgtgttcatttagataaaagtagaaggcacaggagaggtagcaaaggccaggcttttctttggttttcttcaaacataggtgaaaaaaacactgccattcacaagtcaaggaacccagggccagctggaagtgtggagcacacatgctgtggagcacacatgctgtggagattgcagtgtgtctgaggtttgtgtagtagtggaagattttaggtatgtagagcaagttgaaaatggattgagactgcatggtggcataaatgagaaattgcctgtagcatctagtctacttgaaggaagtggagacataaggagagacaaaaacaggtttgtgccataaagtattttttcaaagacaccaagatgtggtaaatgaaaattattagttcacttccctgctgccatgaaactttgccttaagaaggtgctggattccaagg

SEQ ID NO: 10322 - DNA, 6000 bp, Homo sapiens
atgcctgatgaacccaatggggtacagaattgcagtaagaaatttatatcattgttgtcattgacagtgatgagtccaccatgtttagtgtttggccaggtgctgtgaggatgccgaaagttaccctccttacttttaaagtgcttataaatatcaggaccagaggagcttatggttcagagggtgcagtcttgcaactcttcatacaatggcttctgtcatacaatcaaatattaaagaaagcatataaaccaacagcatatttattcatagatcacaaatgtttttcagctttgtgatctcaagagtttttctagacaattacgaataccccatctttattatgagcaggggataaattacttgcaatccagatattgctccagagagacatatcaggaatttccaatttacataaaagttgttttccagaagtttactttcacatcatttattttaaacttgggttgcagtttcccagagaaaaagtggtatgtagtaataatagccaacattttaacaaacgttttttgtttactgagcactctatagagaatgatgtggcaccaggctttctgagccagccagcacttcacatccaggttctgcccttggacacattacttgacctcactaactgatggtgaattttttaaatggggataaccatccctgcctcctagggttggtgtgtgtctccagtgctaggcacgtgataagtgccctatggcttcgtgatgaggagaaggcggaggagcagtgctaaaaccagccatcttagctggtctcatgacagccccatctccagttccccatttgcccacctgccactgctgttcccctgccagccacttgcaatggacataggtgaagagaaacatcccctgcaataagtaaaacattgttcttgttttaaaagttctggtttgtaaagtaaccagaattgatttgattttattctgctatgaaagataatttattgagctcatactctgaaccaggcactgtgcccatttaattctcacaatgaccccacaagctagtagccggctgagctggggttccaagccagttcgatctaactgtgactctagccctttttgtcatgtaccattctgccacttgggacagtgtttttagtgtggttaactttttctgaacttgctttaatctagtggtaggagagatgactgaattagaaaataaattaggtcatacacctctccttatctctgtcaaatctaaatctttgccccatccaaccatctgtaaaattattcttgttgaaagctttctgcaaaccactggggtagaggagttattttctataatgtatgaggggaatctattgagttagcatgaaatcaagtttgaagtcagatattcttaaatatattcttaaatatgtatttaaaaccttaactgatgattcagatcctaaaggccctggatgttacagctgcagtaaggtataaaagtgaataaagtcctcagaaggaaaatatagccacagatttttttttttaagtcacattgaaggtcagggtccttttatgtgttacatgcctgaagtagtgtaaagagcagggacagacacaggttctaacctggctctgcaggtaacttgctctgtggccttgagtgttacttaaaaccagtcttcccatgtgtaagtggactgtgccaggtctagacggtcccctttccttcagtatcaaaacttttagaattgaaggatgggcaagagtggggaatcgcttagattttttgaattaggggtatggaggagagcggggaaaaaagaagctgggagaaatttgatggattacttgtgtaagaccaaagatttaaacacatgacactcaaagtacatttgcaactagggctatctagaacgcttaacttgtcatactatttggaaatacatagtatttccaaaatactatggaaatacatactatttggaaatacatagtatttccaaaatactatggaaatacatactagttggaaatacatagtatttccaaaaagttcagtttcatgttttcagagaaaagacagcagaaaaaaaaacggagaaactaaagaagtaatgaatttcttatgacaaataacttctaagtaatttccaaaagctataggcaaccttgcctttctggtacctttcattctttcggcctttttatctctgtgaaaatcaacttttctaaaaatagcttaatgaggaagaagaaaatggtaaaattgtgcatttcatcacatcacagtccagatatgaaatccatttaactcaagtatttaaaagattatcatttgcacagaaataaagtcagacactttaaaattcgaaataaatgtttttgcgctccttttccccacccctccagtccctgcatattatattcttgatgcctcactgaaccacttaaaaatggtgaagtcaaaacgctagtaaagttcttcactacagtatatactagcagccaaatcactagaatgcccattcatttcttgtgaaatgctacgttaataatttcttaaactgtcacttcatactaaagttagcgcttccacagctttaagcccacttgggttagcaaacatgatggttctttttaatgcccgaatgaataagctgacccatggagaagttgagaaccaatatagtcctggtctgggctttcctgccctggtttctgtgaatactggctctcaagagtcactccctaattctggggccagggaatcctcacatcaggtacagagcgtgatatgatgtctgtagctacttcagcagagccaccacacacagcaatttgctgatgccaggccaagccttaaatacttaaaacacagctgtggctttggccattgtgagcccaggtggggacagagtaggggagcagcgcctttgaggagagccacacagatggcttctaatccagatgcagaggtcagctgaagggtgtggaagagtgttgataaacatcctgggactgggatgcatgctgccctattgaggaaatgtaagagagacagcaaaggcagggagatgaagcatttggggactcggaatggagagtgctggataatggattttagagctagtgggtggtttttatgagttctattcctgggccagttctaaatgcatgaatgccagagcacatgtgctggacagtctacccaaaccacacagacatctggaacttcagggcagtggtgaatcccagcagtgacatgcctacttttaaaacactcaagttcaataggaccccacaaagttctttgctgttcaagtatttgatgctctgtacatattaagaacatagaaccatctcctcattacacctttcagttcccaagaaagtgtgtctttgtcttctcatggacttaagtgtaatcactttactggataattatagaagggaacagaagacacaggacagagtttagaacttgctgatgttcccacagctcatgatacttgagaaaagacctagatattttttcactttttattggccacttcaattctttgtattgctgagtctctgaaggcttgatttttgcctatggataagaaagttttggggtctgatttttagttttaaaacgtttattgtctattcatagataacttgttttatctgcttgttacagtgccgccttctgttgaagtttcttttgacagctattggtccctatgtttacctcatgtgaataaaggaaaacatcctggatgtacagcaaagtttttgagtaaaagagtgagatattagatcattgctagctgcttactcttatttcagaaataaaaatttgaactatctcttctcaatggtaaatatttggggaattaaatatacatcattacaaaatttttgctattgtttattgaacacctacctgttatagaagtcacttgtttacatgtgtttgaaataacatacaatatcaatgtgtattaaggtttgtgtaagaaattcgcaattcagtttactactaaaattttgcataaagactttcttaggggacaaatgtagagattaaagtaaattttttaaaaaatccacctgtggtatttattgaatgtagagttgacagcactgaaataggcaaattggactaacgtaaatctgccaaatataacttcaaccaagtgtttttttgcttttaactttctcatttgatagaattcttttaccaaaaattggctacgaatgagaggactgagaattgatgtcgaaacgtttttctcttaatatttcttgatccgttaaaaacaaattatggctcctggaagtcagacaaaatttccatcaggatttgtaaactggttgggatcaccttatgtgaaacttaaatgagagtgaaatgggcgagcatacttcactgacttagcgcttggtccagaatgaactgctggccccacacttgggcctgctaacgtgtgcccgttccctgggtgttctctgcagctggcctaagtgccaagcgatgtccacaagctgagctcactcctggaatacacgttcctggccgttccatctctgaaggtgtcacttctctttttccccccagggaccctctgaagctccagcaactccagaaccaaatccgactggagcaggaggccggcgctcggcagcctccgccagccccgcgcagcgcgccgccctcgccccccttcccgccgccgcccgccttccccgagctcgcggcctgcacgccgcccgcgtccccggagcccatgagcgcgctggcctcccgctccgcccccgccatgcagtcctccggctccttcaactacgcgcgccccaagcagttcatcgccgcgcagaacctcgggcccgcgtcgggccacggcacgccggcctccagccccagctcgtccagcctcccgtcgcccatgtccccgacgccgaggcagttcggccgcgcccccgtgccgcccttcgcgcagcccttcggcgctgagcccgaggccccgtggggctcctcctcgccgtcgcccccgcccccgccacccccggtcttcagccccacggctgccttcccggtgcccgacgtgttcccactgccgccgccaccaccgccgctcccgagcccgggacaggcgtcccactgctcgtcgcctgccacccgcttcggccacagccagacgcccgcggccttcctcagcgctctgctgccctcgcagccgccgccggcggccgtcaacgccctggggctgcccaagggtgtcacccccgcgtgagtaaccgccgcggtcctccacttccctgcccctccgcctcgggtcgccctgggactcccacatctccatacacgcgctcccatcagcctgcaacccagagcgccccagtaacatttcacacatttctctccgtgcgatgtaaaaattcttaacggcaatttgactcagtgattcttgcgtagccacttaacattatcaaaatcagaactttttcctctgaattaatatgagattctcatcaggaactattcaaaatctatgcagtgccctctcttaatcattatgggggggggggtgcttagctatcatttattgagcactgtgctaagcaactcacatgtattatttcatttgatacaacattcctaagaggtagcattgccccagttaaagtactgaggagtctaggagttaaataaattgcccagggtcacatagccactaaaccgagacacgaatccatgctctcaccaccaaactatgtgttttattataatatttcatgccagcattacaatggatgtgaaggagtttggttattaagtatatacttagtgtttttgaaaaaccttaattaacagatttaagaaataagcctttgtgtaaatctagtgattgactggaagggggcaaaagcatgtaaatgtctttatgttttgatgtagataaatgagggtgtatgcaacctagtggagaaattatgatgccagttttgtccctggcctgtgacctcgaga

SEQ ID NO: 10323 - DNA, 6000 bp, Homo sapiens
aattattctctatttctaatcaaacacttgcttataaaatgctcccgatgaggcaggtggtatctgaaagttccttccaaacctgtaagtctaaggcactttagaatgagtattcaagagcaggtatcaccccaacagtcacacaaaaatgccggcatttcttatgtataagaatggcataggtaaaacggtttgggccaattccaaagtgctagctgcgagatgcaagaacactaccactttctttgcctgatgggcaagcagtctgcttctgggtcaagtcaattgaggctgttagctttggcaagtgtcttgtgtaatcctgttgctaattcagccatgtgcatcattctctgtggattataatagttgccgccaatcccctacattacacagcagcctgggaaatgctcttagaggtaagaaccccatcactgccagctcatccacatcttcctttagctaaacatttactgagcacatactgttaaatgactgatagaattatttccattagcgatacctgttctttttttagtcagtttattctccttttgagtatctttgttttttctttcagtcagtattagagctgacttgggtgttctgaagctgatggatggctataaaaataacatttcttttaaattgtattttgctgtttaaatatctttttttccatgtttttcattaaggacatgacaaatcttttctgtgtggtttcttccttgtcgcttattgctcactttaaatttgtgctgtaccaattggtggctctctggattaggccattagtactagaaagggaggtaaaaaggtagaacaactgaagcaagaaaaagaaatatgcaggtatctgaagctggagagagaacacttacagaaaatcatgaaagtgtgttgttttttactctttttcatagggcagtacatatttgtgatttttttctaattttgtattttttgtgacttacgttgtttagaggttaacatacgaagaaagaatggctcgtcgactgctaggtgctgacagtgcaactgtctttaatattcaggagccagaagaggaaacagctaatcaggtaccatgttgctctggacttcttagggtaacatttattctgtcccccttttccatcttccttatggatactgttcttgggatgagttctgtggaaagtagagggcaagtcacagaaaagcagtattaatatcatcagtcaacctcacagctaatttttattgagcacatactatgttaagtgactgacagaattctttccatcagtgatacctgttctttttattcttcttcttgattattctcctttccagtacatttccattttcctatcctaagttttatgcaaaataattttgtgtggagaaacacattttcgccgacattgtctgaaataactagtgaatatttcccattagagttggaccttgaacaacacgggagttagggggaccaaccccaagcacagttaaaaacccacatatggccgggcacagtggctcatgcctgtaattgtagcactttgggaggctgaggtgggtggatcacgaggtcaggagatcgagaccatcgtggccaacatggtgaaaccccgtctctactaaaaatacaaaaattagccaggtgtggtgacgcacacctgtagtcccagctactcgggaagctgaggcaggagaattgcttgaacccgggaggtggaggttgcagtgagctgaggttgtaccactgcactccagcctggcagcagagtgagacttcgtctccaaaacaaaacaaaactaaaaacacatatacgacttttgactcttcaaaaacttaactaacagcctactgttgaccagaagccttactgataacaaagagttgattaacacgtattctgtatgttatatgtattatagactgtagtcttaaagtaagctagagaaaagaaaatgttacaaagaacatcttaaggaatagaagatacatttacaattcattaagtggaagtgggtcatcataaaggtcttcatcctcattgtcttaaattagagtggtctgaagagaagaagacaaggggttggtcttgcttatctcaggggttgcagaagcggaagaaaatccatatataagtggacccatgcagttcaaacctgtgttgttcaaagatcaactgtttagtcttaatatctagtcaaaataaaatagaaaatattatctctttatcttctttcacatatatacagatgttcttcaacttagtatggggttatgtcctgataaactcattataagttgaaaatattgtaagttgaaagtgcatttaaggcggggcgcagtggcttacgcctgtgatcccagcactttgggaggccaagaccgggtggattacctgaggtcaggagttcaagaccagcctgaccaacatggtgaaaccccgtctctactgaaaatacaaaaattagccgggtgtggtggcgtgcgcctgtagtcccagctacgcgggaggctgagacatgagaatcgcttgaacccaggagacagaggttacagtgagccaagatcgtgccactgcactccagccaggtgacagagcgagactccatctcaaaaaaaaaaaaaaaagtgcatttaatacacctaacctactgaacatcttaggttagcctagtctatcttaaatgtgctcacaacacttacattagcttacagttgggcaaaatcatctaacacaaagcctatttaaaataaagtattgaatatctcatgtgatttatggagtcctgtaccaaaagtgagaagcagaatggttgtgtgagtactcacagcaccgttactaccaaacgcatattgctagcacaaaagtttcacttaaggaaaattagaaatcttgctgcattcttattatttctattattagtcttcacatctttttttctaccattacaggacattggttctcctcatgcttctgtagggagtcctctggatggtcaaaaggttaagcttttcacctttcttctccttccagtctttctctgtgtctgttttcttctgttcttcctgttttacgtgtgtttctatcttttctgccatatattaattataaatgctatgaccagtgtctgtttcatttaatatcagatacacaaaattactgcaacatgagttttcttgtcatgtatttaccagcttgaatttatttatttatttttactttatgtatttatttatttatttatttattttgagatggagtttcgctcttgttgcccaggctggagtgcaatggtgtgatcttggctcactgcaacctctgtctcctgggttcaagcgattctcctgcctcagcctcccaagtagctgggattacaagtgcatgccaacatgcctggctaattttgtatttttagcagagatggggtttcaccatgttggtcaggctggtctcgaacttctgacctcaggtgatccacccgccttggcttcccaaagcgctgggaatacggcatgagccacagtgcctggcctctgacttgaatttaattctgtcattagtggatactctgaacattaaatcaagaaaaatttttcatttgttatatatacctttctatggggaacaaaagtgctaattcttcaagggattaatttgatagtaattagatgaagcaaaacaacttgtggtataactcttgcagttttattcatactgttgtatttcttccctcaaaccaacaaacttgttttttaaacactgagtaacttctttaagagaaaacatagttaaagttatctttcatttaatattaaatagggaatatttacatagactcccttgtcttcattgcacttttttgttttggagacagggtctcactcttttgcccaggcttgagtgcagtggcacaatcacggcccactgcagcctcgacttcccaggctcaagtgatcctcccacctcagcctcccaagtagctgggacaacaggcatgtaccaccatgcccagctactgttctttttaaattttttgtagagatggggtctcactttgttgcccaagctggtctcaaactcctggccagaagcaatcctcccacctcggccttccaaagtgttgggaattacaggcatgagccactgtacctggcctttaatgcactttgtaggcaaggaaattgtaggatccaccgtaatcaccacaggaatgttgatgggttgttttttttttttaaagcaaaattttggctagactgtcagtcctattttttcttctaaagatggtgggttcctaacagctgcagagctgaggaggcggcccttgcaaggcagggattgttagaggtgggggaaaaaaaacaaacatttttttttttctattattcttttactattttttctattaccattttttctagtaccattttttctattattcttttactataattgtatataatatggcagctgcttgccacatgtactatgtggagagatgtaccaccctgcatcagcttttaccctacagaaggaaatcagcgttccattatattttattgttatcaacagtttaggaatacatagctttgcttttgcctttttctttccttccccttgtttcccctcgcctcagagaaaagaaggaaaaaaaaattcatctttcctacccccctctttttggatgataggacttgaagacaatctgaaataccacataaactcacttccagatgttttttgtttcatatgcaattgaattgggctcagactgtgtttttaagctgtatggtaaaaatatcactgtcttctagggccttattggggggcagggagagacgtgacactttgtcagaagggattgagtctgctaacttaaactttccttgattcaggaatacaaagtctccagctgtgaacagagactcatcagtgaaatagagtacaggctagaaaggtctcctgtggatgaatcaggtgatgaagttcagtatggagatgtgcctgtggaaaatggaatggcaccattctttgagatgaagctgaaacattacaagatctttgagggaatgccagtaactttcacatgtagagtggctggaaatccaaagccaaaggtgagctgggagatggaggctttttaagagtcattctctgaggaaaggtttagcttccaaaacatagcatgccagtaggagaaagagatacaaatgatctttctcaatacccacgatataaagggttttaaatattcttaagttctgggccatcttcaggaggcattagaaaccaaaaaaggtggtggggggagtggagtttgggtttgaagaatagagaataactaacagggagctcttcacacacctatatcatttattcctcgttgttattcccaaatcacaaataactaaactgagttctgtgaagtgagtttccaaggtcagagagctggtgagtggccaggcctgcatatgaacccagtgctctgtaccatacagacaagtaatgctcaccactggttgtaaaaacttccaatctttaatcaaaaaaccaaggctgcttatattaatatttacagagggaggtggggtgaagaatattgtttagaacggataatgacaaattctgataccatgcaggactaggatgacctggatgggagctctctccatacaaacatatggaaatgctggataaggagctgccctatctttaaaggaaggactagaataactgtttactagcccagcaaggcagtaaacaggagtacacttttccctagagcttgagtgaaaagaataaaaaaaagggaaaaaattaaaacccctaaactacactatcacatgatagggagccaaaagctgagaaatgtgaaatttagtgctggatgattaaaattcttagaagcaagcaaaaagttgccttatataaaggtaataatatgtgaagaaataaccatgaggagagttgtgttaggccgtttttgcataaagggatt

SEQ ID NO: 10324 - DNA, 6000 bp, Homo sapiens
atggtagtgtgcgcctgtggtcccagctacctgggagctgaggtgggaagatcacctaagctccagaggtcaatgcttcagtgagccataatagcaccattgtactccagcctgggtgacagaatgaaaccctgtctcaaaaaaacaaaaaaaactaaaaaaactagtggtgatgttgtcctaatttctgttttcttttcttcttttcttttcttttcttttttttttttttttgagatggagtcttgctctgtcactcaggctggagtggaatggcatgatcttggctcactgcaacctctcactcccaggttcatgtgattctcctgcctcagcctcccaagtagctgggaatacaggtacccaccaccacgcccagctaatttttgtatttttagtggagacagggtttcatcatgttggtcaggctgatcttgaactcctgacctcaggtgatcctcccacctcagcctcctaaagtgctgggattacaggtgtgagccaccacgcctggctgttttctgctgctataacagagtaccacggacaaagtaatttataaagaaaagatatttatttcgttcattgttctggaggctgggaagcccaaaatcatgggcttcccaaagggtcacatctggccagggccttcttgctgcatcgtaacatgtcagaaggcatcacatggcattcccactataacgaacccattcttccccactataacagcattcatctatccagagccctcatgacctaattacctcttaaagggcccacttctcaacattgttaaaatgacaattaaatgtcaacatgagttttggaagggacactacaaccatggaagatgttgatcactttttttcaagtattttgtctttttttctgggaagtgatagtgtttttattgttgagttaaaaaaatactgaatttggctttttaccttgtgtcatgtctgagtaaacagtctactttttccattactgccaatttcctttatatctgttttggatttatctctcatgaatttacgtaaactctttttgaacctataggatttttctgtctttcaagcttctagaagttttaccctgtgctgcctttcagagcgtgggaaacagttccacagccaagtctggttaccttttcttttggcactttcccctcagactttacattcccagccttttctgttggttttcctgaggagtatctttcaccccaaattctacttacagaggctggaagtacatgaaatacttcctgtgatttgtagaactggatctcaaaatgaaggtgcatacatattgaacatatgtagatgccttttgagtgtgtgagaatagaagataatgttagagattagggattagtttatttctccatccttaagccaaatagtggtgttttacccctgagctatgcctaagtggttgccagtcttttccgcatggtcttgctcttgactgcttttcattgcttccacttcagtgtgctccagggaaggaaacgaggacaggtggagaattagattgagatttaaatcccaatgttataatttacctgcttaataatcttcgacaaataatatggccccaatgggcctttgttacttcctagaataaatgtgaggattaagtgggatctcataatctgcctcactggcttgggatgtaaagttggtcatgctttttaaaattttctaattaatcatttgaatctctacttaccaataagggcaggaagtctgcgatcctgtatttgaaatcttctttacaaattgaccgagaaccctaagtgcttactcttcccaggaaaatctccttcccatctccactggggagaaacttggaaaagcctgaccagcccgctggtaggccctgggatcactgcggttgtttctgttgggaccttttgatgcattggccccacccagtccagtgggcctttatccattgccaccctgtcccttccggtccagtcctggcacacaacatggcggtgtccaagcctgggctctcaagatgacttctcttcaggtcatatccatatacttagtcattgtgtcctgtggcatctgtccagggtgactggacacagaggaacctgtcatcaggcaagaaacccctgtctttcctggtgtgtgttaggaccagctgacctcagtcggaaacatcctaattcttttgagaaattctgataacactactttttttttttttttttttttttgagacggagtctcgctctgtcgtgcaggctgccaggctgaagtttggtggcataatctccgctcactgcaagctccacctccctggttcatgccattctgccacctcagcctcctgagtagctggaattacaggtgcccgccaccacacctggctaatttttttgtatttttagtagagaatgggtttcaccgtgttagccaggatggtctcgatctcctgacctcgtgatccacctgcctcagcctcccaaagtgctgggattacaggcatgagacactgcgcccggccaacactacattttaaaagagaagtggccaaggtcacctttctccctctcccaggaggctccttaaggctgctatgcatatttagccccctcccctctatcagcactgagtacccagcaatcacaaaagttcccgtcacaccattctcatcagaaatgggggtgcttataccatccttatcaggaatggaggtgcttatacaaaacttaaatttgtataactaaaaagggcgattcaagtgactcttcctgggaacaaagaaggttgacactttgggaggctgaggcgggcagatcacgaggtcaggagatcgagaccatcctggctaacactgaaaccccgtctctactaaaaatacaaaaaattagccaggcatggtggtggtcgcctgtagtcccagctactcagaaggctgaggcaggagaatggcatgaacccgggaggcagagcttgcagtcagccgagatcgcgccactccactgcactccagcctgggcgacagtaggagactccatctcaaaaaaaaaaaaaaaaaaaaaaagaaggttgactaaggggcttttggacattatctaggcagacacccctgaccccttctcttgctaaataagtaaataaagttctgcttcaccagacatagccacatatgtgtaaagcacctagccacctgtattggtctgtttttacgctgctaataaagacatacccaagactgggtaatttataaaggaaaaaggtttaattgactcacagttccacatggctggggaggcctcacaatcatggcagagggggaaggggaagcaagacacgttttacatggtggcagaaaaggcaagagcgtgtgtaggggaactcccctttatcaaaccatcagaacttgagagacttattcactatcatgagaacagcacgggagaaacccgcccccatgattcaatgaccttccaccaggttcttcccatgacacatgggaattataagagctataattcaagatgagatttgggtgcgggggaaacacagccaaaccatatcaccacctctgtcacccctgagaagtgctcagaaaatgttagctgtctccctcctcccttcctcctcagcctgaccacacctctgcatcattcaagctgggaacaccttgccttccagagacctttcccgttcctcagtgtccattctctgcagggctctgcgtaaatacgccctgtgctgactgaccccttatacgcaacctccagggaggctggatggccagagctgccttcagggtttgtttgccaaaggcagtttattctttcttcaaatagttagaatttacttcacatttgaatctaacttgtatttttatacagtcagcatgtcctgagcattctgtcatggagaagaatttgctcatccatgaataaacaatgcatagctagtatccctcttgagacaggtagaggcgtttatgaagtgtgccttgttactagcctgtgccccacaaataaactttctgctgtgagaaggggtgtggcacctgctttttcagaggtttagtttcacagaaccatacagtccttgggttttgccagcagtgcctgcttagaatgcacagaggggccctgggcactgtggtcagaggctgtcctcagaccccatctccatttcagaccaagctctttaccacatccccttgcaggattcccagatgtccctaggaggccaggggtatgtatctcaaagtagactcttatctccaaaagcaagtgagagctcccttgaattattttgggtgaaggaattagttttcacatgtttcatgagacataattaggtgcctaataccatattattctcacaggtgtttaattattgactttagacacaaattctaatagaactagaagaaaaactgagacaaattctgaagctccttgaaattattcttagtccctcctgacatttcctccaccggcgttttttttctttttgctctatttccagcagacacgctttgctaatgctacaaggtgtggctttggctttgttgttttttccggagttagcttttctgtctgtgcatcctggctctttgaaatcccaactgaatttggagaaattatttcttggcatccaccctactttccagggacacaatgtgatgctgacgacatagcccggtcactccacttgacaacaagtttgtttgtctcatctcacatacatattcagtggtgagtaagaacagaagtggaaagccttacttaccacagtttattatatgtttcatgcctgtgataattacttttataatgccacttgtgaaaaaattgatcagattaggatgaatcaccttgctggccaacagttattggaatgattctccatgtgtgacttcgttgcactattacaaaatgtggcaggatagacctgcccagccattgttgccgatgttcatttgtaatgctgccttaaggagatgaggagatgagagccaattgttccagcagctcagcctgccctgccaacagttcagaggaggagctgccagtgggactggaggtgcatggaaacctggagctcgttttcacagtggtgtccactgtgatgatggggctgctcatgttctctttgggatgttccgtggagatccggaagctgtggtcgcacatcaggagaccctggggcattgctgtgggactgctctgccagtttgggctcatgccttttacagcttatctcctggccattagcttttctctgaagccagtccaagctattgctgttctcatcatgggctgctgcccggggggcaccatctctaacattttcaccttctgggttgatggagatatggatctcaggtaagtaaccccagggaagctcagcagtctgtctcttatcctgcctagggggaataactgaaactcttgtgttaaacactcttctaatcttttggtagagattctagtgggaaatgttacaaatatcacagagacttgttcagccatgggtgggctttcctttcagtgctcaaaagttactttgctgatgatcattttctttattggctactgttctgagcagtgggatgcgttctgagcagtggaggcaggtctgcacctcacccagtggcccttcctaagcttgagctcattcttacctacactggcctctttagcaactcctaggacttaaaccaagaatcccaagaagctaacgattgtggtttggtagcagccgtcgtggttgtgtcagtggcatagtcagaatgagactcccgtagctccagtcagtgatgcctgagcacctactttaggaaagaagcactttagaggactggataaaggagctttaggggtgtctggtggccatatccagctttaagtgctgagatggcttgtcgatttgacttcaggagcaatgcgaaggctctcaggactaaaattgttctttcttgttgctttgcagatcgttaacatcatca

SEQ ID NO: 10325 - DNA, 6000 bp, Homo sapiens
actggctgactctttctctctcccctagatccatggatgcttcctagctgtgctcagtctctggcacccaacacctggccactactttggtgggcaccctactcttccagcttgggctctgacagatcatgctgggaaggatgctctgctgatcatacttgggtttgatagtcagtgcttgtgcacacacatacacccttatcccattagtgatgcagctctgatttcccatgtctcttcccaaatctggacaccttcaggaccctgcttgggctcctactgtccatgctatgttctctcctacttagatatcctttttttcttgttcaagctccaacacccctctttgggccactatggctcccctccacacagacactgctatactccacctaacgacttccaggctggatggcaaggaagagaagggaagaagagaaaggggtgtgtcatcttttagatttccttattagtccttccacagagaaaatgcatgcatgaaaatgtttacaagaggccagtttgctttatatttgcgatagtcacaaaagatctgaactgagaaaaaactgaaatcattagagaaagtaagatttgaagttaactgtcctttcacttggggaagtgaagtcttatttcttttttaggggtttcatgttttgttctgataagtgacttccaaattagacacttagaaataaaaaggctggaatggagacttgatattcttctgtcccaattatcttgttttacagacaagggaattcatcctggtgaggtcaaatgagtttcccaggtttcccaagtgcctgagtcagaaacgtgacatttttcaacatcctggccagtgtacttggcatgctaccctcattatcatttaaaagtattcgacctttaaggcaaatttctaagaaaaatatattttatacattatacattatattttaaatgggaagtgtttttcttttgtaataatatgacttatagaatttggaccctaaaatttatctggctaggtgcagtggcacaggcctgtaatcccagctgttgaggaggctgaggtgggaggatcactcgagcccaggagctctgggatgtagtgggctgtgccagtcactaagtttggcatcaatatgatgaccttcagatgtggggtggtggtgactggggaccaccaggttgtctgaggaggtgtgaactggctcaggtctgaatggagtaggtcaaaactccgtggtggtcaatagttggattgtgcctgtgaatagccactgcgtcctagcttgagcaacatagtgagatcctgcctcttaaaaaataaataaataaataaatgaaacattatttggttatgagttgatttgaaatgcttgggaccagaagtgtttcaaatttggattattaaagatttctgaatatttacatatatataaaatgagatattttggggatgggacccaagtctaaacacaaaattcatttatgtttcatatacaccctataaacataggctgaaagtaattctatataatatttccaataattttgtgcacctgtcaaatgaggtcaggtgtagaattttccattggtgtcatttcagcactcaaaaagtttcatattttgcagtattttggatttggaatttttgaattagagatgcctaacctgtagttctttggtgattatagtttattagactggatgatctagaaattagccttacctatttggtagttagtaacctgaaattttctgaacactttctcttaattgcattatgttaactgggcttagtaaagttggcatgcaggttggtcatttattttactgtttcttattttgtggacttgatgggctggcgaaatgtatgtgcatagacatgaatgactgataaatagataaattatatattctaaaaatcccacaatgtaagatttgtatttgtatttgtattattttcttttttgaggcagagtctcactctgtcacccaggttggagtgcagtgtcctgatcttggctcactgcaacctctgtctcctaggttcaagcgattttcatgcctcagcctcccgagtagcaaggattacaagcgtgcgccaccatgcctggctaatttttgtacttttagtagacacagggtttttacatgttggccaggttggtctgaactcctgatctcaagctatctgcccaccttattctcccaaagtgctgagattacaggcgtgagccacagtgcccagccaagatttgtatttttaaaaaccttttatatttgttaaaatctaacactttatggacaaatttagttttagaaaagctggaaataaacaacttgctgggtatagattagccatttagagcattcattaatttccaaaaatcattttgcatcacggaggtccaaaggaaaaataggcaacaaactatattttaaaatccaatgaaaggcttgaagagtcccacgagctgagtgatttaagaggacaactgtgatattaacttacttctggcccttagatgaaatatttgcccttttagcatcaacataattctgtaaattattattaacaaatacgtagattttataattggaaagagcacagtattaagatcatttagttcatctcccttcaggcatgaatcctcctaccacctactaaaggcggtcacccaggatctgttgatttgaatcacttttgatcatggagaaatcactatcttccaaggcagccatgccttataattccacagaaaccttcctctgggtgactttgccccatgactgctgccttctgtcctctgaagttagatataatatagttaaaccttcttccatatgacaatccttcagcttcgtctgcctagatccttagcctctgggaatgttctctacctgtctctttcttctgcagttatgtctttaggttcctcttctaagattaagattttttccctttccccatcttttcccctttgtctagacttaatgtctctttaaaatgtgctattttaggaggctgtgcattctcctgatgaaaggcaagaacggcatcttgtattctttttattgtccttagtcacgtgaatgcaaaatgtctgagacaggtctcagtcaatttagaaagtttattttggcaaggttaaggatgtgcccctgacacagcctcaggaagtcctgagacatgtgcccaaggtggtcgggggtacagtttgcttttatatattttagagagacatgagacatcaatcaatatgtgtaagatgtacattggttcagtccagtaaggtgagacaattggaagtgggggcttccaggttagaagtataatagacaagagacaaaaggttgcattcttttgaggccatgatcagccttccactcaatagacagtttagtctggcccagtgaatctgcattttttgcataaacgatggagaagagaaagcaatcagatatgcatttgtctcaggtgagcctcagagggatgaatttgaatagaatggcaggcaggtttgccctaagctggtcccttcttgatgtttccctttagcttggtgattttgaagtctcaagatttattttcctttcacagccatctaacagtgaagcatggtttcactttacacttgaaccactatatccaccagatacaaactttgcctcaaacaccacactcactttacacaaacctgttgacatcacacctaagtcagcttttcttgagctcccatatgaacaaataaacattcctctgatctgcggatatcccgccaggaagggccggcttgggcagtgctggctcagctagcccgccaccgctaccattggatttcctctttctcctctgattttaagaagtgagaaaaaaaagcaattcctgttaattatgtagacaatgcaagggtctccaggctccatttcagcaagttggtttcatcaagatcacgaaaagatgcatgcgtccccgagaccagagaggagttagggaccccgacacggaggtggcatcaggtaaccctcaggagtgagggtggggaagagggcatggctgatgctgggaatgagcagcgcccgcggagggaaggccggcggtcctgcgccccggcgtggacgcgcgcgggagttcaggctggggaaatgggtcaccacgtgctacggaggcggggacagggccctcctccccttatttgtaaagagcgccggagcggatcgcggagtttcaccgcggacctgtcagagatacagaggttgtgggggcgggagacagaaagagagagagatccagagaccgagtcttacgttgacacgcagagagaaagacgcagagacagacaaacaaacagataggagaggtgagaggccagcgagtgcttccgattaacttgccaagctcagagaagatccggggagagggagggtcccctttaaacgcgcaatccccaggactccggaagagcccttttctgcagctccttggggactgcacgtctcacttctaagtttgcggcggagagaataaagcagaaagacaggaagaggaggtggagttctacagttagtgtggttttagtttttcctaagaagtggcgtggtttggggctttatatccgggaggagcatatgtacgcaaatcctggggcgtttgcaaacccggatccggggcgtctggccccatgcccggccgggcgtttgagggctactgccacgcagcgtttctggagcctgccggctggtgccctggtggcctttatctctgtccccctttgtcctctttatctcaggctctccaggaggccggggggcccactccgcctatcgctcccctcggctacgctgccacttcaatgccccgcaggtcgcgagctgctgttctttcgaaggcgtcggagaaccaggggcgtcccgcgccacctctgactcggagcagcgccgagcactgacgctcccgcccttgggcaaggacgccagtgcgcccgcgcgcgtccctctgcgcggcagcccgtcgcgggccctcaaggggaagcccaggccaggatggccccgggtcgcgcggtggccgggctcctgttgctggcggccgccggcctcggaggagtggcggaggggccagggctagccttcagcgaggatgtgctgagcgtgttcggcgcgaatctgagcctgtcggcggcgcagctccagcacttgctggagcagatgggagccgcctcccgcgtgggcgtcccggagcctggccagctgcacttcaaccaggtaaggccgccaggtccgggcagccctccgtactgtgggtgtccctagacttcactttgtatatgagccgtttttatttgggaaaagtgcaggagaaagaatcttgttatatttctcaagtagaaggcggtatctggtgacacttgcttttcactagacgaggctgaaggattaaaaggttaacgttgttaagggatttggcagccggaaactgcagttttacgcctgatgaactgagaggtccgactctggtgattttaacattttatagaaaactttatgaagtagttgagggtgtgacgccactttaacagatgctttttagataggaatgagttacttaaatcttgccagaaagataacggctcgcacacttcctacaaggttagcaaggaagattatcacatgccaccctggttaacagttgcccggtgcgtaaccagtgctatttgaaaacgagatataatgtagttctggctcctgtgtacattacatgaggcattcagggctgaaacaggggcggccttgagactaagattctaatttggtcatccagatggtggtagactaggcttatattgttagttccttgtcatatgtcaggtcaaatatttgattctagtatttatccaaaatgattaaaaaaattttttcagtaataaacagggtactactaggcatttggcaataccttgggtttaagaacaagcttcaaactacgtaggagcagttaaacatcat

SEQ ID NO: 10326 - DNA, 6000 bp, Homo sapiens
tctatgacccagtcatttcagtcctaggaatatattaatcagaaatgcatacctgtgtccaccataatttgttaatagctccaactggaaactacccaaatgttcattaatagtagagtggataaattgtgggatattaacacaatggaatcctttttgcagtgagaatgagcatagcactatggacaaatcctgcaaacataatgttgaaataaagatgccaaacacaaaagagcacatattgtacaactaatgcacataaagtccctaaacaggcaaaatgaatctatgttcttagaagcaggattaatggtatacttgtagggcagaagagtagtgaccagaagaagattctaggaagctagcaatgctggtgtcatgccagacccctagtgactccaatagtaatggcactgtgtccgagagtccaaagaagatgcgtagacagcgaacaagacttgggtttattgggggaacttatatatagggatggtccagtggtagtaggctggacagaagaaccactactgtttgtaaaaagcatgcagtttatatagcattttcatttagcacactccacctagcaacctccatttaacccaaagcaaaggaccttgatcccctatattgcctgtgttgtaagggatgggctgggggttcagacgtccttcatagataaggagtgaaactcagggttagtcgctcctgtttccttagtttgggattctgagcacacattcgttttagatcacagggtcgttctcaggatatggttgttactgctgtcaggtgcatcctctctatagcggggtactggctacacagtttttgttcactagtgataattgttagagctatgcccttaatatatgtcttgtgtgtattatacttcaataaaaagttaaattttaaaaaacctagtaagactttctcttgctgcccccacctgtggctttggggaaggaattgactcttcacaaatgctgccctctctaaaaatattacacctccatgctctgtctcagcttaattcttctcaaggataaaggttatcaaacagtcagtctcttgcctccaggagtatttaataactcaattattccagctgtaatatgaatcttgttcactaccctctaaggaaaagtgtgtgtatgtgtaattttttctccaccataccaggtaaattgcagagaaggagcttttattggagaagctaagaagtgttgaataagagagctatgatccaggaatacagttatcattggagaaatcattctccttttcttggatggaagtggcaaagagtgaacgtaagtttaatggtagtggactactaaatggctatttgacaagataattgtgacaaaaaaaatcccacaagtaatttcataggataatgtcagagggaaaacctgtaagaacaagccactccttccttctctcctcctctgcaatgctcactcaaccatgtaaactgatttggagttagaggacctgagtctgattccatcttctgtgacattcttgctaagtgaactgtagaaaaaacctttcacctctctgaaaaatggagacgaggattagcaacctggtcagacctggtcagaaaccacatcaagtgcatgtttcatttcttttgcatgtttgcctttacaggccaaatgtgtctgtgcagacccttattgcttctgaccattgttgtacaggagagggggtgtgaccaggtaattctttttacccatgtataagccagttttgttttctgtttgtttttttttggtacagatgggatcttatcgtgttgcccaggctggtcttgaacttctggcctcttgccttaacctcccaaagtgctggcattacaggcatgagccactagcacctggctataagccattttctttcttgcttctttttttttcaagacagagtctcactttgttgcccaggttgtagtgcagtggtataatctcgtttcgctgcaacccccactttctgggttcaagtgattcttattcctcagcctcccgagtagctgggattacaggtgtgcaccaccactctcagttaatttttgtatttttagtagagaaaaagttttgccatgttggccaggctgggccattttcttattgaagtgttcaggtgggcaagctccctcctcccccactcctagaggcaaagaaaaaaaaaatcgccaaaacgtgatgacaacaagtatgtctgtgttcaaaattaaatttgtgtttttggtaagcctcatgatagagccacttactttattttgtaatggattatctaagtcagttttccagataaccagtcaagtttgtctcaagatcagagttattttcccaaagctatagacaggatgaaaccaagcaatagtagttagctcaattgcacaagcaaatttctgaaagatgttggaacttcttcagagttaatggaaaaccttgcaggaattatggtgtatggtaataatcaaatgacacttcactcctttcctacttctgtttctatctatctgacttaatagttccctatatttaggcatctatttatatcatgtatcctcatgaaacttggacaattttataccatgttgatcacatgagtaaaaaatatctggggaaattctctcttaacctacattccaggaaaaaaaaaataggaacaccatattatcattcaagtcttttgagaagacatcacattttcttccaaaggcaagtacccattgacttagaaagagtggtgtttaagatcaagatctttgtgccttggtttcttcgtctacctataacttatttaaggtattatgaatgagacagtgtacacagagggcctggcaattagtaaatgattaatattactactgctgctattagttttaaattatcaatatatttatttataaatttgctgcctcttccaatagaaaataagccctatgatactagaatcttacctgttatgtataggtaggcaacgctgaatgtgtctcaaatggagcataaaaacaaagtctcttggtaaggatgggatttagggtcaaaggaaattcccctaaggaactctaaaactgacattatcttaagttttagcacttggggaagtttcaaagactttccaaaaggataagtatatcatgatatgtaggtataaataccaagacaactgcagagttattttaatccaagtctgttgaggctttattatgtgatacagcattgtgagagttaaggtaacagaaaatgatacactttgttcttcaaacttatttggcaaatcaagggtactggaggtttataacaattagtagtgtctaagtcaagttacaccccaactataccaggaaaaagaaggacaggaaagcacacactgtgaaattttactgtgcaccaacatattttacacatcaggtgggctgttatggaaattaagaactctgcacaaaatgtattttttttaaaagttttatcaagaaaggaacattttcttctaaaaatgattagtacagctaaacaaaataaaaataataatcctatcgcacaaattaaaaataaaacctgagaagttttgatcaggcttgcctaaaacgagttgaaaccaaagccattttaagaatccaaaatatgagattagttttgttcaaaaagaattatccataaaagttaatagatgtttgcatagttaccataaaataagaggtaagcctttatgtatttttacttcataaagttgaatttctattaaaatctattacaagaaagggaaagtaactttccagtaatattcagattttttagtaatattgagcctacatttatgggacatcattttttaatgtttgtccactgaatattttaagttatgtttgtcataggaaattaaatttgcttaccattcttaacgataatctctttcctcatttggttatacttatctcaattagtataagagacttgttgatttttttaaaaattaaggacatactaaatttccccgagatagttattttgcagtaatatagataagcgactcagattaactttaaaacaaaccaccatacattccattcaatttatttttgccaggcattgttttagcggctttatacagccatgtacaaaatagacaagattccagcatcatgatgcttattttctattctaggacacaaaatagaaaaaaaaatctcaaatagtgataagcgttttgaagaaaagtatataggacagccgggtagagaatgaccaggactaccatagctagggtggtcaaggaaggcctctcttgagtttgagttaagagctgaatgagcatggcagagagaaacagttaacgtggatactgttcaggtttctttctccctgggaccaaaatgtttcgaagtctgcatacctccgtttaccctaacttgtcatgaacataaaacctcttatattgcaggcaaaaatctgaggttcacagattagtagggcaagtagctgattccgaagtgtgtacttgcctttatgatactggatacacactggtgttaacaaggagaacgatgtacgtggcagacgttcggagagtactggacatgttggttctaatttgggtttatcctggcaggctctaggtagagaggctcagaaaacctgcgtccatccttcccatctttcctcccatttccgaaaccacggccccggtttcgagtccagaaaaaaaggaataagtagaactcccaaaggacagctttcctggctgaacaagatgtaaacagtttacgtgatttccaaccaagcgcaaaagtacaggtgcaaaagaagacggcagacaccaaacttcccctgcagccacgccctccccactttgggagtctgggtccccgggaaggaaggcctccctattggtgctcaacgtgttacgtcacttccgctacctccacggcaggcgtcgctaaatgacgttgccgtttccgggtcacccaggcagcttgtggcggcgaagccatcggtgttcgctgatgtccagtctatggagtcagttggtaccggtggcggcgcggaggcagaaggcggtgtccgagtaggggcctctgccccaccaggatgttacccggcttggccgccgccgcggcccacagatgtagctggtcctccctgtgccggctccgtctgcgatgcagggcggcggcctgtaatcccagcgaccgccagggtgagtgtcccgcgctggccgctggctccgtagaagccgaactggagggccaggctgggctcggcgcctcgcctggggcaattcgcccacttgcctttcgccaacctcagaaccttcctttctggcctccgcctttccagttcagcctgcgcagcccgcgggggtcctgacaggtctctgactctgatgccttctgcagccctagcatggcccccgcgggaacttgtgggcacctcgcgggccggattgcacctctgaagcctaccgctttgtaccaaacaaaatgttacgtgcgcatcgcggtgtcccgcggttactcacctccgcggttggaaattgcggactccgcaaagttccagggtctttggagctttccagcgcaccttcatttagcacttggttgagattttcttggccttctttttcttactctcccaacttattttcttaaattttctaaaaggaaggaggggtgctactcactacggatcttttggaagaagtacgaaagtatccgacaatcattgaatgaacccagtttgggtccgaaaaacaaagaaactcttcagttcggctgagcagtctttttggtgaaaaggtggcagttgtagtggtaacccagaaaaaaaggtggttgaagagaattttcgtctctctcaacattcttttctgactcaaatttaaatggtttgagagtttccaaaataacattgaactaatcaggcttaccttcgtttttgccgtagcttgacacacattgcttgacactgagaactgataggatctctg

SEQ ID NO: 10327 - DNA, 6000 bp, Homo sapiens
ttcaacaaaagtggccaaaacaaacatgtctgtacaatagtccccccttatcctcagggaatatgtcctaagaccccagtggatgtctgaatctgtgggtagtactgaaccctatatatatctactatgttttttctataaatacatacctcttacaaagtttaatttataaattagttgcagtaaaatattaacaacagtaactggtaataaaataggacaattatgacaatatgccagcatcactactgttgcactttggggccattattaaatgaaatattaattgaacacaagcactggaatactgagacagttgatctgattactgagcctgcctactcagtgactaatggctgcctgtctacactacctacccattggtcactaatgccaggcacctgtaaccccagatactcggaaggctgaggcaggagaatcgcttgaacccgggaggcggaggttgcagtgagccaagatcatgacactgtactccagcctgggcaacagaaggagacctgtctcaagaaaaaagaaaagacaacaaaaaggaatgcaaaaatcctccataatccaatatattttggcccagtctttttgaatgcaactatataaatacttttaaagaaactggggccaagagccaccctgcagtctgctatgaccatgcctacatgcctatgaatagccactgcactccagcctggacaatgtaacatctctaaaaaaattttttctaacaaaatacaaaagaaagaaatcaacataaaacggtacataacttgcttttttcacataaaaatataacatgaaaatttaaaatagttgcatagtatttattctattatgtaaataaaaaacaatttactcaaccagttgcatattgttggatacttaggttgtttctaatttttcttctaccagtcttatacgttgtacttaaattgtctgcaagtcagatgatttctgtaaataggcaaaatacataatttataataaagtatttttattattaaactgaaaaagttctatttcactagtagttaaataagcacaaaatatgaaacttttaaaacagcatattgacaaagattcttaaggtagcagtacttacttctggaaatgcaatggaagaagccctcaaacacctttgagggtgctgaggtactgaatacaacttctgtgtatgcttattgcttttctgcctactcaacatccatttttcctctttctgttaacagcacccactattcctctgaggaatcccttccccaaatttgagttgatgtgtcttgagtggggatgagaccactcccttgcttgagtgaaagcattccatcctatggccacaatgattggttgaaggatgggtacacttctcttgcctattttctatttaatttttaaatttaaatgcttctactcttaaaaagcctcctagcttcctttcaagaaaagtggccaaaacaaacattagtgtacaatagttctcccttattaatcccaagttaaccccaggacttttatgagaactcctggaagtaggtgctctctttccatgattgtttctatggtaggatatatccaaattgattgtatccttgccactgtaacataatagcatatatctgaatcttttccagtactgaaaaatggcatctaattgcttcaatttaattgctctggatactagtgaatgtgactattttcataaacatgttggctgcttgcatctcttttgtgatcttgtgtctattcatgtcatttgcctcttttcctataaaataacacaataaaacttataaattaatcataaattttctcttaatttcttaaatgatgtttttactataacaaagttgaaagtttttatgtatccatatctactgagctccccattatgatttcttctgttacttttttgcttagaaaaattttccatatccaaagatgagataaacacttgccaatctttttctctagtattttgttgcattattattattataatagttaaccctttaatctacttggaattagctttggtatacactgtgccacaaagctctaaatttatttttccccaaatagctagcttaatttcatcttccttccttccttaatttttttttttgacacggtttgctgtcacccatgcctgagtacagtggcatggtcatggctcactgcagccttgccctcctgcgctcaagcgatcctcccacctcagcctcccaaatagctggtaccacaggcatatgccaccacaggcatgcgccaccatgtctggccaatttttgtagtttttgtagagacagggtttcaccatgttgtccagggtggtgtcaagttcctgggctcaagagatttgcccaccttggcctcccataggcgtgagccccatgcctggccatattttctaagtactatgttatctctcccttttacatattgtttcccccttgggaaaagaatacttcacttcaccagtgtcaccacaccagtgtcatcacacctggagaatgggcttaaacctaatcctggggttttctcatacatagtgaggaagatgagaaagaaggggaggccagagcacctgttttctttacaatgacaatcaccccatcagcaggagtgacatcaggtgtgtaggtcccaagaatcccccaagattgcaggtgcaacatgccccatgatttacaatcgcagcccatcatccccttcttttttattttttcagatggagtctcagtctgtcatccaggctagagtgcagtgtcacgatcttggctctctgcaaactccacctcccaggttcaagcaattctcctgcctcagtctcctgtgtagctggtactacaggcacacaccaccatacccaactaatttttgtctttttagtccagatggggtttcaccatgttggccaggctggtctcgaattcctgtcttcaagtgatccacctgtctcagcctcccaaattgctgggattgcagacaaaagccatgatgccaggcccctttctgttttcagtcttcgcccattgcacaagttgccgcccaagtccctccctaaaccctgagaggaggtagttggatgagttgagttggtctgcctctaattactgcttatttaatgtgattgtgaattttaatatcattaacatgatgagggtttctgaggcaaataggagtggtgcctgcacagttggcttcagctggatcccttgccatttgtgttcttggcttatctcattctgtggtttcaagactgtgaaggctcagcagtgccttccctccttatcttgtctgtttctccacacatcttccctgggtctactaatgtaacggttgggtagcatggatcattgtatatctgaatatctttctttttacctacataaggtgacatgtcaacttaaaatatttttggtcacaacccacttcctttaaagtttagctcactgaagtttttttttctgggtttagtgttttggaaaagtgtaagggtacattatcctcctagattcttgcaaaagctctgccctcgtggaatttacagtccaaaagagaaaaaataaattatttgtgatgaagagtgcaatatgctttgcatttgcaaagtcttacttttcatagtctccatcatcttcatgagatttggggaggaggaaaggctcagcccacccttgggtaatagaagtcactctgtgccaggacaggagttagggaaaagttcccagatagaagaattcactatatcttggctccttgtgaaagcaaccctgggctaagactgagccttgatttcattctagaaattcctgttggtttttacaactcaactgactatcactttatggtcacccccagggagctagatgcctccttaacaggccccacctggttggtaagcagcgaaattattttcctttctacatgccatctagtgactgacttaaaagttgttgcatctccattcctaagagctctgcttttgaattgttttgggataaacctgtctcaagcagggaatctcagcactttatttcttttcagtcctttaatcctaatgccagggccttactcataaagcttcgtaaatctgtggccactgaaatatcctctctccacctgccaataacttcttaaacacacatttttcatggaaattgttattagccaagctcttctctgccctctttagggacacatcgccgtgcagattcagccaggtacttgtgggttcggttgataagactgagaattcctcgttcctcagtttcctcgtttgtaaaaatcgagcttgtaaaaatggtatctatctcacggctttgctgtaagaatcgaatgaaataatgcacacgcacttgcacaaaacccgctatattattattacattctactttaagactgaaaatcatgcaaaaaattgtttgcaaattcaagccagatatcgtgtcctgcttactagagaatcgctcatattaagtcaagcacccctcttagggctgcaggctataggaacagtttctgccatgagcgtgcatcgatgaggttatccacccgccccctccactttgtgtgtctgggtctccagatttcattataaagaggcagagcccatcagagaacttgatcggcagccaggaacggttttttcctgctctggtcctttgtcaggtctttgttccgcccctggctacactcgataacagaaccacttactggcgattcacaggaggggaccgggcggcagggcggggcggggcctgcggggcgcggggccgcggcgcggagccggcgcagcgattgggttcacccggggggccgcgctgcgcggagtgccaggctgcgggcggctgcagacctgggagcggagaccggcccgccgcccccgacgccgccgagcacgtcagcggcgcgcagccggggctcggagaccgacgggcagaacgacgggcggcgactgcggcgaccgcgggacggcgagaggcacgcggcgggaggggaccggaatccgcagctccggccgcgccatggacggcaacgacaacgtgaccctgctcttcgcccctctgctgcgggacaactacaccctggcgcccaatgccagcagcctgggccccggcacggacctcgccctcgcccctgcctccagcgccggccccggccctgggctcagcctcgggccgggtccgagcttcggcttcagccccggccccactccgaccccggagcccacgaccagcggcctcgcgggcggcgcggcgagccacggcccttccccgttccctcggccctgggcgccccacgcgctcccgttctgggacacgccgctgaaccacgggctgaacgtgttcgtgggcgccgccctgtgcatcaccatgctgggcctgggctgcacggtggacgtgaaccacttcggggcgcacgtccgtcggcccgtgggcgcgctgctggcagcgctctgccagttcggcctcctgccgctgctggccttcctgctggccctcgccttcaagctggacgaggtggccgccgtggcggtgctcctgtgtggctgctgtcccggcggcaatctctccaatcttatgtccctgctggttgacggcgacatgaacctcaggtacggatctgtctattccttgggcatctgtctcatcccagacgcgcgtttacggccgtgggctcacgacgaaggacagaggcagtggaggggttggaattaggcgtggaggaaggaggagaaaaggagaggaagttgatgacgccccggctttagaagtcaaggccgacctgcaggttgtgctgctaggggagcaagctagacggcgagggagctgctccaaggctgggattccatgcgcagcgcggcccttcagcagggtccctcgccgtcctccccgagcgtcggggtggcagcgcaggtcgttgtccagtggaagacaaagagaagggggagtctgaactagaactcgccggcaacgtaaaagtaaa

SEQ ID NO: 10328 - DNA, 6000 bp, Homo sapiens
gcatgtcactatcctcacatgacttcccattattgtgaaaataaactctaaactatttgcctggtatttacggcagaagcatctgcccccactcccatatttctccagccttatttctactttttccttcacatttcaccttcagtgctgctttctccaggaaggctttgacagtcccattacttcagagttggctaatacctctgtcttctccaaattcatggagcctacctccacacttaccagactatgctacagttatatatgtcttttttttttttttttgagattcagtctctctctgtcacccaagctggagtgcagtggtgcagtcttggctcactgcaagctccgcctcccgggttcacaccattctcctgcctcagcctcccgagtagctgggactacaggcgcccaccaccaagcccagctaatttttttgtatttttttagtagagacggggtttcaccgtgttaaccaggatggtctcgatctcctgacctcgtgatcctcccaccttggtctcccaaagtgctgggattacaggcgtgagccaccgtgcccggcccctgcagttatatatgccttaatatggactctgcaatagtctgtatggtccatgaggcaaaggactgggtttacctggaaagcctccgctatgcccataactagcataatgtctgacatttaggcgatattcaagaaatatttgttgaatgaatgaaatacttgataaataacttcaacctttttaactgataaatttttaaatgattaattttaaaccaacataaccttctaaattaatattcctttccctcctcatcatcctctaaaaggacacatgaactctctattctgctggtttaagcagatgatctagacatcaacctagatgcatcatttaatttaatttaaggtaaaccagcaattccattttttgttgccgacaatgaattaaaaaaaaaaaaacagagagataaggcctgagaagcacccattgtatttagcaatagggaggttccagtgaccttgtatagaataatttcaaggaagtggtgggaatagaagccagaccacaatgggttgaggaatgactgagaggtgaggaaatggaataggtattcatgcatttccatgggtccaattacacacataaaaaacctaaaagaatagtacattaaaatttaacccatgggccatctaaatagaaggaaataaagtttttattacttttagtttatgaactttccaggaatttttttcttctcatttagcctgggattttctctgtagcccattactatattctttacggcaacttagaaacactgatatcaggattagtttatttgtagcatcagggccacattaaactgattctaggaaagtttcatagaatgagaagaaaaacttatggctggaatatttgcctcctcagaggtcttggtagatgattcccaggttattgatttatatttctcagaattatattcaaacacagtgtgctagtttgaaatctcctttcattcaccttctttccttaatctacaaaattagcaattgtttataaattgagtgtcttatgtgtccaaggacttattaggggttgaagaagatataaaaaggaagaagtccattctctgtagatttttatgatcttattgaaggaatatccatttcatgagaagataataatacatggaagcacacattaagtgctaaacaaatagataacagggatgtctggagtctggagaagggatgggtatagcaatattaggcagtgaagatggattccaaatgggccttgcaggacagacaggagttgggtagtttgagaggagatgtatcatattctaggcaggggtcatgggagatgcaaagtcacagtgaagttacaatataaggctgattataactggttaggatagagtattcatctatccttttacagcatgctgaagggggaaggaatattagagacaggcaagtgaggttcttaagtgttaggactttagactctcggcataaatgtgtacaatttttttgagacagggtctcactgtgtcacccaggctggattgcagtggcacgatcatgactcactgcagccttgacctcctgggctcaagcgatcctcctgctcatccttctgagtaactgggactactggtgtgcaccatcatgcttagctaatttttaattatttttgtcattcaagctggttttgaactcctgggcttaagtgatcctcctgccttggtgtctcaaagtgctaggattacaagtgtgagccaccatgccaggccagaaatgtgtaattttgaaggtttttgtttttgtttttttggtatgtgtgtgtgcaagggttgcagtttgggcagaagaaggacatgctgatgggtgatgcatcagtagaaacaaccttgtggagttgtaggataaccaggatgagaagggtattggatacgattaggttagaagctcctagctcctcagtgaagtggtacataagggctctctctgctggtgtgtcatttttatctgctagattctcaaacattttggtctcaggacccccttgtactcttaaaaattattgagaataccaaagagccttaatatatgtgatttatatctattaatacttaccattatagaaattaatgttaagaaaacttgaaaatatttaatttattaaacataacaataaacccattccatgctaattttattttttatttttttgagacggagtcttgctctgtcgcccaggctggaatgcagtggcgcgatctcggctcactgcaagctctgcctcctgggtgcaccccattctcagacctcagcctcccgagtagctgggactacaggcgcccgccacgaggcctggctaattttttgtagttttagtagagacggggtttcaccgtgttagccaggatggtctcgatctcctgaccttgtgatctgcccgcctcggcctcccaaagtgctgggattacaggcgtgagccaccgcacccggccaaggtgcactcatttcttgtggcaactccccagccctgagttgaagaagcagcatgccctccacactttatcctcagaaggactgagtgggaaacccttggtgtacatcaaggaaacaaaggcttttgatcttggcaaaatgggataatgcccatgggattccctagcagatgatgggaagtagggtggcctctgccccctgaagacatgtcaggggtgggaagcgaaggatctagattgggtgtctgtgctctgacaccacaccacacttttaggagtctaaaagaacaccttctcttttcaagacaagacctcgaaaagctgaatatggaatggggtagggctgggaaacttgtccatcactatgacaaagacagaaaatgttgtaaacctcttttaaaaagattgttgtagctttcaacattctttctttttctttagtaaaatctctaagaattccagcctgccttttgtttaggggaacctggaaaaagagattttaaacaaacaaaacatgacttaattttatttttcttaaaagaaactgaaatacaagtacattgttaaaaactttggcagatataaagaagcagaaaggaaaaaaaataaaaccacacataattttaccactcagagataaacactgttaacatttggagcacagatttatccttatttatagcagcattctctatatattgtttcataataatctttttatccctagcagtgcatcataaaacaaggcatctttatcctttaaattgtatattcaggaaaagcgttcttcatcttcccttcaaaaagagttttgagagtgaacgtaagtgtgtgtgtatgtatgtgtatgcatgtgagtgtgtgtgtatatgagtgtgagtgtgcatgtatgtgagagtgcatgtgtgttggtggcatcagtgccagagtgacttcagtaagaagtgtaagaaaacctgaggaaaaatggaaaaattaatcttggggaaacagagttggggtcacttgactggccacctcttaaacctagagattatttttatagagtgttcttggcttaaaccttagaaaactgtcttttatcttgatagaataataatgagtaaactttgaagaggactttaaagaggggaaaacttcaagagaaggtggagagagagattcagcgtgtgtatatatgtatacatatatatatgtatatataagtatgtatgtatatatcagggagatttggaagtgaaacttgagtgccttgtaattgaggcagtttcattattgcaggaagaacaaatctggaagcaatttcctcagtcactcgtgctttgaatgttcctgctgtgagtgtggaacatgtaagtcaccaattccattgttcagtgagccctaaaaggataaattaatgggacggttcacttgtttcaagggtcagaagtggtctcccaattgttaaattcaaactaccattttaaatgtatgtatttcaattgctctcttgggatctttggccagttgccatattcaaaacacttttaggtatcccaatgattatttaatgggaaagaaacctctggaatcctggaattcatatctactttagtatttattaagatgattactaatattgctatgtacctggcatgcagtagtgctcggtaaatatgtgttgaatgtatgaatgagtaaataaatgaatgaatctctcacttgtcttcacagcatttttggagccaactgcaaaaatggtttaagttcatagctgcaaactaaacaaaattatgaaaaagcaaaagaaatgaagtgcagaaagcgaagtatacctaaaattctcactctggtgagaaaagttggctgatgtttgaactgtaggatttttttttttctttcttgagccggagtcttggtttgtcaccaggctggagtgtagtggcactatctcggctcactgcagcctccgccttctgggttcaagcgattctcctgcctcagccttccgagtagctgggattacaggcatgcaccaacacgctcaggtaatttttatatttttagtatagacggggtttcaccatgttggccaggatggtcttgatctcttgacctcatgatctgcccgcctcggcctcccaaagtgctgggattacaggtgtgagccactgcagctggccggacttttttatttgtataaatgtaagtacaagggcagttttgttacatgaatatattgggtagtggtgaaatctgggcttttagtgtagccatcacctgaataatacatattgtgtccattaagtaatttcttattgtagggttatttttgaagtctgtctctgagtgggatcctaaatatggtttaacagttaatttaattgtgtgtttcaactcactattaggggcaacaaagtgcattctctgccagggtctcaatgattctttcattgaatccttctcagtgttggaccaagacatagcagccagaatactggcttacaagtcaaaaggcatgagaacacatatatctgaattctgtctttaacacttttacattgtttaatcttgtaccgttagaaatttacctttctagacaggatttcttcatccaaatttaacctaaaatctatttaagtggttgattaaagaggttatacgtgttaagcatatattatggtttgctattactgtagtccttatatgcttcccagaactcttatgataactattgcttataaaatttattcaccaactaattgcatactcatttgcgttactgatctctccattaatttttttgtgtatcatgtcttatttccccaagaatcagatgcatcaaaataacaaacttagcacatgtatctcctcctctaggaagccttccctgacctcattcctttaatcacatgatatgttgtgcatatttttatttgcttatctgttttatatgtatctcctttctatgctgaatgatgagat

SEQ ID NO: 10329 - DNA, 6000 bp, Homo sapiens
tctttgtaaattgaagggcttcacaggaagcaaagagagcagtgtgcatgttgctgctgattgtgttttctgggaacagaggacagaaggctgctctgaggcccataagaactcgcatcctgggggagacattcatcactcctcttataaatatgtcaccctctcatggggacttcctagacatttagatagaattatttgcaaggccccagtgaagcccctcccacaaaccctaggacacatcacctctatgggcatagcttcttccagattcaggtagagcgctaagggatgtggggtcaggtgggcctccacgtcctccaggaatgccttccgagcctgctgggctggcgagagcttggaaagcacgtctgcttccttgagcagcttgatctgcctcttctttggggccagttggggagctctgtgataaatctggggcagaaagccctccacagggacctgagtcaccagaccagtgcaaggcgggcagcccttcctgaagtcgtccagcccctttcttggaaataccaactgccggctgtgcagagaggtggggaacttcagcccgttcttgtgctttgtgaaacatctggaaggtagatagattctctttgtacctagaataccacatgcctgttcatattaaccacaggacttgggtgggagaaggaggtagtaaaaaggctggtctccagcttttagggttgggggtaggggaagtgggattcactggagaagctggagttaatcatattcctagttcatagcacagaattgctgctccgtacaaagcccctctcttgctttcttgtctattttatccccacatccgactctcactggtctcccttgcaaaagcaaaactgccctagtggatttggaatatatcctttgtttgtacacatccttgaaattctgaagcatccttatgtgtgcatgcactcttaatttacgtaaatggcactattctgcttcttgtttacccagcactatattttaaagacccttccatgtcactctatgtaaatctaattcattattccaactgccgccaccacatttcatctctccattcgctttgtgaaggacactcaagttgttgcctttcccaaggactctctctcttcactaaaagggacagagtgcagttgagcgggaagaacctggatcccactgacaactcagcccctaactagctgaatggcgttggctcttcatgtaacctctgtgggttccccctaaactcaggggatcaaaggctgcaaaatggctgtccatgggctacattgggccaacaaacctgtcatttggtcctccttgtgttttaataagaatcataatagctaacataaattgagaattttcaacataacagacactgttctactgttctaaatgctttacacatacgagcatatttaaatctcataacaaccctatgaattaggcacgagtattattcccatttacagataagaaaattgagcacaaagaagttaaaaaacaaaacacttgtcaaaggtcacacagctaataaatggtagagctgggagtttaacccaggtaggcagctccagaaaaaggtgcttaatcactctactggagtttatgataaataaaaatgttcacataaataatcgggaaaaatggctcctcttgaaaagccagatttttcaagatctgtgaaaagtgggtccacttatccaaggagccccaattggcatattggttgcccactggagacaaatcatctgctctctcattcacaacctccacctctcccaccgccatatatatagctgcttcactcagcctccttatccaccagcgccctgttagcattgagtagttagggcatatagatgagatggaagagacagatgggcaaacaggaaggaaaatagaacaagctcctgaataacctaacacaaccagcgaacaccaaagccacgacttggaatctgagcgtctcattatcctcacatattacagtgccttagttaggtaattctagagtctttgtgtccttccctgaagcctcttccaccttcagaccccttttatctataatgtctttttacaccaaatctaatccttgctacacccattgctacaaagtgtttttaagagattccagcctggccccaattcttctctagtgagtcctagaaacttcttacttgttgcatagatgtgtaggtgttgttttaagggcttaacccaactctactgtgaagatctagatgaaaggacacaaaaagatgaacttaacaaaaagttactctctgcatttaacagatcactcttaaatagctaaatggcagaaagatgctgaaattacatctaatcataagattaatgacccattcagcattacttattagtaagtaaccctccatattaaatgtctttacaaagttcattatatgcacatttacaactaactcatgcatccaagcacttcatgaaatcaaatctgagaacaaatatttttgtttaagtacagccatacaactcaaaatggggaatgtacgtggcagtgagctgaaacttcatagaatgttagaactggcagagatcctaaaagaaatccagtctactttcttcacttttctttttctgttttttttttttttttcaagacagggtctcactctgttgctcaagctagggtacagtggcaattatagctcaatagctcactgcagcctcaaactcctgggctcaagggatcctccaatctcagtcccccaagtagttgggactacaggtgtgcggcaccatgcctagctaaatttttaaattgcttttgtagagagaggagacagggtcttgctatgttgcccaggctggtctcaaacttcgggttcaagtgatcctcctgcctccgcttcccaaagtgttgggattacaggcgcgagccactttcctcatttctttcctttcttttttttttttaattcgagacagggttccactctgttacccaggctggagtgcaatggtgtaatcttggctcactgcaacctctgcctctcagactcaagtaatccctccacctcagcctcttgagtagctgggactacaggcatgtgccaccatgcctggctaccgctttcctctttttaataaggaaactaagttccaagaggagagtaaggcaaccagtgtaaagggagggctttcctctcccccacatggcctctcatagttaataagcttaccattctgcattatgttaggttcaggaaaaatcttgcttggcccataaaataaaactggaaacaatttttctaaatatttactgttttcacagacactagtacatgatatatggatatttccctctttaagaattgcaaaaggataccggacatgtatcctaaagaaatgaaaaagtatgttctcagaaaattctgtacacaaatgtcgatagcagctttctacatattagccccaaaactggaatgtccaaaacaacctgaatgtccttcaacaagtgaatggataaacaaactgtggtacatccacaccaaggaacacgactcagcaacaaaaatgaactactgatacacacaacttggatggatctcagaggctttatgatgagtgaaaaagagccagtctcaaacagttacatactgtattattctgtttatctaacattctcaaaagaactaacttacagaaatggagagcagcttagcgattgacaaggctggggtgggaaaagaagtgacagcaaaggggtaatactaagagttcctctgtggggaaggaacagttttgtatctttatgtatacatatgaccaaatgttacagaactcacacacctgagtgcaagtaagagctgataaaatccaagtaaggtctctagttcaattagcatattctgccaatgacgtttcctggtttggcaatgtgctatcgttatgtaaaatggtaccactgtaagcagctaggggaagggtacatgggacctctgtactatttctgcaacttctggtgagcctacagttatttcaaaacaaaatttttaaatgggggggagaagcttcccaaagaagctcttatgaataactgctagaaacaactatgaataattgctaacatgtacacgatacgttctatgtgccagtgacaactttacatgtgctatctccattaatcctcacgacaatcttagaaagctgattcctaagttattgccccattttatagttaggaaagtgagcccagaaggagcaaccaacttgcctaaggtcaccaggcaaacaagaggagaactagccttctactcaagcctttctgattctagactttggaatcttcaccaccacatcgtgctgtctccaagacagacgaattccattctcaaaagattgtcaaggagtcggtaaaggcaaaaaccttcttgttcctgctctgaggctaccacaaccgtacaaaatgttagcagacctccctagcaccccaggcgctcccccaaccctgggctccacttggccacagccgccatctggataccaaaggctccaggggcagcagatgcctaacatcggatacagggctccaggcgccccggggcatctggcgaacagttggttggctaggccggaaaagggtgggtggctagcaggagggcaccagcctccgcagcggactctgcggccatcactttcccatcagaaatggggatattagtctacatccctgggggcgtgggaggcgggggttgtgaggatgacagcaggaaaaatcctttgcaaagagcagcgccaagcgttggttatctcagcgtattatgttgtacgtacaggaagcattgaggagggaaggcaggctggacctctcccctcgcccccgccccagcaagcgcgggtctccaggcgcccccgcgcggcccgcgtgggatgcgccctcggcccgggcgctgagtgtttacctggacctgcagttcacgccctcgcgcaccggggccaacgtccccggccggagccgccgcctgcggtccgccatggtggccctagcttcgcggccaccgtccgggcttgggcggtgtgtgtgccctgctgccgccccgttgctaggacaccgcacaaccaccgctgccggtatttgccccgggcgcctggcaactctgacgccccgctgcgcggtccaaccccttctccgacgcctggggacgtggacctggccgagggaagggagagggtaccggtccttggtgtaatcacgttttactctgctgggaaggcgtgttcatcttcccaccgaaacgcgccatagactggatcaggcgttttttgctcatcatcgtttcaaaaaacgtttactgaaggaaagaaaggaagaaggcaggaggagcgataaagagatagcaagagaaagaggatggaaagtggggaaaatgaatagatttctaaaggttgggaaagccttttagcagggagatgttttcctggaggtcttggaactctcttggtctcacagcctctgtaaaccgagggctgcacacctgtctctagtccccagctgatttccagaggcccttccagctcctgtgttgattcttctgcctcgactcacttctagcagacaagtaccatccagctgaccctggtaggcacgtggccacataatacggattgcacgagggtgtgtttcgtttttactaaattcttatgctacttctgagtgtttctgatttaaatataagcattggttctgctacttaataattatgcactcctgggggcagggtacttacatttttaagcttcattaattacctggcctgaaaatggggaaaataatagtatctacctgtagggttattggggatattcgatgaatataaagaaattaacacagtgccagcatttaagaatccctcaagaattattattatgcaagtactattattccagctgtgaaccgggggtggtaatatttgtcctgactacttaacagagctgttgtgagttagttaatgg

SEQ ID NO: 10330 - DNA, 6000 bp, Homo sapiens; identical to SEQ ID NO: 1091

SEQ ID NO: 10331 - DNA, 6000 bp, Homo sapiens
atcctgataaagttgaaaatgtaaactctgttgggaaaagtaacacagtgccataaattcattggcagtcaagtgtaaacatcatttttctttgctttcttttagcttcagaataggtttcaatggaagaaagagcaaaagaaaacagtgtaacatggtggtattttatatgcatttgaataataaaaattttacatgatgctttaagaaatataatcttgttttatcagcaaaatttgaaagaatagattaaaaagttgaaaaaaaataaatcagcaatagcataatttcagagcatgcgggccaagagaatataaactgtgtatttgactgccacatgtcagggccacttgaactgggaaatagaaaatcctgtcatttttttttttttttttttttttgccaagattcaacttgaattttgctagtgtttatttatgtgaggtctttaggggtacttcctttgtgtgagatgtgtctgccctatgtgtaaatgtggctgggctgggggatgagagagtacataggagagagaggttggaaatatgattctgtgttctatcatctccagggagaaagaagagaacagaaaatggaagggcacacagccagaaacaaactttgttcaagtctccgattttgcttaggatcacctcttccagacagagtggtggccttgagtacaggaatatagcctacccacagaggcctgttaggaagaaagctcagggaagaaaaaaatgctggtctcattttcctcctactttcagagtttctgcttctcttcagacttcaaaaatgtagtataaaaaatatttaaaatatttaaggctgggcacggtggctcatgcctataatcccagcactttgggaggctgaggtgggtggatcacttgaggtcaggagttcaagaccagcctggccaacatggcgaaacctcgtctctagtaaaaatacaaaaattagcagagcttggtggagagcgcctgtaatcccagctactcgggaggctgaggcagagagaattgattaaaacccaggaggtggaggttgcagtgagctgagatcgcaccactgcactccagcctgggtgatagagcaagactccgtctcaaaaataaataaataaataaataagtctttatatgactagcctgtggtggcttgacccacaataacttcagtgatgtcaattttaaggctggaaaccactcaaagaaaacttgtgaaacaaatggacaaatgtgcatcatctctccctctcatccgttaatctaaagctctctacttgatggaatgatgaattcttacctcctgcttttaataatataatttcacaaaatttgaaatactttaacacactagttaaacaattcagtgtttcacagaatttttgggtttaaattgcttttgcttcccttaggtggagaattgaacttggacatgcctataactttcagacctgaagcctgaaacagagctccaggcaatattcacctcacacgtatatttggggaattcttgataatggaaaaatgtgttcaggtcttgatttttcaagaaaacaatgtacagaatattgaaaaatgtcaaaacaaccttcaaataagtaccctaaaacatgacaatattaaatttcacacataaagaagaaacagttcaaaacatgatatctgcaataacattcatccttctcaatggggcagcattcatatgatagggtgttgtatgggttcctatcatacacaaatagaagtgtcgtattcttggagcaatcctaagacctatctccatttatttaggtgtacaagaatatattgggtagcatgagccccatctagaattgaatatgatatggtacatcaagaggcagatctcaagctgagaagaaaataggaaaattgatcctacagtgaactgaggccattaacttgtaatatttgcatatggatttctgtgatttgctatacataacaaataaacttttaaaaagcatatgtttttatgataaatacagacattatatatgtttgtaaaatacactctttgagaagtgatctgccatgataaaaaatatgtaggaagtttcagggaaaatagatgtatcttattttagctggacaaatctttacttttgaatctgtactctctaaaaaaattattttagaaatcaaattaaatttttaatttgtaagcaatcctagacactgccacaacttacatgaaaagctctcacaaaaggaaattgcttttctgtaacttgtgataacactaataagacaaattgaaggaaagtttgtatccacaaaaatttctttgcacttccaatattctatgtttgtataaatggcccattgtggtatcaaatgagaagcagctgccaaaaataaaattatatattttggaattaacttgttttcaaatgtaaaacaaaatcaccgtttcctcagataacacgattgaccaaaaaaaaaaaaaaaataaaaataaataaataaataaagggctttttggtaaaaagaaaaaaaatcacccaagacatgttcgtgttgttttaaatttttgataactacaaagatacatgctgattgctcaggatacaattagcagctgcctgcatatccaaccttaaaggaaattttttaagctagttcaactctgtttcctacttcttcattaattactagctaagggacttgaaagtgtcctaatgaattttacattagactctgtaatatgaatggtgtatattatcacagcatctagtaaatgcataaattggcttttccaagtcgcattttgagtagttgtaaagattctggctggatatcacaaaatttagtattagagactgagccgaaaagaatttttacaagaaacaggttgctgcaatcacatttctcaggtcataaatctatgttactactttatgataatctgtcggtccttgttctcaaagttcaaagatgctgtgcttcttctttttttttttcctcctgtggttcaaaaagaagaaagcaatcccacttacagtgatttccaaatacgcattgaataaagcttaaaatactactgctataccagctttccataatttccatattataaagtaccatccagtgataaagtaccaaccacagtgttttggatttaatacttatggtttacagtttcccaaccacttaccattttcgtaaaattctttgaaatcaaaagtttaagaaaactattcaacaaacagaatgagctagacaggcagaaaactgtacctaaatccagtcagaaacagacagaaccttaggattgccctatcagagaggaaaggacagacaaccatggaaacctcatggaaagctttcttttataaaatatttctctaatttcatagcaaggtaaaagatcacctcttgctcattttcaaatgtgacatgataccataaatggcacatcatccttacttgaatgtttaaagctaatatgcaggtaatgtcaaagtcatagtgatgggactaaacatttgtaatctaaaggtgaagactgcgtgagaaacaccacagagctccgagttggcaaaagtcagatacagactctcaatgattattccttaaagaatatccaaagtcaccacaattcacattacctaaagattaaaatgcggatattaacaggaaattaacattaggatgttaacaatcctcttaatatctattaatatttgatgatgctctctaaaatcatttgattgtcagttactctcttaaaatggttttcccttattacactaacataattgtatatgcagtttagttaattatcgccaagactttactttcttaggtaaaatgttgctcaaattcatctctcagctttatatcagcacaagatcacctcttgctcattgtcaaatgtgacacgatatcataaatggcacatcatccttacatcatccttacttacagtgtgtgagtttctttactctttttttctctttatttagattaaagaaaacaaatataggtcagtatttgaaaaataaagctcacaacagttctttatgaccagaatcaaagtgtgtgtcctgttaaccaagatttgtctctcagaagtttgatgatctgttaaaaaatatatatattatcagtgtcaagtattttagtcccacctgtcactaatttaatgacggcattgcctaggaatttcatgagcaacaaaactgttgatttagcctcataattttggaacatattaaaaatattttcttgctatcaacacttagatttaaatagaatttctatttcaatcatgaaaatttttaaacattgaaatccactgcaatgaaacaaatatgaaacctcacatggacattttactcttcagctgttttcatattttgctcacattttgcaaggaacccagagatccaaaagaaatatccttaactctttcccggccaagccctatgatcaaacacatgggaaataatctatggattacaataatcaaacagttctagagaatttctaaatatctgcaggaagaaaatctgtgtgcttttcaagtaaactgcagcaatcaggaaagaagagaaaaaccccttgcacaatcatgtatttaaaaaaaaaatctttctactctgcagatactgtttcctgaaatttaccaagaacactgccttgaagagataaaaaaaatacatccatagaagtcagttctacccccaaaagagctgcactgcacacatttttagaaacataaatctcagcaaatacagttgcattttattgacaacattaaaaataatcacaacaaagaaatagcctttcctattccatttcaacttcattaccatgctctactagcctctactaaaaaaaaaaaaaaaaaaaaaaaaagtcattacctgtatgaagagaacctgttaatagtctgagaaggtactgggcaaatttcagtatttcacgtttacaccgctttctacagccactcatcttaagcaacaaggtattcctctgaggagagccagaagtctttgccaataataataataataataataaaaagagagtctctgaggagaaacttctgtctcagtttatgcacaggctgccttacaactcctgtggaattagctgttagcgcctcaatcagaaattcctttaaaatgctagagaagccagatacagctacaacagtaacagggaggtgagaaaacacggcttctcagtgtggtgaccaagttcttctgtggcaacagacaggctgccggttcacacttgtagtaacccagctctggttcggctcggcatcccctctccagaagcagttgcaacctcacagaccattcagagggaggcggggcctgcgatgccagctcatcagtgaatcagcatgtaagcaggtgagaagacagatgacaggtcactgggtctgaaacccttccgataccaataaagggaacctgcgagtgcactccagcctgctggggaggaatctcagggcccgaggctgtacaaaatgaatgattcccaaaaaaaggaggtggggagagggaagcatgctgctcaaggtcagacatcagacaactcccttgacacagtgttaatcagattcaggaaggctacatgggggaaaggctcatttgagaagctgaccctgattctaaacagacttgacgatttaccaccaaatggggacaatgctattttgtcagggataaatgtattcttcttcatgggcttagagggagaaaacaagctgtttcttaaaactggctacattttctgcacagcgcgggctcaggtatttggaaattaggatacataattgtctcctttaaaacacagtagcctagaaaccagaaatcttaagccctttacattgcctccaggcaacagagctccaaaactaatttactgcgttgtcctaagagaaagaagtgcctcagtttcttcatatttcaaaaaggcaaacacaaccatctccctaccaatcaactttttt

SEQ ID NO: 10332 - DNA, 6000 bp, Homo sapiens
gggatggggatgaggaggctggcaggcaggcaggcaggcaaccacctcaagctgaggggcagggccagaatgtgacgacagagagaaggtgaggggcacagccagagcagaggcatccagaatccaaaaatcagggcagggacacagatccaaggcagtcatggctctaaccacctaccccaggctgtggtgaggatccagttacagtaagtgatagtccggaaagggctttgccaccggccagcacatgcacatcaggtacactgtcacccccacatacagggagcccaatatcaggcatagactggagactggtcacagccaaccatcaggcaagtgggaaggaaggtcctatcgaaggatctgaggaggctggcatttctttcagccactaggggactgggctgcaggtgagtaagaaagccacacacatgccagagtgtctatcccctagttaagccacggtgcaggtggaagtcatcagaaacacccagctgaggctgtgtctggagccacaatgggaccagaactcatgtatcaactaccagccatgaccctgcagagaagagggctcgctcacgtgtccactgctgctcaacaccttgtgaccgtagccatctgccctcccccgtctccagtagaccacagactccacaagggagggctctgtatccctgccctcctggtctcactgccgcacaccccacgggcttcatctgcacgactgattgagtcagtaaaactcaagagtgacaaccaagaaacaaaataaaaatcccatgtcccccatctcctttacctgctttatccgcatgaactggctcaaggtgacttggagttatttctaaccagattaaattcaccttctagatgtccacagaagagtctaacaatgcagcccagttctgaaaacaattcccaggagaagagctctgaaatattttcagcaattgcaggacaattggaatgagtgcactaccttttaaggggcagcagggacaacacactcctggatctctgacttcctgtgggttaagccaccaactgcattagaacctcatccacacacactcaggagtgaggttctgattcggttcactcctatgatgtgagaggcgcctgtgaggcaggtccgtccaaactggtccagctgtgctgctcccaggcgccagccctcaagacccctcccccactgaaacacctgcctggtcttgctgacctgcatctcccaccatcagaaccgagaggagcctgtgttccatttgcttttgtaactgcatgaccaggcacaaagccagctcagagtaggtgctcattaaatgcttagtgagtgcatgaagaaatatataacctcgttagtgctatattgtacccacatttttcacagagaagagagcctgagctgcccagatcccagagttggtaacgacattgtggaaacaacactgcaaaggcaggcttcatgactttgtttgggattcttcctcttacactcgtgtgcacactcatagctatgcatgctcacatacatgttcagggcattgtaaacacacaggaaaataacagttacacccatgaatcaacataatatggctgagtaagccagtctcactcatcattcatttaaaatttcaaaactaaatgctggagctcttgaaattttagcactcaccttctacacatatgtacatgcatgtgcatgtatgaatacacacatgcatgtgtgtatacacatgaaccctcacaacatacacatgcatgcatgcgcaggcacatgggcacacatacacacaaacatgataatcagataaatagctggttcccgggagaaggatgctacagtttccccatccacacttgtgcccatgaagtttcctaagaaccagaggcctttgccaggttttatgtgaggaaggaggatgcctgtgatccacaagaaacctggctccctgtccctaagccagatgggatcagtggtgccaagagctcctgtcccacgtgctgattctgaagagctcagagggaacctggcaggcaggagagagctggtgccactcagcgtgggcactctggggcctcccgggttcctgggacacaactgtttcccccccacccacccaacaacatatctaagccacccagtaacctgggaagacaagcagtcatcctggacaggctggcagaccttgtagggcattagatagcaacctcaggaggaccctacacaaacagagccaggatcctggtactatactccctgctggctccctcccctggggtggggacctgggccccttgaggatgagggccatggacccctcccaggagcgtcttccttcagggtatcctcctgctatggctcaacacatagggtggagacctcccagacagcctgagcgcttcaggggcctggccagaaattccatggagattccaagaaaggcaaaacgtaatagcaagcagtcaccatctctaataaacaacctgcctccctctaaccacggtgccttccagcaaggcagggtgcacacatttccttgagtggagctaaggtagtaaccaagtggccgagtgggtgacccaggaaccccggaggcaaaaactacagactcccctgcccctcagcacagcactgtgatgatggtaccagcaggccctttacacacactctttcccaaattacctgtgactccaggtaattctgacctgacaagcactcaggccaaggtctccaggaaagagagaagcaaagagaacactcacctggcagtgttactgccccgaggctccagctggagcttccacccagattcccaactccacgcccaggagatgcggagtctgaggcctgagttagtcccaggttgcctgattttgaaagctttctaggtttaaagagccaggtgctgattcacagaccccatatctgcctgtgcctggacaaggagagtctcctcatttataggacaggatgggagccagtgccacctccctcccaggatctttcccaggagctgaagcacagccctgagcccgtcaggtgtggaggagggtcctctggtggtggccgccctccagatatcttgctgggaaacctcagaggcctactcaactgaggccaagcccacccagctgttcccacaacaggagccggactgccaggacccacctggtcatgacatacggggcaaagcagatgaggaaggtcgcaatagcaatgccaatcttcctggtggcgcggtggcggcgccgcttctgctggatgaggcagcgctgccgcacactgtggggacagaggacagtggtcaggatgatggcagggtggggacagaacccaggcccagagcccaggggctgaagtgagggcagacaggagggtttcaggaggatgtttagcctggaacctgaggaggacagagggatgggggagagagaaagaacaaggggtaggcttgcttttttgtaggtgaaataaaggaagtctggaaagaagggccagctcctcctcccttccctctggctcatccttctccacacagaggcaactgaggcaggctgctgatggaggggcaaggctggggccctcaaggagggagaagtcacgtggcctgcccaccccaggagcaggagagcctcttgggtgttctgtggggggccaagggggaaaggggaacacctacaggaggtaatttggaacaatggcgacaccagctagagattcaggagacaaatcctgccaagtagtgagcagaaagcatgggggatggaccctgctcaagacttgaagcccaagtccatgcaagggcactgggtcagcagtgggcagaaacaagcagatgcctcagacccacagccatgcacaggaggggtgtgtctggccgcccacagcagagcccgcggaacccctcccggagaagcacaccccacagctctgcgcaaagctccctgtgcactgagcacatatcccaggaggcagaggcccccgcagtgtctgcaccaatgaaccaacaggaaacccctgtgagcagcgtgcaggggcagtgctgtggctggtgaactctgggcggagtaacggtggtgatgcccacaggctcctcaagccaactgcccagggagcgcccaagtccctggcctgggcctgtcggcatgcactgggccaatacctggggtgcaggtcggcgagcagcgcgagcgccttcatggtgacggtgtccatgcgctggcagtgtctgcgtgccacccggtgcacctggagcgaggtgaggcagagcaccgccagcggcagcacgaagcccacggcatggagcgtggcggtgaaggctgcgaagcgcggacgctcaggctcgggcggcaggcgcagcgaacaggacgcgaaggcgctgctgtagccaagccacgagcagccaagtgcagcgcctgagaaggccagcgactgtccccaggcacagcccagcagcaggccggcatagcgcggtcgcaggcgtccggcgtagcgcagtgggaagcccactgccagccactggtctgcgctcagcgccgccacgctcagcgccgcgttggacgccaggaaggtgtccaggaagccaatgacttggcatgcgccgggcgccgacggtgtccgcccgcgcatcacaccgagcagcgtgaagggcatgtccagcgccgccagcagcaggtggcccagagacagattcaccaggaggacgcctgaggctcgagtgcggagctcagcgctgtaggcgcaacaaagcagcaccagtgcgttggatagcagcgccacggccagtaccatcaccaggagacccgccagcagcgcctcgccggggcccatggcgctagcggctcgccaggcaccctggggttctcatggctctgcttcgggcgcgagcctgggaaagtgaggcgatggagcagctgagcggcgcgcccacggcttctgggaggtgcagagccggctagcaaggtccagagcagcgcgaggaaagcggcggcaagtgcagggtccggggcacccggggggagggcgtagctctgcggagcaggagcagcccggggccgccctggaggcagcgcaaccgcggtgctgtccagggtgctgaatgcgctcaccgtcccggcaggactgtcctgaggctgaagcgaggcgcaggggcgcggggcgtaggggcgagggaggtctctttcctaacactgtatctttccttcttctctcctcgtggcgtggcaggatgggactctgcgcgcttctgttccgggccaggtcagtccctgccctggtcacacctccagccgagcctcccagccctggttcgcgcgcagctgacacgccagcaagagccactcagtggatcctaggcagcacagccctcgccacgcctctccctccaggcgctggcaccaaactggagcgacctggtggcttataggggcggtaggggcgggaatgaattggcaagaagctgtgcaggcggggcagagggagtgacggggcggggaagggggcgggggctgccctcaggacttcctcccatcccccagcctcagcccaggaactgtgactgcatcgacgtttgttgaagcaagaagagcgacaagaagtggaaacaaggttgagaaaggcatgggggaaggaaagagaagaagaagaaaaagtgaagaaaaagtgaagaggaagtggggggaagaagagggaagaggagagaaaagcaacagagggagagacaaagaagggggcaccttgggaggacccacccagaactgggtgccatacagaaatgcctgtccttcacctggctcctggagccccgcggtgcgaggcctctcccacctccgccatcctctgtggtggcttctgagccttctcacccagtgggaatcttctaatccattcgtggccacttggcaggacaaggatatggtgaagcctcctggaagctgcttcttccaggaagctttttggcattttctccccagtgacagccacaacatgacagaaatgaa

SEQ ID NO: 10333 - DNA, 6000 bp, Homo sapiens
aaacgtgttaaaggagtaaacatgattgctgtaaccacttgcagagataggaagaaggaacatcccgaacagaggttcactctgtaaacagtaactaactagagcactgtctgtgctccatgtccctacactcttgcctcgatattctgaacaacatgccctcctgaatttcatattccaaatttccctcatatccctggaaaccagaggccatacattggaggcctgtgtgacagatataaggcttacacacagaaatgtttggtttggcccacatggtgttatttaggaatatcgaattagctgctggcacttgaaagtgagtagattttacataaaactgtgaattgacagtctatcttgaaaaaaaaaaaaaaaaaaaaacataaccaggtctggcaagaccagacctgaagtcccgcctgcagcccctgtgctggatctgggctacaacccccacttacccaggcacagggcccaagtcctgttccactcaagctgttacttgcctggctgctgaagacattagagtttgcgacccctgctggaaaactaccaaaaagcataatgtattagagaaaaagaaagatgcccactgggatctatttctgttatgtttagagtattgcttggaagaataatgtattcatttttctagacctcttgtagtagcacataactattgacaaactacggcccagtagatattattctaacgatctgaaaaagctacagacttcattccccatgggtagaggaagctaaggatgtttcatgctggagacaggcctgaagatgaatggggagaagctgtacatcagtgggttgcaattctggctaagtcagggagaaagggaattcacttgaagactatgggttgcctctaggaattgctgagaagctgaaaagccaggattggaaaatgagaaggaatgaaaggaacctgggcaccagaggcacatcaagatggtgttgcagaaaaggcacctctgggaccacagcttgggacatgcatactgctgccaacgccacttgatccatgatccaaggtggtaaataaacactccaatgtccctgtgccctttagctagtctttcaagattccaggccccaggtgggatcattcaactaagccctagttcagggctgggagatatggacaaggagaaagaggcccatctcccacaaaaaaaaaaaaaaatccttctatgaagggaaggttgtgttccctaaataggatgtttggttccaactgcttagaagggttttaagtgagtctgaagagagagggcactacaagcacgactgtagagtggaataagaacagacaggcctgaattctagtctggaatcctttgtacctttagaaaattaattaagttttccgatcggcagattccaaatccttaaaatagaaatgacgccatctgctctccaaggttgctgtgaagattcagtccaatcactcattcaattattccaaatatacttattgaatgtctaagtgccaggcaggcactgagttaggttctggagacacgtttggaacaacacctaaaatgcaatgatgaggagccagtgcattatgctgatgaaagattcagacaagggggacccgggtcatctcgtgacactggtcatgttttacttttccccagtggagtcactccccatttgtgacttttctccttttttaaaaaaattattaattaacatcagggccctctcttcaaacagattttcttaagacatgtaatgtgtattatgttaaaaggaaaaacactctaaaaattgactgtgatcctgaaaacaagaaaggaatcattctgagaagtagtgaggcccggtgcttgtagcattcaggtggagtgatcacaagaagagactggccaattaaaagaaatctctcccacttaatgtttagcatatgtcatttactcagacatatgcaaactatgattaaaatgaacattaaaatagatctacgataaaacttaattttttgtattttttaccctttacaattgcacaagtgttctccaatcggcaagatgcatttcatatacattttctcactttcttataataatcttttcatcactgttttgcagaggaagaaatttagggtcagggagggagaaattgttgcccaaggtcatggggcaagaagttggctttaaatccagctagcactctcctgccttctgccataagaaaagagcagcctcaattgaaagcaccaggtcaagtagccaggttgaggggaaaaaaactgggaatagccctgatattttccagcactagctggaaagttactgcatttccctggaagctgctaaaaagttaccactctcctgcaacaactgtctctaacacagggacccaggcttagatgcaggcccggaaacctggtgcctgagcactgacccagcctacaggctcaatttcatcaggacaccagatacatcttactgtgccttcctccaaactttagcccccatagacagacatgatttagcaaccacggtggggatatgccattgtgggtagctgctatgttctcagaaaggcagtgtgcatgagtgaagcaatttacaccacccaggccatctttctagccccttcctagtcaccatcgagtttcaattcaaggcaagagaagcttccatgtggcttttcccttcagaggccccccccccaaccctcacaagatttttccagtaaaataatttcttattttaataagaaaagtacatgctccaacttttagggggacccagggggggggcttgaggcttcattctagacataaccacaggaaagtaaagaaccctttgctttttccgatgccatctcaagatgccaatttctcaccagcttctcagaacaaaaatctcctatcttaaaactacagagcattgtataccctgtggcatcacagaggatccacagtctagaagcacagcttaataagcctcactaaggaatcttcatctatgctgctgttgtaattaactgcttccacttaagagtgcttagtcatgaagttgtccatccctgtcaaactcagctgaaagagttagatgggctaaccaaaacctggaaagactcttttagaagctgttctttctctgcttagcgctggagaaaaccttatgtaacacaatggtccatttcaatatgttatttctgcaatcctgtgggggaaaatctaagcgctggatgtacaacgggaagggtaaggcagggatttgcagcggagcgcgcgtctcctggaatttcagtaggtaaggcttattctaattgcacccagtgttacccaatattaccaggaatgcagaaagcaagaaaaaaatccgaacgtcaaaggatgcgctttgctttagaaatgcagggaggcagaagttgggttatttctccctcctttttttttcttttttttttaaagatggaattcctggaattaacccttgggtggaagcatttcaacaaaataaaatgagatttgcctgcaaagcgagaacgcacgggtgggaatgaaggatcctgcctgtgccaggctgctgcctcagcagtgtccaagcacccagcgcctgaaagcgggagcgtggggactcgtctggggaccctcttccggggctactggcgggaggcgcagccgagctggtggtggcggggtttccctccggggctagggctgagggaggagaagagggcggactggctccttccgttctcggccaccctccccgccactccttgaggctgctccatgctaacaggagactgtttctcggagcgcagcgcaaagacagtggatttggagtggcctccctagaatccccccaaaagcatcttggcacaagttgtagataaaaatagctcatgataacattgtgggaaagggaggagcgagactcgcgcaaggcgaggcaagggtaccactggatctgcaaaggaggaggaagagggaggatgcaacccttggcccaagagagcgccctgagtgtgcgaggaatcgctggctcccaggggagggaaagagatggaagacctatagcgcctataactgcagagttatagacctataactgcagagcccagcacaccccatcccgcgccggcacccggctttggctccagcttcttcttcccatcatccgcctacgttctgggtctgtcctccgcttcctgggacaggctggggctagaaggaggagcagcgcgccgtccgccccctggctggtagagcgcacctggagaggtcaagctccgcgaataagacccttcctgggagctggggtctaggcgttccaaccgcgggttcgcaccccgccatccctcacctccatccgctgccactacccaagggcccggaaatagaaaaccacgaagggggaaaaaaatcagtaaaaagtaacaagaaaaaaatcaagaccctcatgtaattggcattagggatgagaggtttattgtcagggctgtcacctcaatctctctctttgggagatgcctatctccaaccaaatgcaaaggcaaacccgaccaaggcttctccacccccaaaggctccctcagccgagttacttttgcgggctgtgtcctcgccccagtttctggccccaggtggtacccaggatccgttgagtgctgcgctctcgctgccctacagggtcctatggtgaagctgcggtcgcgaagcggccggcaggagcgaacctcacgactctgcagggggggaaaacatccaacccagtaagagtcagaaatctgggtccctgtccttacagatcaaccggtccctcgggacttccagagcagaggtgctagggcaggaggtgaggaggatgggaaaatccccagcctttgcttcctggttccctctgcatccactccacctgctccagcctcgattcttcttaggttctgcacttgcccgaagtccagaacgccagacaaaggcacctcggagccctctacacctgcgtcctgccactctcccaccccgcgcgcgccgcactcacctgagccgcgcctctgtccagcccgtccggcgccctaaataggctcctaggctgggccatgggcagcactgccgagcacccgcggcgggtagagcaagtttctggatggcccggggcaggcgggcggggagaaggcgcaggcacccactgagacccggctgtcgtggcggcgactcctggctgccagggcgcagaggaccttgcaggcgggcgttttggtgctcaatcccgaggagggggaggagcgggaggaggagcgggagcaaaaggaggggacggaggaggccgggcccggagggagagcgcgttgggcagaggaggatcgcgagcgcccactgctgcccggcccgctcgggtgccgcccagagtccggcccgctaggtgcctggtgctccgctctgcgctcagctgctccgcacagccccgcctggcacgcagctccagcggctggtcgggtagtagtcggtcccgcccacccggtgcggtggcccctggggtttcagtccaaggggagggaccagcgctccaagaaggtgaggctgctgggatgggtgactccgccgtcactgcaaacacgggacgtcccgtctactcccttacgcctgcttggtctgagcccgagtctacctcttctctaagtcgccagctcggcacttgtacccgggacctgtgctcctcccacgtgagtctgcaccatgcgtattcccttcctggcaggtgacccaccttaggcgctggcgctccttccgccccccgggaagcaggaggtgccatcctctccaattcgctctgcagccggactgggaccggagcggcggcctgggccagaatccgcgtgaggagccggcttcaaagagcgccctgtcgccattgaacactccttttcctttggtttagcgtcggagagcggacgccaatttgccaggagagcgcggaaaattcagcttttttttttttttttttttttttttttttc

SEQ ID NO: 10334 - DNA, 6000 bp, Homo sapiens
aaaggaaacaaaaaccaatcctaaggtgtatagcctgggaaactgagagaacagtgaccacttaagacactacactttcactaagtgatagctccatccctaatagtataaacagagcttccatttgaagtacaatctcatgttcaagggcagaatttttcaggttacaactgatcatcactgagataaaatggctttggtaaggtggaacttgactgccagggtaatcagttcagccactaatcctcatttaagctatattcctttcaaacctgttagcttgcctatcacataaaacctcttggcctactagttcctgaattagtcctattatatacaccctgaacctaagtggcattaatgacttgactaaagttgcatttgcatatccagagagtcattagtttacacacagcttctcaccagtactgaatgttttaatgcaggggtccccaaccctgggtcatggagcataaaccctattgtgaactgcatgcaagggatccgggttgcacactccttatgagaatctaatacctaatgatctgaggcggaacagtttcatccccaaaccatcccccacccaacccaactcccccagtctgtggaataattgtctttgacaaaaccagtccctggtgctaaaaaggtgggggactgctgttttaatggatctgtcaacatttcctttaaaaacctttattttcagaggcttatgggtcaactgtagacagtcactcagggctaaaacctgggataaatggtgttagtctgggacataatttatttaattaaaggaactttctgtgctttgcaagtccaagcagataatcttaataaatgctgaccttaaaatatccagagggcaaagactaaaaaaaaaaaagcttcccataatcataaaatacaatacaagaaggtatacattttgctttgagaactttccataatgaaacaaataatctatcatcctaggcctcctgacaccttcactaccatatccaatagccaaatcctgatgcctttgcatctttaggagctcttgaatcaatttatttttttctatctctaccaccgccctgccaatctaagcaaggattatgtcccacctgaataatgatgacccccaccaggactcctgctacctgttctatagacaaatacatactttctgtaggcagccagagtgatcttttcaaaacacaaatccactcttccctacttaaaatctttcaacggcttctcaccgcacttaagatctcctccttagcatggactacgagacccatgctttcctgtgtggcatcattctacttgtcattctccacgttccaacaatatttatctcctagtttctcactatttcactcatgctacctcctgcctcaggacctttgcccaaatgctccttctcaagaatgctgccacccacttccagattaactacttttcttgaaatgttcagatttcgcctcaaaagtcagagtaggcagctaggcagacatgagcagggcaggaaaggccccccaccaccaggaatgtcaggcggccatcaggtgatggtcaggccgttgttaaactgtctctctgaaataataattggtcgcgccaacaccatggaaaggcagtctcccattagatagaaaacacctaaagctggttatcagcaggttcccactaagatctcaggagttgggcaagtgggctccagcatgtgcactaataggcaaaatggcagcttttaactagtatatgcccttcctctaggaaggctcaaattgtaagggaaaaatgcctcaagtgagcatgagtaaaacttcagtaaacacactgcaggcagcccctccccgctgctggcaggccactgcgcatgcagacagcccaccccaagggaagaatcacgggagaagaaacgcaaaccctggaatcatgccaatgtataaaaccccaagtccagggtcagacgaggtacttggatttctcaagtagcccacatggccttcttcaaagtgtacttccttccgttcctgctctaaagctttttaatactctcactcctgctcaaaaatttgcctcggtctctcactctgccttatgcccctccaataaattctttcccacaggaggtaagaatcgagttgcttcagacctgtgtggatttgctactgctaatagtcatttcttcaagtaaggcttttatgaccaaattcctccattttcttgccccctatggttttcactatgaaagcagtagcacaatttttatttatatatttatcgaggtttgattgctgtgtggtttttacaagatccatgagattaaggacaaggagtatttccttaacaactagtaccatgcctggtatataattggcactcaaaaatgttcaaataaatcaatatttaaaatcacacaacagaatatgatcggaaatgtaaggtcatttttcacatcattcacttcagagaaagggcaagaggcccagagatgggaaggaaataagaaacatgtttcttttgtcttgactccacaggtggacagacctaaaacaaggaaatagtgcagatgagaaaggaccatcccaagttgtcaaggctgtaacagaatttagtgtatgacatattcatagttcaagacaaaaagtggcacagggtgaatggagccacaggtacaagcttgctggagtagaggcagaacccatacctggtaaactggatcgttcaggctatttaaagggatccaaaaaagtccatgtgtagatcagcattaaagagaagcagagatctcaccatgggtggaatatatgcaatagtcatcgaagtaaaagaaccacaagggggaggagaaactcaggagtcagaatcctccctacaggatttgtccttctagcactgtaccttaaaagctcctaggttagtctttattaaaggaaggcaataatcccttatttatgctcttattatttataagctacactttaaattgcttgtattactatttacctgggaagccaataaaagggtctttcttgctcttctgatacctaagcattcctcttaatgttaattatgttaagtctttaaaatctaccttttgtttttgacaaatgacagaaattacactggatccactgagaaactttatcaagtacactgaaacaaacaaaaaatcaagatatcatcaccttctttatcatcaccatatagtactgaaatgggcattatggcccatcctttgtttgcactaataaaatattccacgagttggcaagtgatgctgatgttccgccacctctttaaaagatcatcagaagggcgggacattctgaacctagctagttttgtcagtttttcgtcagtttctctaccagaaaatagggggttaaacatttctagctacatgtaaaaagccatttgatgacttaaaacaaatatcctcaattgcaatattcagttatcctttgtcaataagtcatattgagagcaaaattataaaaagatcaccatcactccatgagctgagaagcttaaaaccgcaaatgtactgaaaaggaaaactgatactttttattaccatcaatttagatgacttagatgggaatctatcccagatattacaaagggattccactgctgtagagacttcaaatactaaaacttccagattacatctaatctcatgatataggcgaagagctgataatgggatctcctcctaggattcttactcttgaaaggacgccacaagcctttttgcccaacttcttgatgctaactttccagaaggaaagttaaataaacatgacatagaagcgatgctcatcacacttgcaaaaagcactttacaacagagagagcgactcgactcctcctgcagccccgccgcctcggcggtcgtgagcccctcataccctctcctacccccactggcagccggcccagttggctgtcccagcggggaggaggaagcaggtggtgcaacggttcatccggggggaagcaggtcagggtcgggggcgaggccggtgcgcgccgcccgctgccgggtcagggaagccgcagtgcccgcggtcccttccccgcgcggcgcggctccgggtaactaatgttccgaggcgcctgactaaaccctccaaatccaaggaatgtcagcgctaacactcgcgccctgggcggcagacaaatgcgtcccagcggagccgccgcgagctccgcgccgccgctcccctcggcgtcggcctgagctagccggcagccggcgcggggcggccgggcgccgacacaagttagttttccggcccaagcagccctgccgcagccaaggaagaggaactgctcctcttcccccggatagcgcccgagcactgccacagcaggggcttccccaggcgctgagggctgggggcggcgggcaggcggggcggggacgcccctccgccatctccggccaaccgcccctccctcgcccagggacgcgagggggaccggcggtccgggcgaggcctcggccgcgcatcgcaccccggctccccgccgccggagttgagggggaggcgcgctctccgtaagagccggaggcggggcgccatcgccctcccactccccggcgggcgggccgggggagcccggggctgcgaacacccccagacgggcggctgcgggaggggaggctggaccaaggggcctggtccaccggaccagcggtggcggcatcggcatctcgcctccttcaggcctgcacgcgccacaggccgcagcctggaccaaccccgcgtccccgggccgtgagcgctgcggtcccggccccccagagcgggacgccgggcggccgcagccccccggacccggctctccgcccgctccgcccgcagtcccggcgcggagagcggccgcccgagccgctgccgcggcagcgcgggtgtcggcgacggagcccggggcggggaagagcggaggaaggggcggcgagggggcgggccggcggcggccagggaggtcggagtgcgcggggctcggcaccccctcggcccgcgctgcgccagcaccacctgcggagctgcggtgcccacgccgtgccgcgaccccgccgcccctgctccctccacacgcgggcaaacaaaacaagttgccggtcgctgccgccggagggggccgggcgggtcactcaccctcatcctgctcagcgggcttgggtcgtccggccgcggggtcagggaagaccagaggaccactagccccaggaagcttcccaccaccagcaaactgcgtaagatgaacccaatcttcagcctcatcttcctccggcggcgagagactcacagcccggcgcagccgccgccaccgctctcccctccctccttccccctcctccggctctcctccccctctttcccccacccctaccgctacggctgccgccctctccgctgcctgccctttccagctccagatccggaactcccctcggctacacctttccccgggctcttccctccgctcctccccgtggccccctcccctctggcggccaccgcagagctccgactgacccgtgtgcctcgctctgccaggctgccttcctctctacctgcccccttccagatccgcagtcccctgctctccacgcgagcccccttcacagtccctgctaccttgtaactaacttgcacttttcccgagtccggttcttagcctttgccctgcagctcagctccttaaagctttcagatccccaaacttttattgtaattatggacaataactccgtccttaacgcctgtgccctccgggatcccgtggcccgccgccccctccgttggacctggagtcgctctcgtctgcacctctcccttagacccacttccctgagccccttgtcgagaggctttcaggaagccaaccaggaagtgggactaccgctgctgctgcagcagctccacgtggctgatttatagctgaagggtttttttttttccttcttattgattgttcttgcttttt

SEQ ID NO: 10335 - DNA, 6000 bp, Homo sapiens
taagtaggtacccctgctaacttaaattggaactattcattagtaaaatagaatatattaaatatatgctaatttaaattgaaaaaataatgtctaaagagttatcaataatttgttcagcaattatttctttgaagtatgaacacgatatttttcttttgaaaaaagaacattaaatttgactcataaaaaggataacagctatagttagctaatataattatgtacattatactctatttttacagtcaaaggtagaaaggtttctaccaaatgaaaaagaaactaattgccattcaagcaaatacatttaaaaaagcactccagacaaaggagattcaagtggtagagtcaatcaacaaaagtgtggtggaaataactaaagcatagttattttctcaatggtagcaatcaattctgaataaaatatttaattaaaaagtttggaaatgtttgctataaacagctatatcatttcattttgattttgcatgtaaagatacaaaaacacatactctaagtggtcacattttatagagcataataatatcaatatgttatagtaaataatgttcttataggtgtaaaaagtgcacctttttttccataccaactatattttatgtgaattggaataaagagccaacagtatttccagatgacaatattacaagaagaatatttccaatcaaagaaaaatctttgttttaaatgcagaaattgttcactgtcctctctgtcttatatgagtaaatgaaatcctcttacctgtcaccctaacacccaagaagatctttgtctacctcaaaaggagcttaaaatgtcaagacctaggtccccttttcatggtttattaagcaaaaagccaaaactattcacggtcccttgtagtttcaacaatctatgattcaaataggggtaatagctctcttttcttgttcagtaatgtcctggtgaggaaatgattttactgtccttttttctgtggggtcctgcggatttatctaaaaggaaatgaattacaacaggatgacaaggccacagaataaagccatttagttttacaaatctattatgtcctccaatctattttatgggcctggttctattataagccaagaaaaaccctaaaacaaactttttttttccttttttatctttccaaggaaaacatttacaagtttatgatagtttttcaggcagtttagccttttcttcccaccttatgtgtttctaccccactttcttaaacatacaaaacattcagagacaagaaactggactttttaaatccaaactgctgacaactgtcagaagcactttactgggacattactgactgtagcttcaatgaattaagcttgattcactgcgggtgaatcattttcaatgcagggctgttcagcagtaattggccaagaatccctgctgtgaaaagcacttgtcaaataatgcttgtttacaaatatatctccagacagcaaaaagtggcagctactgaataagttcagggccacctccaaaattcatagcagtggacatgaaccctttacttactaaatttatttaaattttcacttgcagatacacttgctaatatttgtcctgcttgatcagagacaagtctgtttctaaatatacctctgaaatcttttataataaaaaagttttgaatattatactgtagatcaaatattcctttcacatgtagtttatgactaatatactaaaactactaaggatatatttatcttataaattgcttagaatttagactaaagggtaaattttcctcttattgtctgctatccaacatattcaaacatgccaaataaacacatttcatatcagtccaaaattccagatatatgtttggctttttctattcaattctgcttggttatatctaacaaagttaaatttaagaaatgactagaatagcagctatgaatatacacttacatttattctgtatgttttaaaactttttttcacataatgggagcattcataatacgcacacacacacatacacacacagtctttgggaaatcactaagcatctatagattgcagaagtcaaattatatgagaaaaagtgattaatgagttcagcatatacatgaaatctttctgccccctgaccttccaaagtccctccagaagcaaacaaacaaattggaaaactctaatctgaatctctaaaaaagcccaaacattttatgaatattttagcataaataaatattttaatacactctgctgctcaatttatagcaatagcatggagaaacaagaagagaagaatctatatttcacagagcagaaataaagatctaggatactaggtggaaagatggaaaactgctcagctgagataggatgaattagataatgacatagatatttacacaattttatttccaattaagtataatagtgacatattacaaaatgtgccccaaacagcaggcttttttcagagcaccaggtggtaaggtacatctcatttttgattagatccccaagccccatctccgtgtagtccaagttttgctgtgtgacggactagatgaggtaagacaatacaatctgtgggtgttaaatctgtaacaacagccaggctgtgttccacaagattccagctctgccttcaacaccttaggagaccggcgctatttctccttccttctctttccttctgcctcttcctccctgcacagtcttggctcttgttcccattcagtgtcactctccctgagaattgaattcttccaattttctaaccaagagcgactccctttcatctccacctaagttctccccttccatcacacctggagagaggacttgaaatctaacggaaacacgaaaggatgaatgatattactgttaaacctcttcaaattcaaacgaggatgcccctttcggtggaataagacagttaataaaagagcctcctccaaagctgttataatcctccagacgtctaacagaatgaatttaacataaggtgttaataaaaggtctacgactctcaaaaacattttttcaactttatcagaaagggaaaatacccaattgtttggcttaagcatgagagatagctatatatatgtatatagataaatgcagataaatacacataagcctttaattagcgtttaaaaaataaacttagaggttaaagagaaagttcatgggatgagggcaggggagcctctatctgccctgctttcacacccttcctttagagctggcattgctgggatatcagctcagcgccttctcctacagcggagactgaacccatgcaagtcacgaggacacacacgactccaccactgctgcttcatctttccggtctagtgtcccgtgcccaggagtggaaggaatttctgcaaggttttgagcctcacgcgtcgcatccacagccccaaaccgaaacctcaccattctagccaaagtgggtaggtttttctatgttttcatggtggagctgacagatctggatctgagatactgttcccgcccctccgcgagtaatgcgcccttgggctgagacccgagctcagtccgggtgtgggagaggagcaagcgctgctggaggggacccaaaggcagaggtctcaggtccaagaggcaggcggacagaggggctgagcactgttccgggagcacgaagagcgacacaggtgttgctcccgcgccagctctactctcccagaaaaaggcagggacagtattctgggtctggagcacaggattgggggtagggagggggactgggtactcctggatcaggtgctggccagagcaggtcttttccgtctttaagacatgcccaggtgggttttagcggcaacttcctagcagcgacactccccctcacccctcctgccgcggcatcccaccttctcgccttcttccaccttggcttgagtgtgacaatgaactcccccaagaagaagggcacccaactgtgtggggcgccttctgtccttcgctatacccctcccacgagaaataaaagctcctgccacccaccccagaatagcagctggtgatgccctaaataacagctcccagcaggcactttccccaaaaataaaagcatccagccacccccacaacgtttcccatcactggcctcaaataacggtttctaaaagccccactgctccagagatccttgtcactgagcttccaacagttcccactccttcaagcccgaaatgtcacttccccacgcgccttaagtgaggcccagccgcacccatccccctggaacgggcctccattccccaaaggaggcctcgacctcctttcccccaaggttttccaccttcccagccccccaaccagcctctgtccacacgcatgttccttgcccagcactccgcagctaacgtcaaacaatgcaaccaaaaaccgcagaggggagcgaaaaggccagtggaaggggacgacaaataccaatttgagatgagactgcgatttagtctgcagcagcagcgtccagcgcgctgagacctgaactcccaggccccgcctagcccctccgccccaggtcgccacggtccccacccccatctccctaccttcgttgctggggctggccaggagggtccggagtgcggcgcacaggagaaggcacgtccagaggggagcccgtcgaggtgcagagtagcagccggccagggacgctggggtgatgggggtgtcgccgccgccgcttgggggccgccggcgtcccgcaccccggggccccgagccccgcatcttctccgagcctcctccggtgccgctgtcccgagcggctcagtccaccgcttcggcctcgcagagcggcgaagggagactcgggagtcctccttgtccccccttggggtcctacgccttctggcacgcggctcctccaaatgtaggaaccacggatccggctgagacagctgaagtttgcttctggctcctctcgcctccccctttggtggggttaaatgaaatattagttctggttgctagtgcagatctggactcggatcaagggtgtcgagagggtcctgggtcctgttcctttgcctttcaaaaagactttttacggattgagaatttttaaataccactaggggaaaggtgaaggttctttgcagccttcagtgttgaaatggacgaaggtaaggaaggcaaatcattttaagacgaaatctccgattttttaaaaaaggaggaaaaaagcagggtggctaaggataaagaaagaggacttgagaaaatgtggagaatgaaaaacaggagagcagcgagcaaaagcaaagatccagagttcaaagagactggcagaaggaaatagctgcgggctgagtgctgaagaggggagggactgacggctgccggccggtaggagcgcggagctgcgctgcggcggcccaggagctgctgcggttcccgctgctcggggagcaggcggtgtgtgcgcggctgcgaagtcgaggttgaaactgcaccgccaaggcgcgctcctgctgtgtctggagctccggcgtctcctctgcctcccagctcagcgcctcccaccctccttccctcctcctcttcccagctcccccgccctctgctgctcgcagcctcgccagtgagaatctactgtaagtgtgagttgcttcgacgaagtcacacacccacggagggaagtaatctggaggctgccttggtgagtgttgcctagcggtctccgggaaaggcgcgtcttcctcccgggataattagggcaaggaatcctgacgacgctggcgaggactggggttcccgggaggcggaagggagatcagccccagctcagccggcggcccttagagacgcgggtccctccgtttggcatcttgcctgctgtccctcacaggctgtggcatcaacaaccttgtcgtcacatcgccgcgcattcgcaggctctgctggtccgtggctagtttcttaaacacccataccgcttaccgctgc

SEQ ID NO: 10336 - DNA, 6000 bp, Homo sapiens
attttgttggggttatttgttttctcctgtggattattttttttaatatttttttattttttattttttgccatttgaagattctggacattagtcctttgtgagatgcatagttcatgaatattttccactactctgcgagttgtctgtttacacagctgattatttcttttgctggcagaagttttttagtttaattaaatcacaactatttatctttgttttagttgcatttgcttttggatttttggtcatgaggtttttacctaacctaatgtctagaagagttttcccaatgttacattctagaattttgtattgtttcaggtctcagatttccttatttgatccatcttgagttgactttttataaggtgagagacaaagatgcagtttcattcttctacatggggattgccaattattccgccccatttgttgaatagtgtgacatttccccactttatgtatttgtttgctttgtcaaagttcagtgggctgtaagtatttgtctttatttctggtgtctctcttctgttccattgatctgcatgcctgtttttatactgataccatgttgttttggtaacttgtaatatgccttgtaatatgttgggtaatgtgatgcctacagatttcttctttttcttagtctttctttggctatgcaggtttcaaagctgagaatcaaataaagaactcatccattttgaaaatagttgcaaagaaaaaagaaaaacaaaacaaattactaaggaatatacctaaccaagaaggtgaaagacctctacaaagaaaactactaaacactgctgaaaaacgtcatagatgacacaaacaaatggaaatacatcccatgctcatggatgggtagaatcaattttatgaaaatgagcgtactgccaaaagaaatctataaatccaattcaattctcataaaaatgccatcatcatgcttaagagaactagaaaaaacaatcctaaatttcatatgggttttattatcatttttgacctttaataacaaatgtaagtcctttattttaggttgtgataatatagaaattgcactctaaagggactgactgaatgttcaatcttgctaaatatacaggtacatatatatgtccatttcttttaaaacaagacacagcatcaactagctaatagatatgctgtgaaatttaatgtgtattttgaagacaccttgaaataattatcattattctacataactatactttaaatgatcatatctatttttttattttccacagagatttttgattcatccctcctataaatgtaatatgtaaacataaatttttagtaagtcaaaaaatatatacaaaggataccaaaaagtttataaattttgtggaaaacagctaaatcaagccataaatctcctttaatctacacatcagggaagcactttatgatcagactagtccagattaacagaaacctagttgtctttgtcactagaagtcttaccattaactacttctcacaaaaatattctactgcataaggtctgattaaaaacatatatatgcacatatatgtatatgtataattatatagacatagatgaatcatgtaatatacatatacacacccacttgaaaacattgatgagatagattatagaaaattttatacaaatcatctaggaattaatacagatataaagaaacacagaacttatatagtgccaaagattaataatgttgttttatcatgcttataaatctgaattaattcacataaaacctatcctatgacacacataacaaaagattggtatccattgttcagtgagaactacaaatcactaaccaaaactgacaaacaatctaattaaaaagtgattaaaatatgaagaagcaattcaaagtaaaaatggcccataagacataaaagattaaaaagttactgatgctcagtaaaatagaattaatgccaacaaattgatgtcatacagaagatttgcaccctataaaaacctgagaaatctattttgagggagtataatttgaaataacccttttaaataaaatgtaaatatgccatttgaaactgaagttctacacttaggaatctgtcatgaaaaatccatgcacatcagcacatgtatgaacagaatgattcctccggcacttaaatggctttcagccactgaacacatgtacctccaacaaatgtatgaggggagccattgcagaaaacaggctgattatcacattgctaaacagaaaaagtagtttccagaaaaaaaaagtattttttgcaatgaaataaaatatatgtaaactagtacaaacaagaaagaatctcaaaaaacacatgtaattccaaggatgaaaattttaatttttattctatataattctgcaatgtttaactttccacaaagttttaatgtattaattatcatatttaaagtttaatttgtgaaataagcacagccatttaagacagaaaatttcaaaatgtgacatcgcattattaattcgctagtgttattcaaaaaacttgataatgtttctcatatattattttatccacttgcaggttgtttttaggacaatccttctagttttgaaaatatgtatgaataaatataatacaatgtttaaaaattgcaataattgtagaaacctaaattcatgcaattttaatatttttcttgtactatttttaatattttatgaatcatacaatagtttaataacttctgctgccttcttcaaagggttatacttgttgttattttgagacatgaatataaatacattgacaattttcctatcaattaatatcccctccttttgaagtttggcaaactttgtagctgtctcaacaaaaagaatgtaatgaaaataatgtggctaaactttcaaagctctgctggaaacacagcgtgttctccttctgtttctctctctctctctttctgtttctttctcttttttttttcttttttcttatcatactttaagttttagggtacatgtgcacaatgtgcaggttagttacatatgtatacatgtgccatgccggtgtgctgcacccattaactcttcgtttagcattaggtatatctcctaatgctatccctcccccctccccccaccgcacaacagtccccagagtgtgatgttccccttcctgtgtccatgtgttctcattgttcaattcccatctatgagtgagaacatgtggtgtttgggtttttgtccttgcaatagtttactgagaatgatgatttccaatttcatccatgtccctacaaaggacatgaactcatccttttttatggctgcatagtattccatggtgtatatgtgccacattttcttaatccagtctatcgttgttggacatttgggttggttccaagtctttgctattctgaatagtgccgcaataaacatacgtgtgcatgtgtctttatagcagcatgatttatagtcctttgggtatatacccagtaatggaatggctgggtcaaatggtatttctagttctagatccccgaggaatcgccacactgacttccacaatggttgaactggtttacagtcccaccaacagtgtaaaagtgttcctatttctccacatcctctccagcacctgtttcctgacgttttaatgattgccattctaactggtgtgagatggtatctcattgtggttttgatttgcatttctttgatggccagtgatgatgagcattttttcatgtgtcttttggctgcataaatgtcttcttttgagaagtgtctgttgatatcctttgcccactttttggtggggttgtttgtttttttcttgtaaatttgtttgagttcattgtagattctggatagtagccttttgtcagatgagtagcttgcgaaaattttctcccattttgtagattgcctgttcactctgatggtggtttcttttgctctgcagaagctctttagtttaattagatcccatttgtcaatttttggcttttgttgccattgcttttggtgttttagacatgaagtcctagcccatgcatgtgtcctgaatggtaatgcctaggttttcttctagggtttttatggttttaggtctaacgtttaagtctttaatccatcttgaattgatttttgtataaggtgtaaggaagggatccagtttcagctttctacatatggctagccagttttcccagcaccatttattaaatagggaatcctttccccatttcttgtttttgtcaggtttgtcaaagatcagatagttgtagatatgcggagctatttctgagggctctgttctgttccattgatctatatctctgttttggtaccagtaccatgctgttttggttactgtagccttgtagtatagtttcaagtcaggtagcgtgatacctccagctttggtctttggcttaggattgacttggcgatgcgggctcttttttggtttcatatgaactttaaagtagttttttccaattctgtgaagaaagtcgttggtagcttgatggggatggcattgaatctgtaaattaccttgggcagtatggccattttcacgatattgattcttcctacccatgagcatggaatgttcttccatttgtttgtatcctcttttatttcattgagccgtggtttgtagttctccttgaagaggtcctgcgtgtcccttgtaagctggattcctaagtattttattctctttgaagcaattgtgaatgggagttcactcatgatttggctctctgtttgtctgttattggtgtataagaatgcttgtgatttttgtacattgattttgtatcctgagactttgctgaagttgcttatcagcttaaggagagctccgggggatgggggaggaagagaggggggaggaccccccactgcactcgcacgcccgcactgcccaggctgctgccgtccactctcgactgccggcaacagcctggtagcctcccaacgctccagcgccatccattttcagggctagttgattcggcaggtgagttgttacacactccttagcggattctgacttccatggccaccgtctgtttcttctcttcatgtcttttttttcgctcactattactaaataactcaacctgtagtccccataataaatgacaatttgtagagagatacaaatatatgcctaaggaatcctggtagcccactagcactttgagcctttcaacacgaatctctaagtatgtaagtgaatgatcttcatataattacagacccaggcaccatagaaaagtagctacctaagaaactctgtgaaggaacacataactgaccccacctaacacacagattctgagagatgataataaaatgattacagttgttttaaggccctacatttgaaaactatttgttatgcagtgatacacacctggaataataattctacatattttaaattatatatgtaataaaattacaattaatatatatctacataatgggaaactgtgatactacacttggaaaatatctgtaccccaaataggagagtcaatataacctggtggttaagagctggcactctggatccagatggccttgattcaagtcttagaaaccactgtataatgatgtgggactggacaagttacttgaacttcatttgactcagcttcctcaccaatgaaatggcaatagttgtcatcacattatcaatatcatgggttgctgaaagaacgaattcattaatattgcaaagcactaacaattgtgtgtacagcaaaataaaattgtactattatcattaaacaagtcaaaaaatttccacaataataattttagtgttcatataattgcataatatattatagtttcaaaacatgctatgtttctaatgcaaatgataaaaatgacagtatttactatttcaagcatgtgggaattaaatttgtagcataaaccaagggctgacaaactatggcctcttggctggtca

SEQ ID NO: 10337 - DNA, 6000 bp, Homo sapiens
aattgcagctgtggagagagaatattttagcttaaagagtaaacaacggccgggcgcggtggcttatgcctgtaatcctagcactttgggaggacgaggcatgcggatgacctgaggttaggagttcgagaccagcctagccaacatggtgaaaccgtctctactaaaaatacaaaaattagctgggaatggtggcaggcgcctgtaatcccagctactcaggaggctgaggcaggagaactgcttgaatctaggaggcaaagcttgcagtgagctgagattgacggcgctactgtactccagcccgggctacaagcacgagactctgtcttaaaaaaaaaaaaaaaagtaaaaaaaaaaaggaaacagctgagtggtggcaatactaccggctacccactccatttcctagttgatagttcagcaatatctttctgatcttactattgttaattaatatcattgacagtgtctcagccaagttatcagatctatctaggttgtctttgtgtttttttaatccttcagtgtgacacagcagctcagaagaggaatacaagtatgagctccaccattttcctactgtttacatatgcatggattattagcattatcttcaatctgtgatttctttgcagaaatctttttaagccacttttccattttgaaaggattggctaaaattttataatataatccacttatgtattgcatatactgcaatattttacaacatgctgaaagcaaatgaataaatactaggtagcatggtgaacttcttgacctacagaattcctcctttcctccagaatatctgcatattgtagaaggcatgtgcccatctatctgacttaagggctgaatatgaacattaacgtctgttcatatagcaagtctccattctggagaccccaatgctagagagctaaatagaacaaacagaaaacaaacaaacaaacaacaacaacaacaaaaaggctcccaaaagatcaaatgttttcataacacagctacctccactggcttgtgatgttttgctaggtaactcaggtcagatattttaaatatataaaaatgtgtattctttcgtaaagagtaagactttaaatagctattaaaatacttctaattagatatacttacattattttttgttgaatattctgctgataaataaagaaacaactgcttaacattccaatcaaatatattctctagatgtaagtaaattaaggaaaatataaatttatgagcagtatatcacttttaaatagatcttaattattcttaggttatttatccataacagtaatactaaagtagaaaagaggcggcccagaaacataatgtgccactaatttaataaaaatatgcagaagataaatacattgtgaaatccagcttattccaaaacaaaaaaatgtcagtatgagattactggcatcctcccatactcctccaaggattactagctgagatactttgactagtaagaaaagaacaaatccaaaatttggttttctgtaacatcaactaagttaaaaaaaaaaaaaagaggactcgatatttcaagcaaatacaattccactggagctctaaagtataaacaatcaccaccatttaaatttaacaatatgcaaacataaacaaggctcaataattaaccaagtataataaattgtacatgtcacttttggtcacatgcaagtagacattaaaatgtctctcaaagatgcaaatgacaccaatgtggctcaattcagtctcccaaagaggacaagaacttcaccagaattaacaagactggtgccaataccaagaaataagcggagttaatatttggatttttaagtattatgttaattgttaagttaactcattttactatatgagtttccacactggtagtaacacatttgttacattccattattaattatgtgtaaccactaagaatcactcctttagaactaagtctaggactgctgtttacaagaacagcaacaatttcaagtagtagtagcagcagcattaagaaaatctgaagaaactacaaataatgagattggtaatatataaataccatagataccaggaaatttcactataattctctggatacacaaaattactaccctcacagtagacctaaattcccttaagcagatttttaaaaattacacaaagacttaaaaatacacatgaaattcagcataagactcttccgatggtacactctatttcctaaaaaggtacctacagaactaattcttagcctatttctaaatccaataattaccaaaacttaagctaaaagtaaatttcatggtcatagaaaggcaaattagataaattccccaagtatatgatcagctttaactgttcagacaggtactttcacacaagttcagatcgttcaatctccacaaccatttaaatcacggggtattaaaaaggcagatgaaatcaggctagaaatggcagagaacattgccaagatattaacctaagaaagaccctaaaaaagactagcctggccaaaatgatcagagttgtcaaaagatagaaactcaatctcaagagaaaatatttaaatatcaccaccaaagaaactcttataattgttaatattttctgacttttataaaagtccttataaaaagagttatgacggcaaaaagcaaccacaggttaccaataattttgatatgaccttttcaaatcataacacacgtaattcactttttaaacatatgtttctctctgctataataaaatatggatatattatttgaaattgtacatgaaatattcacaggcaggctgagcattggtaatatttttccttcttatccaaatgatctaattttattttttctttctaaaatacagattcaaactttcttatgtagttttcaatcaatttaatgtttcggttaagaatttaaagtatgttcacacaactactcatgaatctatgaagttttctccaagtgtcatggggaggtattaacattattttactgatgaaaaaggcggaatttccaaggtttggctgattcaatgagatagtcacactgtatcccaaatcattaaacaacacatatctcattataaaactacagaaaacgcaacgaaatattttcttaaaggatatcagcagttatatcaaatgtgataaatcccagatcacttctttctctaggtccagtgaaatcttctacattttttctaggaataaagataaaagttttaccatccttccaacagaacatacacaattcacgtaacttcttaaagagaaagaatacaggtgtgtgcataggtgaaactgcaattccacaaagaaacgagtaaacaccagagaaacctgtaagtgtgaaaacaggagaaacattctaatccaatattaaagtaggtcttcagctaattgcatatacctcaagagaatccctaacaaaactcagaaggggataaaaactgctaaaaagaatagtaaatacttgatgtaaagcaattttgcagaatgggtagaagaaagctacacatgactacaaggtgatacgaatactaacagatggcatattaaagggtgatacagtaatcacccccttatccgaggtttcactttccggtttcaattatccgcggtcaatctggtgtgaaaataggtgagtccagtaaaataagttattttgagagaaggggaaagagatcatattcacataacttttattatagtatattgttacagttctattatgttattgttaatctcttattgtgcttaacttgtaagttttatcataggtaggtatgtatgtacggtataggaaaaaaccaagtatatatagggtttggtgctatccgtggtttcagccatccactgggggtcttggaacgtatacctaccccattaaggggatactactgtaaccagctgctatttactgtttactacggctcagacccactgacaatatttttcacatttcaaataattctcacaacctaaaaattaggtattacttccatcttaaacaaaaagaaattaaggcccagaatggtaagaaaacttgctcaagacaacaacagctaacatctgttcagtgtttaatatgcaccaagctcttctaaccctcacagggctgacaatggcagtgctgatgtccaccccaggtctattcgaacaatatctaacaaacatcagtacagtaatttaaaaaaaaaaaaaaaaggtggggggagaaggctcgctatttgataactggcttcttggcgattctgacaaagaaataaactaaggttaaagaacttgtgtaagacggaaatagagtagaagggtatgagaacaagagatggaaaaatacgacgattaaagacaaaagtgccagagaataaaatcaaggacaaaataggcaatagcgaaatggcactgtcatttcgaactgcattttttggcgttttcgcagacttcttcaagtggttggcaaaagaaaaagaaataaagaaacccaacaaaacaaaaatctcgctgtatcagaaggctaagatgcttaattctctcagtgcccaacatctctggccaacttcaaagcagctccaactgtttactgccttctgaaggtgcaaaggcaacaactgtaaagggaatgtcaaacagggcaaactcgggtgatgaatgacacaaagacaaccccgtcctgtggcctccagagccgccaggaaaccccacggaagcccgacccagagcgcggcggcagcgcctggagggcctcgcatgcggaccacgagcggcaccggacgcgcgggaggcgccagcccaggcgggcggcggcgccggctctgctgttgtgttgctccctcattggccaggcgtgggtggagggaagtgaggaacaggaagcaagcggaggcaccgacctgaggaacgctcaaaattaaaatttaagagcaagcccgggaatttacggtggaggggtgcaagttccgaggggacgccggaaaagcctgcgacgtccacccctgacgaccgccctcgggggcgaactgccgctcaggagggcgatccggacgccctgcccgcggccccggcacggcagccccggcgcggcggcccggcttcggcttccgccccagcccggtcccggcgtcctgcaccgccggcccggcctcactcacagcatgatccgcgagacgtgcagccgcaccgggacgctcctgtctttgaaggcggtggtgatgaagcagccgaaggtgagcgccgccatcacgctcagcgagaaggcgaacagtgagttcgcccgcgacagcaccgtgttcatcgcgatcgtctcccacgagtccggactccacacgcacacccaggctcccgttccggcggcggaccggctccctgcgatccgcgccgtctgcggtgcgcgcgttccgggagcgcgcgccgccgcagccccgcctcctttccggtcctccgacgcgagcgcgcgcgcgcccgcttcccgaaacacacccacagcgcgcacggggcggcgcggaaagggagagactcagccgcgggcccgcccctccgtcgcggcctaacgccgccaccaatcagcgacgagtgagggaggggcggggtttgttgtggaagacccaccccctcctcttctaaattgcttctccgacctttgggttcagagaattgggaaccggtcgttcgctgtcctttttcggttctttggtcagaggtctgggactgcgacttcttgattacttatgtaccatttattttcacttgaaaccggcagcaagttaaggtggtttagaatctgtcctgacgggtggcgtttggaagcagcactttacaaaacgcctggtcctctcccttctttgtcaaacctggtcaaagttaggacttgagctttttttggaggatctgaggagcagtggggagtggggaattagccgcccaagtccttaaagctgtcacgtgcatcagtatttccacctccaacgtca

SEQ ID NO: 10338 - DNA, 6000 bp, Homo sapiens
tggcactttcaggtcaaagtgttaacatgcatgggtgttcttcctaactttattttcccctccatgggctggatgcagaggacatgagggttattataggggatggcagagccacagggcagaagggagtctgggtaactgaatctctgcaaggaggggagctgccctcctgccaggaagactcactgctgacagttacatgagcaagaaatcggcctctggtgctgcagccttcttaaatggatggtgtctattacagcagctagcagcagccctaacctatgcagacaacaaatggagtagggcatgcatgctctcaccagaagatcctcacgcttctgctctcaaggacaatgttagaactgtaagcacatccaattttaagtgaatttttaaaatataaagtgtaatatttctctcttagatcagttggctttactgaaagattaattttaattttaccaggtagtgataaaatagccagtaatagaattctagagagacttttacttaaattgttttacctttaattttcctcatgggcatgtttgggcattccatgcagtaatggtgaatgccttctgcagagcttactggtacaatataaaattcattatgaagtctgtaaacagtatacatgaatttaacataaaagtgctatgagccaaaaactgtcaaacatagttcttttaagtactttctaatgctattttcagttgggtttattcttttcagcaaagaccatctgtttaaaaggattaaacattatttcactgatagatgttaaacttattaaaagttattttaacatgtaagaattcattttcaagtacaggcgtgctgaatttccctccagtcaaaggtgaactttgagaataaatattgtcaactttttctccaaagggaggagaaaaacagaatcttcatgtcttctgtaccttttgatgtttgcttttctgtatatgtctcttattagtggaggaaaatatttgtattttattttacatctaggctattgtgatactaaaatttagacaaataattcagacatcaaatgaagatattaaaattcaggttttattatttgttcagttataataatttaagttaatatttgctgtattctcagagcaaagatgtatttctgtaccactgtcctgtataaatttgttacccaagatagtgactggtatgaaaggagagggaagagggtgacagatggaaacgattgctgtaggacagtccatctggccagatgcggtgggggaggggagaagaagtgggagagagatggtcctacagatgctcccatgggtaaatgatgggtgcatccctccctgcagtcgggctgtgcctgtacttcacagtcctctaagaggtgtcattcaggccacctcactcagcctatgcccaaccccactcactttccctttccttatgggctgcccccgcaactgacttccatgatgattggttctcattaggccctttgtttctacaccagccttagatcattaagacaaagacgtacttgctaccctcatagcacataacaacgcctggcagatgaaaatcaaacaaaaagcattaggcagtcttagaacattatcttgtatccttactaatcacatccagaccagatattttctaatcacagtttcgtatcatgttaactttttaagcataaaatgtgtatgtagtaaaaagtgcttttcaagctgtaccaataggaagtcagctatgtttgagtgaggcttattttactaccatagtttaaagatcacctaaaggctcaagcttgaaccctgggcagctggttaatgtttttgctccgtgaccacagtttacacctgaagcttagccaagtcactccccaagagaatcaagccctaaagtaataatggatcagcacaagtctgtcaatcagtgccacagggaaaagaagttcacattcactggaagcattatctgtgtgtgtgtgcatatatatacacacatacacacatatatatttctgcacattagacatatatatttctgcacattagacaaaatccactagcaaatttaaacaattcagatggctgaatttggagtcacactgcctttattttattcagtgtgttccacaacctcagcctcttccacattgttctacagcttctccattactttgcaaactgaatcagtgaatcccccaccatgcgtgaaccactttatcctcatggccagtttctaggaatctattgctgcattcttcccagcgggtaactcccccattctctaccaacacaaacttccactccaccactgtatctgcaggcaggaaaatggaatgagaccagaacccatccttgttatagtggagtgggatgtaagtgttccatctcccaagacactcatggtctccagttactgcaatgaattgcacatcagtgcttgtgacataatggacctggaacctgacactaacttgctgagaccctgcaggcatcactgctaccctttccattttcccatgcacttgctgacctcttgcttccaccaaagtgcttcttccattgtccattccctggtttaggtttaacactggagccttaagactgccacccacaccaacatccccccaagatgagtgcctaggcaccatttcccactcctcgtggtcaacccggtcctgactgttcaaatcagagaggctcatttcttctttagctctgttcttgagcaggttgctagaaggcaacttctctgcaaaacatgtagctgctttagcagatatctcttgtcctttttggaatccccattctcccataggagattcaaggctttcatttcttgaaacttcagagtaactcctagagttactggtctcagaggtagctggagcttctgtgtctggaaactgtccagaaggaacatgttctcttgaattgtcacagacttccctggaaggattctgcaatctccatgatgctgcttgcagtttaccaaggtctttggtcttagaaatcaaatgtccattgctttcttgaagatgctctaagaaatcaaaggaaaaatgtaatagagtcaggtagttcatttaagaaaaaagtcaggctgagaaaatagatttagttactgaaagctttactactaatcaatctgcaattcacaaagtccccctctattaaaatcaagtactacttaattaaccagtatgctcccaacactgtgctctaagaatacacatgtatatctgacaacaaaagggacatccaggagtatcagtgtgccagcacaagtgtaaatgaagtggtaagctgtagaggcagacgtgtaacccccccatggtccccagtctccacagtccaggccatactggcatgcagccaagttaagttgcttggctcctatcatcaaagaatgttgtccaggctgtggggcaaagggctgcgtggctacgttacaaaccagaagagtacacttgttctcccaggggaggcatgcagggcagggattggctctcgcagacctgcgggcagatcagcaggagctgtcaccttggggagatacggagaacagtagtgcttccctgggcaggagtggagggagaactgggggaaggggctggtttctccttgccaatcccatatgcgttaggaacctccccaacaaaacggtgttttgtatccccttccattgtaagcattttttaaaaaacgttcttaaaaatacaaaatccaagtcctctaaaaatgcagtttccttcttggccatgccattggtagtccaaatagctccctacaagattgaaatctccaaatcatacatacaatcagcacagctgtggttttatgtggtgtgggggtggtggtggtatggggacaacagtcttgtttcattttatcccttttttttttttttttttgagatggagtctcgctctgtcacccaggctggagtgagtgcagtggtacgatttcggttcactgcaacctctgtctcccgggttcaagcgattctcctgctttagcctcccaagtagctgggactaccggcgcctactaccacgcccagctaatttttgtacttttagtagagacagggtttcaccatattggccaggctggtctcgaactcctgaccttgtgatttgcccgcctcggtgatggtgggagttggaagtgagaatgaacaaatattattctggattcccaacttttcaacctaaagcatgagattggtcttcagaaaaaagataagtgaactgtctaggcatcccagaccaatcacagtaaaggcacacgggcagattttcatatggctgcacatgaacaccactgggctaaaaataaagttcacagatgtcattttcaccattaggcttctgtccaggcatgggcagcttgccaagggagggcactggacggtaagcttttctgccagtgttcgctctctgcttagcaaacggtccctaaaatacagaaatttaaacccagatgtcaattctactcatcagggttgggtcccctatttaagtagtcccttcctagggatgactatccggccctattctggggcagcgtggaggggactgccgacagtgctgaaaggggtgaccaaggcacatccccagggcctcagccacagccttcatggccagagtccaacctgaactttgccttcctaaagaagcatccagatagcaggaggcgcccgcagttcgggtgttcccaaacccagctcttcatgggctgtgcgatgggaggatgtcagactacccggattgggacttagaaaatgtccctgcttgggcagagatcgaagaggcttgtaggatcccctaaacctaagcccccctttccaaaggccgggaaggggcgccgccactgcagccgcccgcactgcaccaagcgccgccaagtggaggagctcatccccgccggaggggcaggaccaagtcctcaggcgcgggcgctgagggactcggcaagggcgcggcccttggaggaccagacaagaaacctgcctgcgcgtaccaaccagcctgggaaaccgaggggcgtggggatggcccagtccccttaggagagcccgtccgcaggaatgggcccctaggaaagctccaggtgggtttgtctctttgctcccttcctcgatgaacctcaaagctctggcagatgtgccctggagtcacggggggaagaatacctggtttggtgaccagctcctgcccggaaggtccagggctcagtccgctgctgccactctgatggcctcccggaatcgcagctcccccaagaggggcgtctttctcctgctccgcatccccgtccttcccggtgtcgccagggccgccccgcagcagccaaacgaaaagtgctccggccagaccccctccaaccagcagggcggaccagacggcgcccatggctgagaggccgcggccgcaggagactacagggactgggaccggggctcaggtcacgcacacagagccacacctaccccgcccgctccagccttttacggtttctgcgccgggcactccggcggagcccggccctgagcgaccagtactcaactttcccagccccgccccgctccccgcccctgggctgcagccccgggctccctcccggggaagactccagcgctcttctgtccctacactttctgttcccggccttgccagttgccagcggccaggggcgcaggggtcggcgttccacgtgtgtcccgcgtgaagaacccaagtgcgcacaactgccccgcgcagccgggacctgccccaccgcccttccttcttccgcctgctgcccgcgaggcccagccctgcctcggcccgcaccgggcacctcggcgccttctccccagggaagctcagcagcaacgcggtcagctagaggccgagagcttcctggaacttagaggtgggagaggccgcgggcgtcggtgacgcgcgggctggagcgcgggctagagcggtggcgcgttcgggtgggatgggtggcc

SEQ ID NO: 10339 - DNA, 6000 bp, Homo sapiens
tgcctgggtcacctcctctcccctctgtgcactctctcctaactgaccccaaccaggcctgtgtttgaaataccacatacgggccgggccgatggttccaaaagctctctccactattcgtccgataccgtctctccacttcaagtgggccagccaccacctgccacccttcctcccgaatgccttctccccactcaatccaatccttcccttcctttaggccatgctcaagtcctaacttctccaggaaaataaaataccttccaaggactccccagccacactgatctctcccctgtttgggcttcctgaagcactgaaacagtctccagcacaggatttattacttaatgagggatagtcttttaattgttccctaaatgtctgcttcctattgtgcaaatccttcctcctaactagatttaagtctctgaacaatacgagcatttcttttcttgtactttgtactgagccacactggtgatgtccaaaataattattagttctttgataacaaacatgaagaaccaaaactctacacactattttagtgtgttagtctgagaaaaacctggaggttatctgacaaattacaagtaatttttgttttatatttttatttgtctagagtcaccaagtagcatcacgaggaacccacatttagaaaggcagtgataaatttgtaaaactttccatcaatgaaatcctcagaactttcaaaacttacattattgagcaagatttaatataaatcacagaaatacagtaaataagtatattttcaacaaaaacactaaatgtaggtaaatttttgttcaatttctgtgttataataatagaagcggtttaatccctcaatacaaaagtctacctgagacacggggaacacacagttaagcctaggatttctgccagacctttctttaagcatagctacagaaacaagtggtgttcatcaatactgttgaaggatctgacttttaggctatgatgaagaccagttcatccattaaatagaaatggctttatttttcatgatttaaaaaaaaattatatcccatctttgccattctcccagttcccatcagttaattttcctctctgtggccacatcacgactcagctgaaaacacctggccacacctaagtgataaaggctcaaaccagggagcctggccatcctcgactcagcccctacagactcctctgaccaccctgggcaccagacacttacctttgacattccggtaacaccaactgcacagcagcataaccagatactgtcctctccaaacccgtgggcacctggggtcccccacttccaacctatcatttcctccccttgttccctcaccgttttcttcacagttatatttttctttctttctttttttttttttttttttgagacagagtctcactctgtcacccaggctgaagtgcagtggcacgatcttcactcactgcaacctccgcctcccgggttcaagcgattctcctgcctgcctcagtctccctagtagctgggattacaggtgcaagccaccacatccagctaatatctgtatttttagtagagatggggtttcatcatgttggtcaggctggtctcgaactcccggtctcaagtgatctgcccatctcaacctcccaaagtactgcgattacaggtgtgagccactgcgcccgccccacagtgatctttttcctctttccagaattggctcaggatcctcaatcccactaggattgagggagaaggaggccctggttgccctcctctgggtttcttttgctacatgtgcaccctggtaatagagcattgaccatactgttctgagacttagtcatgaatttttctccccaaatatctgtaatttcctggagaagaaagagcatgtttttatttgtattctgtcatgagctggacagtgtttcatagaaagaaatgtccaagtcctgaccttttaacgtgatcttacttgtaaacagggtctttgcagatgtatttaattaaaggatcttgggatgagatcatcctggacctagggtggaccctaaattcagtaactggtatccttataagagaaaggagaggacttgagacacacagacacacagggagaaggccaatggaaggcagatgcggagacttaagtgatgctgccccaagccaaggaaaaccagaagatgagagacgcaagcatgaattcttcctaaagtcctcagagagagcatggccctgctaatagattgatttggggtttgtggcctccagaactatgagcgaataaatttgttgtttcaagccaccaagcctgtagtaatctgcagcagccctaggcactaacacacagtccaaacttcaacacgctacctactacctagaggccactcaacaaaaactgtgctcaactaagatgaaggcaaggtgaggaatgagaaagcatctgaactgcaggacaggaatctgggacgtggactctgatgctactatgagaattctggtgagcaagtcccttatctacagtaactctaactctttccccagtaaaatgaggaaactggcccataagacccctctacagggggcctcatataccttgaaccctcttcagccagaacaactttcctctttttttttttttttttttgagatggagtttcattcttgttacccaggctggagcgcaatggtgccttcttgtctcactgcaaactccttctccttgggttcaagcaattctcctgcctcagcctcccgagtagcgactagctgggattacaggtgcacgccaccacgcccagctaattttctgtatttttagtagagatggggctttaagcatgttggccaggctggtctcgaactcctgacctcaggtgatccacccacttccacctctcaaagtactaggattacaggcatgagccaccacaaccagcagaacagctttaattgatccttaattgtatcttcttcccattcactaaacaaattttttttttctttttttttttgaatgggagtctcactctgttacataggctggagtgcagtggtgcgatttcggctcactgcaatctccacctctcgggttcaagtgattctcctgcctcagccttccaagtagctggaatgacaggcatacgccactacgcctggctaatttttgtatttttagtagagacagggtttcgtcaagttggccaggctggtcttgaactcctgacctcaagggatccacccgctttgacctcacaaagccctgggattacaggtgtgagcccaccatgcccaaccttaactttattttcatctaaaaagctttcaggcaaaaaaaaaaaaaaaaaaaaaaaaaaaaactggattgaaatgacatttcatagttacttatattttaaccagtttctaaaaattgtagaaaaatagtttaattggtaatatgctgaaaatcaatttaccaccatatcccctatttttttctgcaacgcaaaatcaacaatttactagtagttgacctaatccagctgaaattgtggacacttttaggtcagaaaaactggacctaaacatgagtcaacgtaaatgtcactcattgacccaaaacctaaatgtttataacataactgcatgatgactaatttttgcagagtaacaaagaaaatctcctccaacattgggattttctccatttggactgtaattaaagtcccataccgaaaatttccacttcaaagaatctgactaagaaataaataaatataactgctgccaccaccacatggtaacgtgttagtaacggagtcaaataaaacaaaaactctttcatccatcttcatgcctccataaatagacacatagacacaattttcatggttaaacgtttcctaattcaaaaaatggaaatgaaggtaaacaaaagtgttagtaatgaaatgtatacctggcctacctgtgtatactcctgctgaatttgggttacatttaaaaccatactttaagtgttttcatagatcatgctgcggtccttgcattcatgtttgtatagtggctgccttgattctttttttaggaaaccaaccaaaacaacatagaggaaccccgagccaagggactcacatttcagttgaacaaaatacccatgagaaacacttagactcaaaactttccaaaccaattcatccttctgaaaacaaactcgacagtcactggggccaactgttcagctagaattggcaaaactacgtttgcaaaactgaaccgtgaatcccagcacaagtgagttaccaaaatttttccttccaggtggaaactcaatccgaaaatcaaaaatccctcgagttggaaggctcaataaacccacggttttcagttccaatgttcctggcttttaaatataagccctcacagacacgaaaacgggactgcaaggtacataaacagattgatctgaaatgtttccagcccttaataacaactctatcttaaaaggtgctctttaactgtaataaaactaagatagcaaaaggcaaaggaagcgtcttggggtttgggctcgcacacagtccttgtgttttgcaaactctaccacgtaagtgtaacttaatttgcaaagaagcagaaggactggcgcttgcaatcaagcattgtgttttctggaaacccaagcccaggatgaatgagctttaactctgttgactgcgtgtttacttgcatcctcacgtggcaccgcgcagcccaaaagcgctgcgccggggacagcgcggggagcgcctgagaacccgaaaactttactttgcaaactagtggagctgggaggcagctcggacgcagattcccttgcctttccctgaactgcacccatgccaagcacacgaggtctttcctagcaccgccccctgcctacagctccacacaaaggcgcgtgggtgccggctggaccctgctccaaagttgagcggagagataagaaagagccgagcgggagaggacccagcgtcgcgggagatactcacagggtgaccgtgcggttgggcagagtatctgggggcaggacctgcgcgagttccaggctgctgcacaccaccttgccctcggcggcgcccgccgccctgccagcccctcggggccgcccatcgtgcttgcagccggcgggcagcgccgcggcgccgccgccgccgccgcctcccagcagcgcgagcagcgctaacagcgagagcggcagcaacagcggcggctgcgcgcggccccgccggcgtccgggtggctccatgctgcgggccggggcctgcggggcgagcggcggcgcactggcctagcgggccgccccggagcccgggcgggcaggagcgcggcgcgggcccagcggcgaccggagccttatggcggccggaggacgggccttccccggcgcggacatgctcctttgtccgctgcggctgcgctgggcctctagggagccgggggtcacggccgcatgggtcccagcgccgctctaccgcccggcgcgagcaccgcctcctcctcctcctctgccgccgccgccgccgccactgcctcctcccctggccaggacccgcgcgcggcggctcctccccgcccgccgccggcggccgcccccgccccttcccctcctctttcccggctctcctgctctccccgtgtctgcagctgcccgggacctcggggaggaggcgcgcgctcccgggacctgccgagcccgactccgacccggtgcgcgcccgggcctcggcctccgggcaggagttgtggggagcccgcgggaaggcagtaactcgtagagagaacggaggaaagttcgagtccgaacggaggaaagttcgagtccaaactccacccgcggtggccactctcctgctcgtttcccttcgccgccaccgcgctcgcaccgcgggcacaggacaaagcagtcttgtgcgctcctggagactgcccatgtggcccaaggagcctggcccggaggatggagtagggac

SEQ ID NO: 10340 - DNA, 6000 bp, Homo sapiens
agggctctcaggagatgggcaagctgccacacagtcacagcaagtgacacacctgacaggaatgggggaaatgagagtgctgtgggtggaagaatgaggcccgattcactatctaatctggtccaggagttgtcccagactgaaggcaaatagcctttaccaaactaggatcttactattggaagccttgaaggatttacggattacttcattgccagtgaaacctaagacatcatttaattgtaaaaaggtgttaacttgctcctagaactaagtatttaactcatagtacagtgaattataactctgcacattagaagcttttaaaactgtggattcctgggccctactttagatcatttagaatctctgggaagatggatggggtctagacactcatatatttttaaaattttcagggattttactgttctttaatatttaaacttaatttttaaatgactgaagtaatatgcgttttttattgtaaacaaattatttgttctactctcctatgtagatttataacatatatacaaggtataaagaatataaaataaatagctatttatgtaccaccttttccaatttgattgaaggataagatatatataaatatggaaaagtacagaaatcacaaatgtatagtcaatgtgttatcccaaaataaacatacttaggtaaatcccatctaaatgaagaaacagaacattcccacaatcctgctttgctcatgttttttctccatcaccatccttgcccctccataaagatataaaaagtcctcaggtaattccgatggtccctaccattatcttactgtctactttttcactttatttctctcattgttttttaagaagagaaagtactttaggcatgagaattatttgtctctctgatctaataatattaataataatgaatactttgagttctatatgttcactcacagattatattgtaagttatacacgaatgttatattgtggcaacaaattttcaagctaacgcttgttcaaggaatttagccttatttttctaaaactaaattaaacttctctgtttcccatgctacctgatggcaaaaaacacctttccattcagtttcaacagagaccatgagcaattgatggcaattgcttccacattcgaaaatgagatatggatccgcagtgctaagggaggtgggttgctgcattgggaagtctgaggttgctggagcaaatgatggtgaccatgtccactggatcacttgtggggcagtacacagaggcccaagttagaaaaccagcctgcaggtcagcttaaatgctgcctaagagaacagcctggagagatgaggtgatctcaacagaacagggggctaccaagttccaagggactaaggggccatcaacagccagctagagagatgctttgatagtggtgtctttgaattaactatctcagagtcagctttacacacctgccaaacctggagagcttataagtcaatttgcagcagtatcaatggagtagcaaggccatttctgctattattgcttctctctctccactaccttggaacagccagagccaggctcaaagtggggtgagcggctgggtgagtggttaaggaataagagctctaggcaggaacaaaaaagaatgtaagatgggtctcctctgtcccttttcagtagattttggctatgctttttgagggactgctatcttctggagaaattctgggaatttaaaagaaatttttaaagaaattgactgtgatatagaatcaaacatattaattagtttatgtgtattatgtgtctgtatgtctatggctaacaactggagaacttttacaaaaatttaagtatgactggaaaagtcatggggactgcctgagtttccatttaagaaagttgaaaagagatatcaggccacagaacaggtttcaatgggcagtggggggaatcactaaaattgtgctctgattatatctgacaagccccatttatccactgtattggctatatcaatatgttggctacaaataattcagtgtgcttgtcctcaattctaccatgattgctttgctgtggtgcagtggtgactatctgtcaaggcctgggctgaggagagaggcctctgagcagtttaatgaggcatcatgggggataaaaacaaacacattgctgaatatttcaaatgatcattccaaggctgctatctcattcagtcatcagaagaaaccgatagggtaagtgctattatttttcttttcttacacatgggggaaactgaggcttagagaggtaagattacttgccacaggggaccacacgtaagaggtaaatgaggagaatttaaagccagtctgcctccctcttcagcccattctctgaatatcatagttcagagtagatagtgtagcctccacgaatccctattgtggctatagcaggggacagtgtattgttctttttctaggagacatttttggagtgggggtgggaaggtagtcaacgaaatttactaactcacacaactctccctatctcgtaggcatttctccatgaaaaaaatagctctaaaaacagctagaggagatgtctgcttattataactggcctctgccaaaggcttacttttaattgttatagagccaggtcagttattcctttgactgtggaaataataagatggttataaaatgcagctttggtatggtttccttgcaagaagttcacattttctatcaagaaaataattctgtgtgtatggaagtgtgtgcctaagagtttttgagtgcagataaaattgttttgatgcctgaattctcacaaagtttagccaaaatatccaggtacttccaggctactgtcaatattgggattgctccttctcattcctccatgtggcaggacttttaaagaggaaaaaaggactgagtttagagtgctgaaataacagcccgattataatttttgtcaatttaccacttggacgtttattctctccttccctatatattccaactccttgctctttttgcattgtaaaatatagtatttttaggattatacaccatatgctaatcttttacccactcttcagtatcacaactttctttctctgtggggaggaaaaatccctgtcccctttctgtcttcttgccttttgattctatttgccatagtctaattgacaccccaaggtcatcagcccctgcctttgtgctaggacacgcaaaccacccaggccaatccctaacctgttttttcaaaaaacctccaatcagagagaatccacgacttccttttgtgaactgttgcaccgtgcaattgcacactataaatgtctttccttatctgtgtgtactcttatctcactgttctattttttctcctcatttatattaactctttcttacctttttttctgaacttctaggccttctctttccagaactggtggaagacaaatgaaacggccaagatggtaaggtgagtagttcctgggaacgcttgtgctctaaccccaagttatgtgggatggacactcgaggggtgatggcattcctcattttacaagttacttgcttggctgcggctgctccaccaagatagcaaacattctcgatcttttgaacttcatgagactgacatttctgagtctgtttgcgaacaggacactagagggctcccaggggttaaaaataagtggaaatttatttgaatgaaaactgattctctacggcatttcttttttccgaatttaaaattaaagtttattttgttaactattgtttttaaaagctttgtatctcttaaaaccatgcagcagtcagtttccaagttttgctttgcaatcagtagttttcaagggagcttttaaagctgaactgaaatgtttgaaatgtggaacactcttgaccatgaaatatgttctacttacatgcctcagcctttaaaagttctttgcattagagtcaaggattacattcttcctggagccaagcatggggccagctgtgtaagtaaggttgcttacgagtttcttctttttctttttaatagtgaaaaaacagaactagagatgcttttattttctttcagctgacttcggtggaaagaaaagaaataaaaagcagtcagagttgtgttgtgttgtgtgtgtgtatgtgtgtgagagagagagaaagagagagagagagagaaacagaataaatgcaactgcttccaagatatatggacatttatggctttgtattatactaacaatgtaagctaatggaacatattattaatatgaagtacaatttgtacctttagactaagagaatatgtttctaaattttattgttaatacttgctgcttgtacttagttaattcaggactttaaaaaataaaaatggtataggtatagagtattaaaaaattatctattacttgtcttaagttctttctgaatttcaaaaaggaaaagcccaggtttgtcacattttaacgcttttgcttcagagtcaacttaaatgactctaggtacaagttataaaacactcttggatttttgtggcttgttttcactactttcaagtgactatcaaatctatacatctatctcgtttgcatgcttttaaattttatttttaaaaacatttagtggtgatatttatgaaaggaaatgattactttttttcttgactcttgtagaggaacttaaatggtttgaaattgtgactcagttaactctgtatccattcattcccagaaacaagccgcatttctccttggggagactgataatttaaaaggtttgttgtgtcagaaacattcccagcttcatcaccaaccctttccttccacctctgcccactggagaccacttatatcccgaagcggacgcggcagctgaagtcaggaaaccatgcatcacattagcaggagccaactgcagactttaaactccgttcaacatgtggatgcggcagagaaatgacctgtccagacaagccggggcagctcataaactggttcatctgctccctgtgcgtcccgcgggtgcgtaagctctggagcagccggcgtccaaggacccggagaaaccttctgctgggcactgcgtgtgccatctacttgggcttcctggtgagccaggtggggagggcctctctccagcatggacaggcggctgagaaggggccacatcgcagccgcgacaccgccgagccatccttccctgagatacccctggatggtaccctggcccctccagagtcccagggcaatgggtccactctgcagcccaatgtggtgtacattaccctacgctccaagcgcagcaagccggccaatatccgtggcaccgtgaagcccaagcgcaggaaaaagcatgcagtggcatcggctgccccagggcaggaggctttggtcggaccatcccttcagccgcaggaagcggcaagggaagctgatgctgtagcacctgggtacgctcagggagcaaacctggttaagattggagagcgaccctggaggttggtgcggggtccgggagtgcgagccgggggcccagacttcctgcagcccagctccagggagagcaacattaggatctacagcgagagcgccccctcctggctgagcaaagatgacatccgaagaatgcgactcttggcggacagcgcagtggcagggctccggcctgtgtcctctaggagcggagcccgtttgctggtgctggaggggggcgcacctggcgctgtgctccgctgtggccctagcccctgtgggcttctcaagcagcccttggacatgagtgaggtgtttgccttccacctagacaggatcctggggctcaacaggaccctgccgtctgtgagcaggaaagcagagttcatccaaggtaacagattcacatgcttcgttatttgcagctgttggggattctggttcattttcttttttccctcactctctttttctaaatgatttttctccacccacggttca

SEQ ID NO: 10341 - DNA, 6000 bp, Homo sapiens
acagccgtacaggtctgattttgagctgccccaggggcagagacatttcaacagaataacccagtcgcagcagatcctggaggccttgcctactaatttgttggtaaatacttgtccaggattggatacaacttgataagatactggaccctaatgagcccagtaataacacctccaaccccttcaggtcagagaatgaaaagccccccactatctgtttcctgaaaaataggagaaagataggtagatgagatgtctgcaaagtacattgcggcttgtatctgttggattctttttcactggttactatctaaccacagtcttgacttgaaaactggtgaaaatgccctgtgtcatgaatcttaaagtacagttaaatttgttacaaagttttccttgactcggggattctgatttgctgcttctacaacagctttctttaatcaagaaatgttagacattagagttatttgagatgaacctaagtcacgctatgctctccttgctcaggcatttcttccagaaccctgggaaatcccgtcacctcttgagtaacgatgatagtgtccccacctacccgtttcctatgagggagaaagagagcgacaatgagataatgtccataaggagctgtgggcctatataataaaagctgtcattaatacatctgtataaaagctcttattgacacatgctcttctttgtgacaaacatggggcaacatttcaaaccaaagccctgcttatataaaagaggtagttaagagcatacaacattgtggcactgtggctatgtggcactcccttatgagcacagattccaagaatgtgaagatggcaaaagaaacagtgccagtctggttccagggatgggtctgatctgattcacccttcagacttagtatggccactcagagaccagcagagcagaactgccacactatgcctgtcggcactgccaaatcttctgggtttcttctgtgtcttagggctgatttactatgtggagaaacatggttacagcaatggaggctgtaacaccaacttaccagcaatagtgaggggaatagaatacattaattttataaaagtgcaaacagatttctctctaaggcatgctctccttactgcctccatctaaaagagtttgtcaacttaatatttgtatctgttgacagctttgtgcagggcaatattttgccagtgaccccagtaaatttggggaagatgtagcataaaggaagaaaggcatttgaggaactgtatgtatagaagttccccagaccgcagtcaacctctctccggctcacagaacagcatgcagttggttgactgcggtctggggaacttctatacatacagttcctcaaatgcctttcttccccagatttactgtcttttgcctcggctttgtggtttatcactgacatccatgacctttgttccctgctttgacctctgctacccaaacatatgaaaaacagaaccttatctccacagactgtttagaaacttagtacttactaaccttcctgtctacagatgaaaataagaacagtgtgaaacaaacagaataaaacagcaagtatacaagtatgattaagcaaactaagagagactggacacagtggctcaggcctgtaatcccagcactttgagaggccaaggcaggcggatcacctgaggtcagaagtttgaaaccagcctggccatcatggtgaaaccccatctctactaaaaatacaaaaactagacggacgtgatggcccacacctgtaatcccagctatttaggtggctgaggcatgaattgttggaacccagaggcggaggtggcagtgagctgcaattgcaccactgcattccagcctggacaacagaacaagactgtctcagaaaaaaagaaaagaaaagaaaagaaaactaagatattggaaatttacatttaagattttggtaaaacaaggcaagtgaaaaaaacctaatgaatttctacttcattgtgttacatataatcaaccaatttgttggtacttgatatatatggcaaaactatccagctaaagaaataacacttataagtgaaactgaatatatacatcttatgataacttggcagttcctgcaagttccaggatgccaaagtcatggcagccctgatagggacactcaatctttggcaaattatttggattattatggtaaacaaaaatagtaacatttttgtttttaattcagaatgcaaatgacagatcccatagtatgccagaggaaaaacatgtttcaaaagacacatttatcaaaccaaaataatgaattcttcaagtatgcgtgatttagcaacaggaaaattccttgaggacaaaacggtaaccacataataatggcttactgagcaggcatggagctaaaaatctgtagtctggtattgccactttgatgtcacagcacttcactatctttgggtacagttttccatggccacaaaatcggcacgacttctccattaatttttaagaaatggcaggaacgactggactcttgtggtaacaattataagctattttgactccataaaatgagtcactgtgatagatgctgacaagaagcaagtgctcctgttacttgaggtaagccattaaaacttgcttatcttaagaaggtttcaaagtcactgatcagcacaaactgctgtttctactacaaatgataaatggcacaatcatcaccacctttgaaaaacgaatctttgatcaaattctataagagaaatattagaacagattatttacacagtactcctcttcctgggaagcaagacttggtacccttttaatgagagaggatgaaaaagtgtcatgcaacaaactctggctctttgggtctctctaacagcttctttgtaccaagataatacacttccttttctaacagctaaataaaagctcaaagagaaaaaacaagggagaaggacaaaggttctcctcagacaagttgactgacaactttcaacagaagtccattatcacatcattactatatttggctccttttttggacttgtttctttatatattcattggactgtgtttcacccaataaggatttgagaagaagccacatttcaaattaatgtaatcaacatttaggaagtgcccaacaaaagaagcattgctaactgaagctgcctggtacacctttgtcgaggcccgacatagcaatgcttgcctttaaggtggcattagtgtatcctagcaatggaacacttttatagatgaatgaaaataacttgaattctaagatcttctcctttttactgtttagtagagttccttctttttctctctgaacaatagtatgcttctggcaaactctgaagtaggatttcagaaggaagagttgagatatgggtgctggcttaacctttgtgagcacttcctcatttttgaaatcttcagtaaaatgagtaagtactagcatttactcattttactcttcaaccaaacatgcctaacacctgtactgtatttttttgaggattttactgtacttctgtaggtgttatttatcctcaaagattttccattttaaagacctcatagggctgccacatcatcactgtgatgtaaagagagacatattagatcacctgcaaacagaaagagatagaggaggcatgtaatgtatctcgaggtcacaggccagggacaaaactggcatcataatttctccactaggttgcatacaccctcatttatctacatcaaaacataaagacatttacatgcttttgcccccttccagtcaatcactagatttacacaaaggcttatttcttaaatctgttaattaaggtttttcaaaaacactaagtatatacttaataaccaaactccttcacatccattgtaatgctggcatgaaatattataataaaacacatagtttggtggtgagagcatggattcgtgtctcggtttagtggctatgtgaccctgggcaatttatttaactcctagactcctcagtactttaactggggcaatgctacctcttaggaatgttgtatcaaatgaaataatacatgtgagttgcttagcacagtgctcaataaatgatagctaagcacccccccccccataatgattaagagagggcactgcatagattttgaatagttcctgatgagaatctcatattaattcagaggaaaaagttctgattttgataatgttaagtggctacgcaagaatcactgagtcaaattgccgttaagaatttttacatcgcacggagagaaatgtgtgaaatgttactggggcgctctgggttgcaggctgatgggagcgcgtgtatggagatgtgggagtcccagggcgacccgaggcggaggggcagggaagtggaggaccgcggcggttactcacgcgggggtgacacccttgggcagccccagggcgttgacggccgccggcggcggctgcgagggcagcagagcgctgaggaaggccgcgggcgtctggctgtggccgaagcgggtggcaggcgacgagcagtgggacgcctgtcccgggctcgggagcggcggtggtggcggcggcagtgggaacacgtcgggcaccgggaaggcagccgtggggctgaagaccgggggtggcgggggcgggggcgacggcgaggaggagccccacggggcctcgggctcagcgccgaagggctgcgcgaagggcggcacgggggcgcggccgaactgcctcggcgtcggggacatgggcgacgggaggctggacgagctggggctggaggccggcgtgccgtggcccgacgcgggcccgaggttctgcgcggcgatgaactgcttggggcgcgcgtagttgaaggagccggaggactgcatggcgggggcggagcgggaggccagcgcgctcatgggctccggggacgcgggcggcgtgcaggccgcgagctcggggaaggcgggcggcggcgggaaggggggcgagggcggcgcgctgcgcggggctggcggaggctgccgagcgccggcctcctgctccagtcggatttggttctggagttgctggagcttcagagggtccctggggggaaaaagagaagtgacaccttcagagatggaacggccaggaacgtgtattccaggagtgagctcagcttgtggacatcgcttggcacttaggccagctgcagagaacacccagggaacgggcacacgttagcaggcccaagtgtggggccagcagttcattctggaccaagcgctaagtcagtgaagtatgctcgcccatttcactctcatttaagtttcacataaggtgatcccaaccagtttacaaatcctgatggaaattttgtctgacttccaggagccataatttgtttttaacggatcaagaaatattaagagaaaaacgtttcgacatcaattctcagtcctctcattcgtagccaatttttggtaaaagaattctatcaaatgagaaagttaaaagcaaaaaaacacttggttgaagttatatttggcagatttacgttagtccaatttgcctatttcagtgctgtcaactctacattcaataaataccacaggtggattttttaaaaaatttactttaatctctacatttgtcccctaagaaagtctttatgcaaaattttagtagtaaactgaattgcgaatttcttacacaaaccttaatacacattgatattgtatgttatttcaaacacatgtaaacaagtgacttctataacaggtaggtgttcaataaacaatagcaaaaattttgtaatgatgtatatttaattccccaaatatttaccattgagaagagatagttcaaatttttatttctgaaataagagtaagcagctagcaatgatctaatatctcactcttttactcaaaaactttgctgtacatccaggatgttttcctttattcacatgaggtaaacatagggaccaatagctgtcaaaagaaa

SEQ ID NO: 10342 - DNA, 6000 bp, Homo sapiens
cccagatgtttgtgactgatttttttcagttggtagaaacactgggcaagtaagtcaaacactataggttccattttacaatctgagatttgacctccagggctgtcagtgagactggaaccctaatccccgagacccatagacatgtgtttttcattgggggttaggtgataaagggagagtggggctggagagaaggtaaatatattgatgggtcagtaaaaagtccgtcaccaacgctggtgggctaattctaagagagaactccatcaccagcacattttacatctacatactacacaagttaccatttaggtattttctcacttaaatgaggtttccacttcctaagagaaatatcatcaaataaacctgaaattctttataatgttatgcatttgcataatgcagttataataccactgcatttttagaattttaaaagttaactaaaccacaagattaaaaaaaaaaggaacaactttcattagggttatctttgagtgatgctttctcaacaattgacaataaagcaaaaataactcatccccgccaaaccgatcctaaggaaacattggccgatacaataaaacaagacaccatttgaaaagccaaagtaacataacaaacattcagctccaaatgagctaaagtagctctgattctagaaagcttgtgggcattaaaagctatacagtccttacttagctgaaaaagtaaatcaattttttcctctcatcagcatagaatgcacaatactcataaaatcagggatttgttgatgtaacttcacttgattttataacttatgatctgttacatatttattttaatcaataagccaaaagctaaaatttcaaaggcaagacatcaaaggtagcactgttttaaggtggccattcctcataacagctcttatttagcaacgactagttatatataatgaaagcattaccaatgagtttggaaaaataaacattctgccaaaatacaaatcaatttgcacttctgaacataatttgcaacatcagcatgttacttactgttctcgggatgggtggagaaagagatccatttgacatgtatgggtcgttattcatatttggcatcattatgtacccggaataactcgagtaggagggtcccttgttgtagaggcctccatctggatgctttcctgggaagatccaaagaacaatcaatgatgcactgacttcccttttatattactgtatttttcatctgaaaatctaatagttctaagataaatcagaccctacataaaagatttgtttacaaaatactgtaactggattattatgctctattttagattgacagtatttattctcttaaatagcttagcagcaaaccagatgttttaaaaacatgtagttcaaacagttcttccactactgactgatgtttttacaaaaataagtgttatccatctaacttaatttgttctaatactaacaaactggactaaaatatacagaacacacacaactttaaaaatgtaatataaatatattaggccatctagctacacacaaacacagagatttatacacttgaaattatgttttgccttgtagacaaactcaaagattctacctgtgcttgcagatttctagaaaaatttctagattctactgaaagagttgttatctagtatataggcaactatctaaatttataaaggattaactctgggaggcttaattttatgtgctacacttagatcattttgccaaaaaatttctgttcgatatgtgtatttcttcttgttaatctgtgtaactatcttgtagctgaggaagaagcctaatatataattctcttccctgctcctggttgacatattgtatgtaaaaacacttcatttcagttaggccaattgttaagtaattaatggaaaacagataggctgacaagaaatccctaaggttacttgattcttttaaagtcacaaagaattctccttaagtctaaatacatatgtatgtaattttaaagtttttagcaagaatcagaaatagggagaaagggtatcatttctgatatgcacattcctaattataagttttatatttttacaagttagattctgctctgctcatttactgccggccttttcactgtaataaggaacaagaaacagcaattttgcaagtgaaaatccactcaaaactattctggttggaaaataaatcgatatatactgtcgttcttcttaataatatattaaaaatactaaagatctaagctaattaggatttaaggtaagatgaggaagagaaaaactcattgtagacattccctcttcccaaagaatctggaacccacctgaaatccaagggtccctaactcattcaaaaacagtttttaaattatgtaatatatattagaggtaagccataagtttcctgcgttttctttaccattaaaatagtgggcatagtctgacctagtcccagtttcttgaactcaaaagtaacaaaacacacctatttatacaaattgcaccccttatctgctaaagtcagaagaagtagaatgggtgtcttaccgtcatcggggtgttctctggccttgtcgtggtagggctcctgagaggtttgtgcttgtctggccacctaacatcatgaatccccacacccaaaagaaagaaaatcaccttagagtttgtgacaataatggtacaaatgtgtgtgcgctggtaattcaaaggaagaggtttaggggcaactctgttttatactctgagagacatacgctagtgtttagtactgcataatccttttcttgtcaacatgtatttttgagtgattattatccacccgggaccaaaaacgtataaataataacaaaaccaataaaaatatagttaaatttgggaatgatccacatgctgttctgactgctgtttattaaaccatatcaaggctccttggatgcctaatattacaggagtaggagttaatggggttgatggtttcgatagcctcttcaaccactgttcacttcaatcagatctgattaaaagaaggctgaaatatcattttgcaactgaaaatggcatttaaacataaacaagccaaccactcagatgcggtcttaaggcaactgccctgagcgcagttacagcagaagctccactcgagcttataacctactatggctggctgagtgcaggcttacaaaagtagaacgattctgtggttaaagggaggaaaattagagagtcaggttatagacatctaaaaggtagcccagttgatatcagttttggtaatcaccatccacccagacagcctcaaacacgtgcaaatcagtggtattactccttcaccctcaggcctcctcatgcccacttaacacccgagtgctctcggattcgaacgcagtgtccttcacccggaccagaaaattgtggagaatatgaagtgggtggcaaaattatttatggactaaggcaggactagcaaaatgggtagaaagagaggctgctctacaaataggagagtttggcaaaaagcctgtgttttggatgttattcggttctctggacgtgtgtcctccctttgacctccttttcccagcacacagtagtcacaaatcttttacgcggggttaggtgcaccctacccccgcccccagcccgctcaaactggattcaacgggtaaagaacaccattctgttctctgaacgcaggcccccagcctttcaaaattcgtactcacctctgccattgggatagagaaggcagatctgaggtgttcttaaacgcgctgtttaaaacccaaaatgtccccgccctcaaaaccacacactttctttttgggggtagaaagatgccatttaaggaaaaaaaggtatatcctccaagtttctttggagggaaaaggcgttggttaaatcattcgggtgtcaggacttttctaccggatttcctccagagggtttcccagttgtggaacaagggtgaccagtggagtgtcgggtatcagggtccatccgccccctagaccagctctggactaggcttcaaacagccctccagcgcggccctgctccgcgctttctctagccagcacccacgtgtctctatttactctactcaggttaccagctctatcgcccgcagcgggccagaagacccgataaagcgccttccaccctgcaggactagtgcccggcttccgctgcttctccgcctttcttctgcgtagatttaaggcctgatccggtcccaaaccccaaataaaagttgtgggtttgtttccaagtgatggcggttggagaaaactagagttgggggcggtacagccagggtgtacccttgcggtgggtcggctcggcgcacccacagctcccagctgctagcccaggcgctggggccgcagggactgaaccccgcaccgcccccgcagcccgggtgcgcgccccatcggccggcctgctccccgcggcccggctcaccggtggtagggacggccccgcctgccccagcccacgcccgcctccccttcctcccgcctgtggctctgctcgtctccacctaagcctttggtggtttaacgcacttttgcagagacatctaccaagagatagcgtgtgcactttgttttccgtcccacggaagaatttatcagtagcgttattcagccctactcgctttaaagcacggcacccctcagcccaacaaaaagaccgaaggcgaaacattgtgggttcctgcccgcgaaccaaccgttcagccaccgaaccccctaaactgatccatttggaataagttaccctgcccctctacctcccatcctacacacacacacacacacacacacacacacacacacacacacactgcggaccgggggcccagctacgcacacaccccaaaacaaacgagggatctactcgggaccctcagccgggcggccgggcgccttcgttcccttcctccctctctgagtttcccagggacccgccacgcctctcggaactggggcagcggcccgctcacctcgtgtccgttgctggccgggatgatttcagactcgttcaccaaggaagacttgatgtcagctaaatcgccttcctcttcgggatgactgatctcggcgaagatcttttccttctgaggatcgccctcgtccttgaaggggatcatctcgtccgtggcgcagagttccgggtcccccccgccgccgccacctcctccggagagttggggcatcccggcggctctgtaatctccgctccgctgtgggagcacccgcgcaacagcaggaaagacagaggggtaactcaagggtgggggaggaaaggagagttggaagggttcgtgcagcaggacagcgggcggaagcggggcgggcgagcgcggggccgccggccggcagccggagcagctgccgcggcgcccgaatcccggcggccgccgcgctttcccgcttcgcggagaccgacgcaggcgcccgcccccgaggccgaagggcactgggcggcgagggctgcggtagctggcgactccgggggcgtctgcgcggcgcgcgctagacgaggctgccccggcggccaccccgcgaccccgcgtcgccgggatttgcgcgcggagaacgccggttctggagggagcacgcctccccaaagtgcagaggagggtccggcggcgcgtctccgcggaaaccctctccactgtagttaccccggatgccgacttagtagtttgttttccgagaaaagagaggggatctgggcagaagggccccgtttgccccaaaagaaggtgcaaggatcagaagataacgaaacgtccacttcctgaagggtgggaaaaaaagaaaaagaaaaaggagccacccacgctggagatgtccgttttagatcttcttattttcttccctttcgcttcggtttttcttctcgaggctcatttaatctgctagagaaggaggaggagcagaagatgggggccgaggaggaggggaaga

SEQ ID NO: 10343 - DNA, 6000 bp, Homo sapiens
ccctggagggtgtgactggcagggtcaggacgggaagaggaggaaggtttgctgacattcttccccgagcgtgtaccaggctgcgtgccctgctgtatcctcgaagttaatctcccaggatccctgggtgtgggggggctgtggttatccccttgcagggaggaggatctgcagttcagaggtgacatgctcagtcggccacactgctgagcaggtgacagggcaggctccagccctgggaggttgcatttcctctgcagacctcacagcccccagggggtcagatcaaaacctgacactctgtccaagcaccctcccaccagcttctcccctgcagcctggcacacggcccctctgtccagcctcctgtctgcattgtctccccctccccatgctggcaccccatttcctaaaacacacttgcacctcctacctccaaacccttgctcatcatgctgtgcctccacgtggggtctgccctcagctgtgggaagttgcccattcctgaagacctcccaggaggcagtaggaaatggtggagatactcaagaaatacttgttatctggttgaatttggggccaggaaacctgggccctgttgggtcttatcaccagctgtgtgacctcaggcaggttaatccacctctctgagtcccatgaaatgtacgagttatcccatgaaatgctggtgctctcaagggaagggtgccctgggcgggacttggggtcttgagtgctggcaggtgaggggttgggggtctgccctcccgtcttgcagttgtgagttttggacccctcctgccggcttggtaagatgcagattctggagcagaaatcctgagctctggagtctttttcatgtgtgtacagtgattctctcgcagcccaaggcctgccctcagagtgtccctgggtgcgatgtcagccatggagtctctgaggtggggtctcctgtggtcccaggctcaggggatagattgcccaacagattggcaggcctggcagggcccaagagggctcccaggaccccctccacttcccaggtggggcaccgaggcccagagagcagggatttgtctgagccagtacaacagctccaggacaagctgggccaacagttcaggactccctgcccaggcctggtcgggggaggtcagggatgtcctcatcggccttgactggccatgttctccacccctcccctgcccccactgctgtctgtatctccccacctgtgtctgagactagcacacagcaggtgtgagcattagcacatgtgccagctgtggacacggctgggagagctcttcccagctggggtatcctgaagacccatcatctggggtggaagccaggcagctgcggcgagggggttctccaagggccaactctggcaagtcaggtccccctgctctggaacctgacttcgcggacgggggcttgcagaagaacacaggacccagggctgacccctccccaggcagaccctggccccccatgccaaagagagaggtgggtatccaggatggatctgggctgggctcagcaggcagggtctggcaggggagggtacacatagggaagcccaggggggcctcccagggatgggaagggggacgggaatggggaatggatggtcacaagcaggaggcctgacacagcccccacacgcctaccgagctgtctgtgcgtgtgtgttggggggacccctgcccagctcctgccaggcgcaggtcccgcttttgcccctcccctccagccatcctggcaacttccaggccctgtgacacggctgagtctgagtggtccctacaccatgaaggcccagcaccaggaagcccaccttggtattctgtcccccactttccactgcccttcctcaagcagcagtgtgaacagtgtggacacctgctgggcctgacggtggagcaagggggaaaggcagggctgcactgggaagaccctgggggcaccacaggaaacaggccggccccaggcccctctccagacattgctggtttgttccactccactgctctggggcctcaatgactttcagtttgtttcggaaataagaaagtgcctgttgttcaacctggctctggccaggcctctggcctaagagtgatggtgtgggggcttgccggcctcacgcccaccctctctccacccaagagccacgcccacaaaatgttcagagccaggaggactagctcaaagctactctcagtcttggactggaagagccccacctctttccaccggaggccctgaatatcagagtggggaagggcagggggcagggatgggaatgcagggaagacagtcccccagaatctaaacttggggtcaacttgggggttctaggctcctttcacctcttcgctactctcagcacaggaattttgagtacatattttccatgtacataaagggttagcttgagaaaaagcaagacccctccttctcatgcaagaaggaagttgtaacccggaggcccagggtgccctccgtccagcattgtggggtgggggagatgggggagggtgtcaggcagggtgagggtctggaagatacccccagcccccaagctcaaggactgactgcggcacccaacattagattacaaaggtttatttagaaaatagtttggttgttttggctgttgtttttggcaaacatttaaatactttcagtaatcaaagattgtcggtgctttctccttgccccctggcagccaccccccgactaggtcctggagaagtcagcccttggtcagacggggatggggagtggtagtgtctttggggggctccttgcttgcccatttagggggctacctctgccactgctctctaaaaccctgacctcacagccacacctcggcagggctcccagagctggatccaggcagggagccccagaagcagccccttgctgaggggggaaggcaaaggggtctccccctctctcctccccactccctggagcccggctatctctctgccaagctcctgccctgccgcaccctcccctgcgccctggaggccaatccatccccgggtctctgggaaagctcccccgtccgggccgccccttctgcccagccccgagcgcggagctgtccaggattcccagacgggtgcgagtcactgcctgaagccccttctcctccgtcggaagaggatgtgcttaaaggatcgccggaaatcctggttgaagaccgtgtagatgaccgggttgagcgagctgttgcagtagccgatccagaagaagaacttgaagagcgggccgggcacctggcaggcctcgcggcagatgccgtacaggctgtagctgaagaagaaggggaaccagcagagcacgaacacgcccatgaccacagccagcacaaaggtgaagcgcttctcgcgcgcctgggccaccttgcggcggcacacgctgctgcgcgcccggcgccggcgcgacaggaagaactcgacggagcgcgagctggcgcgcgacaggcggccaccgggccccggggacctggaggcggtcagcgcccccgactcagccgcccccggccccgccccctgcccgtccgcaccgcccgcgcccccctccgcgcccgctcgccgccgcccgccccgccgcaacgcgccccggcgccgccgcctctcggccgctgcgctgctctcgtccggctccacgtcggcgggcgggggcgcgcagtgcccgttctcgcctgcgcctgccgccgcgcccagcccgttttcggtagtcggggacgcaccgtcggggcccacgggggcgcgcttctcgctgagcgtgcgcgtgcgcagcttggccactcggtagatgcgcgcgtagaccaggcccatgatgaggcagggcgcgaagaaggagccgatgcaggaggacaggatgtaccaggtctcgtcgttgaggccgcactgcgggtaggcggcgccgtcgggctggcggtagagcgagaccagcggcgggaaggagatgacggccgagatgagccacacggccacgatggtggccttgacgcggcgtggtgtgcgcttcaggttgtactcgacggcctgcgtcaccgaccagtagcggtccaggctgatggcacacagatgcacgatcgacgaggtgcaaaacagcacatcgagcgccaggtacacgccgcaccacacctgcccgaagtaccagtaggccatgagctcgttggccaacgagaagggcatgaccagcgtggccaccaggatgtcggccgaggccagcgacaccaggaagaggttctgtggcgcgcgcagcgcccggctggtcagcacggcgatcaccaccagcacgttgcccaccacggtgaagacgatgaggaagcccaccacggcagccagccctgccaccgcgcccgccgagtactggccgcgcggcggcccccaggaagcccccgaggcattggcaaccccgccgctgcccctctcgcccgcgccgctcgcattggggcccgccgctgccgccaccgccagcgccgccgccagcgccggggacgccatggtcctcccgcgagctacgccgtccctcctggagccggggcgcagccgcggcagctcgggcgccccccagccggggtcggcgcccgcatcgccgcctgctgctcgggcgcgcccgccggggaccgcggcgcccagcagccggccctcggccgtggtggctccgcgggcggcgcgccggagagcgtggctgccgggctccccgcagctgccgagcgtgtaagtgcagagcaggaggcgcccggagcgagcggcgacgcggctgcggggggaggggggcaggtcccggggtcctcgcgcggccccgccctcggcccggctcacggggagcgccccggcgtcgagcccacggcgacgcggcgcccgagcgggcgtgcctgagcggccccgcggtcccggagcccagccggggcgcaggcgacaggcggcggcggcccgggcgctccgcctcccatccggccggctagggctcggcgcgccggggcgccggccgccgctcctccgggcccccgcgcccgcgcgctccctccgtctccaactttactttcccgggcggggcgccggcgccgccgcgagtcctccggctgctcccgggcgcgggcgccccccgcggtccacgcttggccgtgcggccgccgcctcgctcgccggagctgcgccgccgccgccgccgccgccctgcgctgggcgcgagtgcggccgcctgcgatcggcttccaacttgggtcgagttgcgcagcggggcgggcgcgcggggcggggcgggccgcgggccctggggagctggccgggaaccggagcccgcggccgcctggtcgaacctgcccgcgcggcgccggggaggagtccggggcggcggcgcggggcgcgcgctcggcgagggcgccccctccagggccgcctgcagcctgcgggacggggccgagcggcggccggcctgggtggtgagttccagaagctgctctttctaagactggagcctccttcgcctcccccggcgcaggcatgggcgcaggcgggggcgcgcacacgcgcgcgcgcagcacgggcggctcggggtccatggcctgatggcagagcaacctctcgcagcctgggggaggacgcgacgctacctgcgtgcgcacaggtcctgccgagctcagggtccggaccagatcctggatcggcgctccccgtcagagccacctccgcacccaccccggcctcagttccctcggcccacttcccagcgctgctggagcatgaatcataactaacggcggtgtctgtggaagccctgggcaagctcccaagctctgcacccatgttagcagtgattgaagtttaatccttaggctctcaggccctgcttttaaaggatggagaggtgttcaaagtcaccacctctgacaaacacccagaacggagctgcctggatgatggagctttttgcaagggtgggctcaggggagagcggccgttg

SEQ ID NO: 10344 - DNA, 6000 bp, Homo sapiens
tctaaatgagtgcaacattttggcaagtttatggtggttgaaacatgatttggttttccaacttctccccacttggcttcatttcaatctgcggagtatatcaagtgagaatgcttctgcgccttcatactgccccacagagggagtggccacactaagcaagcctatattcaattactttccccactttatacctttcttacacttttcccatatgacactttcataaccatatttagctttcttcctaccatctccctgtaattcaaaacgcaatttagattcccatatggttgccatcgaagctaacagatgtctagcaaattaaaacaaaaattatgacttataaactgctgatgtatcatcattccagaacatcttgcaatttatagtgaatcataagataaagcttcctacttgatgccccccctcccccaccgccccaaggtttcctgagtctccctcctctctgaattaagccctgtggaagcaaattagaggcaagatcctgccatcaaccctggataaacttgcacttaaagacacaaggtaatatctgaaagcatatcaaaagagaaagttggcctcaagtaactgaggcttttctaatcctttgtagcaaagaaaacagaaaaatgacttggttctcccaaatcattccaccgtttccattgagttctttcctaacaagtcactataaaatctattgaatccatttgcctcatcttcttggcagatcttaagggtattatcattacctagtagtaatgatgccaaagtactagactaaggcattctagaagttctatagccctgtatggaaccagtataaaatctggagacaacaacagtaatgatattcactatttgttaaatattgagatattatgccgaataaaacattatctcactgaatctttaaaactacaacaccattaatgttatctttcctttataaacaagaaattaaggctcagtgccttaatacagtagactatatttttcaaagatggccacaacctacatgactttctgcaatgtgaccttgacacttctccatcaaaaggtggcttctaattcttcaccctttgaaattcagcagtctgcatgagtgctctaaccaatggaatagataaaagtggcactgccagttctaagtggaaccttaactggctggaagcttctttaagacttagagacaggaagaagccacgtgtaggtaggtgctccagtgacaactctggctaagctcccagcaagcatcagcttccagtcatatgagtataccatctcaggcatcctgcccagagggccttccggtaagtccaactccaactacatctcaccacaactgtatgagaccccaagtgagaactgtccagatgagcctggccaaatcacagaactgtgaactataataataaacaactgtgttttaaacaactaagcttggaggttatgtagcaataaataaccagaatattgagatcaatttacttgcctgggaacagttaagtatccagaatccaaaacagttaaaagccagaatccaaaagggcaaaacatctattaatgatgagtgatgggatgtggtgttcggtaccccaaagaaatgactttaaaacaaaatcctctttcttctccctcccccaaacccaaagcagtctcagggttttctgagaaatgtcccagtacggtgacaccctcaataaaatcaattcccttctgtcttgaattgttccaatatataacagaggaaacaagttttcccccaccagcctgtgataactaatgagaaaggaatctgtacaagatgttgactttgttactcagaatgtcattacaactgttatataaaaggattcagattttatacatgaagctgtaattctaataataaaaatatatttaatgactcacaggactacatttgagattcacagtggggagagagaagcacggacactataccaggaactgaacaagccaagaagaaattagtgaaaggttttttgttttgctttgttttgttttttttgagacggagtcttgctctgttgccaggctggagtacagtggtgtgatcttgcctcactgcaatctccacctcccgggttcaagtgattcccctgcctcagcctcccgagtagctgggactacaggcacccgccaacacacctggctagttttttgtatttcagtagggacagagtttcaccatgttggccaggatggtcttgatttcctgaacttgtgatccgtccacctcagcctcccaaagtgctgggatcgcaggcgtgagccaccgcgcccagccttggtttttttttgtttttgttttttgttttttgtttgtttgttttttatgaaaggatctttgaggaagaaatgaaagtaataaaactagtcttcagacaagtctccctaacagaaaatgtctataatttatcacgtgtcctggtatatactacttctgttataaattagtggccaaactcttctatttttcttctccagcatattggaactcaagaaactcattctgtgtaagaactagaaagaacgttataactcatccacctccttcaatttaacagctgagaaactgaggcccaggcagttaactgatgaagagccaaactgctgatcaggaaaagaaccaagctctcagtgctggtgccaccatatgttcaattttattttaccagaactatacctttgaatgtcaccagtgtatgtcaaatgtagtctagcagttcagtgtgaaaatgaaaattaggaaaccatgctgttggcaatctcttcttcataattgtatgggagtagcaccgagtctgctgtttttggcaatcacagacaggttggtgactctgtagagagcagaggtgtgtaacttttcagaagcaagctgccaagctactgaccccagcttttcagtcactaacatcttagtctgaattactttaaccaaaaccatatggttgcctttctgttgatcatcactagagaccatggtacaataaagcaggaaatttaaatatggggtaattttgaggcagagagcaggataggaaaggtatgagggagtatctgagaggaaggctttgggcacagagaggagaggaagggaaggcaagaggcagggtaagtgaagggccctcataaggaaggcactcacttaacaattctgcctggggcagctagtttagtcccatagcctaggtctcctttcaggcttcccatactcacccacccacctatgaagaccttcacaatcagaaaacatgcggctctgttctggacctctccaagcaagcactctgcaattctttgaagctctctacaattccaggggttttgctgcaacctaatccatagaaagggctaaatttgtctctatgcactccacagaattacagcaaactgtcagggaaacagacccaaatccttttatttccttaccaccccctgctaggaaacggcagagaaagtccctgggtgctttttgttgctgggtagctaaaatgtgcaacttttagaaatgttcaagtagaaacaagaggcctgaactcactaccccaaaaagaaccagtcccagttcggtagtccgtgcctctccaagtcacaaagtttcaagttccaatcaaatcagaatatcttactcaaaaccgtggctacccaccacttttaaacattttcacaaatggagaaggggcaaagaaagaaaataattccttcttcctgtacttgtagcagtgtttaattgcagggaggtgggtgactgctcccgggaatcatgcacaacactggcaaaaaactgcctgtggaatgatcggatatgacatccattcatgtgtcccctcattatctttattagtcctgaagacagatgacatgctgacacggaaagtggtctccaatcccttgcatttcccctcacaaaacatacatgaccaatgcaaggtattataatagaaaacagaaaataaaataacctggtaagagtgcggtacaaaaaaagaatatgaagagccgtattgacaactattctcacagatgtatatacgtacagcaaacagcccaaattaaaggagaattcaaataaatacattccgtgttcagactgctgtggataattattgatcctgcagttggagcattgtttacctcacactgaacagcaacttagagaaccccctacccagacagccaccatctttactttctatggaaatgcgggtgcccactgaggaagaggatgagatgggatgagaaggggaagaaaaataacatggtctttgaaccaacgttttccccttgtcctggagaactctttgtctggctgctgaacacgtttgccagatcaaggaaaagaatcaaaacaaacaaacaaacaaaaagagtaggcgtcccagcctaattacaataggttcccaacacattgcagtcccaagcagagcatcatttgaatcttgtgttaaagcatttgctctctcggttccccaataaaacatgcctcgcacaccttctcctttgcatttctacaaaggttcccccaaacggcccgctctgtgtcactcctttaaaaatgaggacgtggggcaggaacacactgaaatatatgttgacggtgacttattatcctgacgatgatatatacatacaaataaatccctctaccccgcacccccactgaccagtccattacgcacagggagcgctttccagctgaagaggagagcgtgcaggaaacgttatttacgtgcaattacaggaccatataccacggcatctgcatcctacacaaagcccgagatggtgcaagaagatacacgctgagcatggcacagaccagccgcggcaacacggagccaagccctcgtccaatcagatcgttgttagaaggtggacctcagggtcggccgtgcccgattagccttccctattatgacaccacgctctgcccaacatctatatcccaccgagagcaaatccaattcgtgtggttgctcatttctcaaactgccgaaccctttcttttatctgcatccctgctattcgttcctcaaaaagccaccagaaggcctcggtgccccctttccgcctcgatttctcttttcacctcttcccattcctcgaaaggattaaatgtttatctctccaacgcgcaagctggaaaggcggaaggcgaatgcctctatgctgctccggcaagcgcctgcggggctgcgaaaagtaaaggcaacgaacaacgtgggggaaatcgtcgcgaatcgatcggccacaatagttggaatcccaggagcgctccaacttacccaaaatatgacattgaagccaaatatgaagtatttgatgcaacaactgacttcaggacccttgtagtgcttcccggacatcctctgggttcatgaagacacttgccccggcagcccgagtttggagctccgaagcaccgttgctcggagcagcccggcggggagcaggagctcagggacaccgcacggggccgcggcgctggcggcctgggctcagccgcgcggggaccgaccggcggagagcggctcccgcacctccagcccctcgcgcgccgaggccgccggagccggggtggccgcgagaaagcagggaagccgcgcgctgcaagctcaagcctcgccgacgctagccccgaacacaaagcgagcgcccgcgtccgtgcgccaggcggtcggtccgtcggttcgtccccgggcttcgggcaaaggcggccgcggcagatgctggtggagacgccgctcgcttgctcgcccgcccgttcgcgcgcgccctcccacccctcgctccgcccgcctctcgctccgcccgcccggccggctgctcctccgcccgcgccgcccgcagctccgcccgccgcccaagccttggctaggcgcgcgcgcgcacggggtcgggcgctcccgggcggcggtggcaccacgtagccgcctccttccaccgctcgctttatccccgcccctt

SEQ ID NO: 10345 - DNA, 6000 bp, Homo sapiens
tcttcatgaggtcttagggaggggaggatggggatgggggaggggcaagcaggtggtaacagggctgatgcctgacctcacatagaccactggatggaaaacttttccacagaagtgataaatacaacaattcttaggaattcgccaaacatttccgaaatgttcagacctatgtgggagacataaatggatgtaccttagtttctttgaaaaatatttaatatgtgccttccataaaattagcaccaggaaagatggaggaaatactcaacaaacaggaaacatgaaccctgccttcaaagggcacatggtcagtggctggaagccttgtttggtttagaggacactttaggaaacatgaaagcttctgattatcaacctagaaaaaaatgtagatgtatgcaaaagttctgcattaatttcaggaagtctataaaccccagacttctcagacttggtgatgtgatatttttaatcattattatgtgtggggggagaagggggatgggacactgaaaacagcaaaggaaacaaaaaccaatcctaaggtgtatagcctgggaaactgagagaacagtgaccacttaagacactacactttcactaagtgatagctccatccctaatagtataaacagagcttccatttgaagtacaatctcatgttcaagggcagaatttttcaggttacaactgatcatcactgagataaaatggctttggtaaggtggaacttgactgccagggtaatcagttcagccactaatcctcatttaagctatattcctttcaaacctgttagcttgcctatcacataaaacctcttggcctactagttcctgaattagtcctattatatacaccctgaacctaagtggcattaatgacttgactaaagttgcatttgcatatccagagagtcattagtttacacacagcttctcaccagtactgaatgttttaatgcaggggtccccaaccctgggtcatggagcataaaccctattgtgaactgcatgcaagggatccgggttgcacactccttatgagaatctaatacctaatgatctgaggcggaacagtttcatccccaaaccatcccccacccaacccaactcccccagtctgtggaataattgtctttgacaaaaccagtccctggtgctaaaaaggtgggggactgctgttttaatggatctgtcaacatttcctttaaaaacctttattttcagaggcttatgggtcaactgtagacagtcactcagggctaaaacctgggataaatggtgttagtctgggacataatttatttaattaaaggaactttctgtgctttgcaagtccaagcagataatcttaataaatgctgaccttaaaatatccagagggcaaagactaaaaaaaaaaaagcttcccataatcataaaatacaatacaagaaggtatacattttgctttgagaactttccataatgaaacaaataatctatcatcctaggcctcctgacaccttcactaccatatccaatagccaaatcctgatgcctttgcatctttaggagctcttgaatcaatttatttttttctatctctaccaccgccctgccaatctaagcaaggattatgtcccacctgaataatgatgacccccaccaggactcctgctacctgttctatagacaaatacatactttctgtaggcagccagagtgatcttttcaaaacacaaatccactcttccctacttaaaatctttcaacggcttctcaccgcacttaagatctcctccttagcatggactacgagacccatgctttcctgtgtggcatcattctacttgtcattctccacgttccaacaatatttatctcctagtttctcactatttcactcatgctacctcctgcctcaggacctttgcccaaatgctccttctcaagaatgctgccacccacttccagattaactacttttcttgaaatgttcagatttcgcctcaaaagtcagagtaggcagctaggcagacatgagcagggcaggaaaggccccccaccaccaggaatgtcaggcggccatcaggtgatggtcaggccgttgttaaactgtctctctgaaataataattggtcgcgccaacaccatggaaaggcagtctcccattagatagaaaacacctaaagctggttatcagcaggttcccactaagatctcaggagttgggcaagtgggctccagcatgtgcactaataggcaaaatggcagcttttaactagtatatgcccttcctctaggaaggctcaaattgtaagggaaaaatgcctcaagtgagcatgagtaaaacttcagtaaacacactgcaggcagcccctccccgctgctggcaggccactgcgcatgcagacagcccaccccaagggaagaatcacgggagaagaaacgcaaaccctggaatcatgccaatgtataaaaccccaagtccagggtcagacgaggtacttggatttctcaagtagcccacatggccttcttcaaagtgtacttccttccgttcctgctctaaagctttttaatactctcactcctgctcaaaaatttgcctcggtctctcactctgccttatgcccctccaataaattctttcccacaggaggtaagaatcgagttgcttcagacctgtgtggatttgctactgctaatagtcatttcttcaagtaaggcttttatgaccaaattcctccattttcttgccccctatggttttcactatgaaagcagtagcacaatttttatttatatatttatcgaggtttgattgctgtgtggtttttacaagatccatgagattaaggacaaggagtatttccttaacaactagtaccatgcctggtatataattggcactcaaaaatgttcaaataaatcaatatttaaaatcacacaacagaatatgatcggaaatgtaaggtcatttttcacatcattcacttcagagaaagggcaagaggcccagagatgggaaggaaataagaaacatgtttcttttgtcttgactccacaggtggacagacctaaaacaaggaaatagtgcagatgagaaaggaccatcccaagttgtcaaggctgtaacagaatttagtgtatgacatattcatagttcaagacaaaaagtggcacagggtgaatggagccacaggtacaagcttgctggagtagaggcagaacccatacctggtaaactggatcgttcaggctatttaaagggatccaaaaaagtccatgtgtagatcagcattaaagagaagcagagatctcaccatgggtggaatatatgcaatagtcatcgaagtaaaagaaccacaagggggaggagaaactcaggagtcagaatcctccctacaggatttgtccttctagcactgtaccttaaaagctcctaggttagtctttattaaaggaaggcaataatcccttatttatgctcttattatttataagctacactttaaattgcttgtattactatttacctgggaagccaataaaagggtctttcttgctcttctgatacctaagcattcctcttaatgttaattatgttaagtctttaaaatctaccttttgtttttgacaaatgacagaaattacactggatccactgagaaactttatcaagtacactgaaacaaacaaaaaatcaagatatcatcaccttctttatcatcaccatatagtactgaaatgggcattatggcccatcctttgtttgcactaataaaatattccacgagttggcaagtgatgctgatgttccgccacctctttaaaagatcatcagaagggcgggacattctgaacctagctagttttgtcagtttttcgtcagtttctctaccagaaaatagggggttaaacatttctagctacatgtaaaaagccatttgatgacttaaaacaaatatcctcaattgcaatattcagttatcctttgtcaataagtcatattgagagcaaaattataaaaagatcaccatcactccatgagctgagaagcttaaaaccgcaaatgtactgaaaaggaaaactgatactttttattaccatcaatttagatgacttagatgggaatctatcccagatattacaaagggattccactgctgtagagacttcaaatactaaaacttccagattacatctaatctcatgatataggcgaagagctgataatgggatctcctcctaggattcttactcttgaaaggacgccacaagcctttttgcccaacttcttgatgctaactttccagaaggaaagttaaataaacatgacatagaagcgatgctcatcacacttgcaaaaagcactttacaacagagagagcgactcgactcctcctgcagccccgccgcctcggcggtcgtgagcccctcataccctctcctacccccactggcagccggcccagttggctgtcccagcggggaggaggaagcaggtggtgcaacggttcatccggggggaagcaggtcagggtcgggggcgaggccggtgcgcgccgcccgctgccgggtcagggaagccgcagtgcccgcggtcccttccccgcgcggcgcggctccgggtaactaatgttccgaggcgcctgactaaaccctccaaatccaaggaatgtcagcgctaacactcgcgccctgggcggcagacaaatgcgtcccagcggagccgccgcgagctccgcgccgccgctcccctcggcgtcggcctgagctagccggcagccggcgcggggcggccgggcgccgacacaagttagttttccggcccaagcagccctgccgcagccaaggaagaggaactgctcctcttcccccggatagcgcccgagcactgccacagcaggggcttccccaggcgctgagggctgggggcggcgggcaggcggggcggggacgcccctccgccatctccggccaaccgcccctccctcgcccagggacgcgagggggaccggcggtccgggcgaggcctcggccgcgcatcgcaccccggctccccgccgccggagttgagggggaggcgcgctctccgtaagagccggaggcggggcgccatcgccctcccactccccggcgggcgggccgggggagcccggggctgcgaacacccccagacgggcggctgcgggaggggaggctggaccaaggggcctggtccaccggaccagcggtggcggcatcggcatctcgcctccttcaggcctgcacgcgccacaggccgcagcctggaccaaccccgcgtccccgggccgtgagcgctgcggtcccggccccccagagcgggacgccgggcggccgcagccccccggacccggctctccgcccgctccgcccgcagtcccggcgcggagagcggccgcccgagccgctgccgcggcagcgcgggtgtcggcgacggagcccggggcggggaagagcggaggaaggggcggcgagggggcgggccggcggcggccagggaggtcggagtgcgcggggctcggcaccccctcggcccgcgctgcgccagcaccacctgcggagctgcggtgcccacgccgtgccgcgaccccgccgcccctgctccctccacacgcgggcaaacaaaacaagttgccggtcgctgccgccggagggggccgggcgggtcactcaccctcatcctgctcagcgggcttgggtcgtccggccgcggggtcagggaagaccagaggaccactagccccaggaagcttcccaccaccagcaaactgcgtaagatgaacccaatcttcagcctcatcttcctccggcggcgagagactcacagcccggcgcagccgccgccaccgctctcccctccctccttccccctcctccggctctcctccccctctttcccccacccctaccgctacggctgccgccctctccgctgcctgccctttccagctccagatccggaactcccctcggctacaccttt

SEQ ID NO: 10346 - DNA, 6000 bp, Homo sapiens
atgcagtcttccctgatttccccatcagcattatcgggggagggtgacacttgccccctcatatcctagctgttcatgtccatctgctgtctcccactagactactctaagatccacttctaaactcaggagatgcaaaggaagctgagaccccttccctgctattagggtctgaactgtgtccccccaccaaaatccatacgttgaagtccttagcacttcaaaatgtgactgtatttggaagcagggcctttaaagaggtaactaagttaaaatgaggtggttagaataagccctgatccaatatgactggtgcccttacaagaaatggagatgaggacacagacacacacagagggaagaccatgtggagacatgggagaaggtggcatctgcgagcccaggagagaggccgcagaaggaatcaacctggacaataccttgatctctgacttccagcttccaggactgcaagaaaatacatttctgttgcttcagccacatagtctgtggcactttgccctggcagccctagaaagagaattcacctgccctccaggaactcgacacctggcagatgtcatgatggaattctcacgcaaacttggggagaggccatgggtagtatagtagaagctgccacataccattagttcttgacctcttaactcagagaaacaagtttcagaagctcttctgatgtgtagctctagctctctgggtataaaatatacacaaatatcgggttcatcaagattgcagaacagagagtgtgggtagtctgctcagaatcacctctgcattcaactgccttggataccactaaccatgtaggcgcagcacagagcagatttggaaaatgggcagagggaggggagggagagggaagggggaggggaggggaagggagggcaggggagggaggtgctgatcttctcggggaacaatgacagaggtgaacaaactggaccaggctgcaggaagctcacgttcaagtcaaatgatacattcagcttcaaagttgaggatcaagtgccttgtgggaaggagcccaggtgagctgtgcttaaaataagcacaataagcccacgatttcccagaaacattaagaacaggacggggcacagcacattccccataggaataacatgaaaccgcaaccccagaggctgagagccacactctgtaatatttatccaccttcaaatagcaccgctgcctccaagggcagctccggagatgcaaaacccagagctgtgtgtgcacagcccactctagatccataaaaacgcaatacctcttggtttcaatgaaacattaatttcacacataacaatttgtttctacagctaaacgtcagacagggaggcggtgtttgaacttccaagcaagtccccttctctatctccatgggagcaggcagaaccaagccgttggaaggaaaacccacataatgttaaacggagctgtagcaatgagggcttaaatcctgggactgcttcttgtgggatgctctcaaaagccatgttttaaagtccatctccctcatcaaatgctccttttaattttgaagaacacctgatatggtaaagtaaacacgctctctgttcatgttgaccacatctgcagagggcggcaagcaagttgaggaaagaaaacgttaagaagactgctcagcaaaccagccgtgtgagtttctgtctggttgtagctttcaaagatggtgctttcaagcagacgtgaaacccactgccaaatcctggctgaaatctttagtcctgtggttgcaagatgagactagagggagcagagtacatttctaagacacggcgtgtgctgagaaaacaatactacgcatgcaacaagcactaaggcaatgattttttcttttaaagcagttttacttagttagctcaagataacagccttcttgcctcttctgagttttctcaggcaaggtcaaactcctgcagcctcgcctgctccctgaggttcaggatgatcaggtcttccctgactgcccagtccagagaatgggtgtgtgagagaggcaggagtggaaggtgttgaagcccaatgcctggtccagcatctgaccccacggacacccacacccactactcacaatgagggtgtcctggcttctactccccgagtgtttgctaagtgtcaggctatgcccggtgtgccacacctcacccctgcccctcgcctcatgctgaccagaggacatccatcccttaaagctcctctctggttccttggacttgctgtcctcactaaagagaagccaacattggcccccacccacaatcctccccccacaacacacacacacacacacacacacacctgccagcagtgaggacgcaagcccacccagtcacagaggagtcacccaacccagctgccgccctcaaggagcaaagccacatgggctcctctgacagccccccacccccagtgccccatccctgctggcccaagctccctcctcaactctctcccaggaagctgccctgcacccagactgtgaggtcaggacaggggcaggctggatgtcagcctatcccctcacatggggctcctctaccccctccccaggaagctaaatgacaaaggggcaggagcaagcttcaggatcaaccacctcggcagatggggtaggggattagagctttctggccctgcgggatttgctttttgtatttatgtggtcctttgagctctcagtttctgggttgcctttccacctgagttagagcttatggtagagcacacaccgtttgttcacaagtacctggcatctgacccctctctcaaggtgcagatggagagaactcttctagggctcttctagggaggtggcacctgccacctctgcaagtcaccccagccggcaccctgactgccccctgctggcccactgcacccagggagccagctctcccctccaagggctgctagtcaggctggagatgccaggaatgacccaagaccagacacttggcacctgtaccctgatagatgctggctggttggggagctgggctctaggccgactaaattcattcagtgctgcccctacccctgccccaacatattcatctgcccacctcatccctcctccagcacaaatcacagctggctgggagtagcccagcaaagctggacagaggagatgggcacaagtgaccacccagattatgccctttcctggctccagaggccagtgctccccacccatgccactgccagtgcatataggaaccctggccctttgggaagcgagaagaggtctcctaggggaccccaggagacagcaaggcacagaaatgaggggaggcttccatctcccctccccatacaaatgtaccctcctctggggattcatggctgccacctccctatcccaatccttctctggaacctgcaaaactagagccccaccaggggctgccccagggtgacttcagagtggcccttggcccttttgtgggggtggggggaagtggggagtgaggttgaggcagcccccaggggaataatctaaagggaccctctgcctcctgcatgcaccaccaaaggccagaggaggcaggatttgggaagggtgggagccccaggctgtgggtggaggaacaggaggtccccaacagaggtggcaaacttccagctggagcaaagccagagtagccgggaaggtggggggagggcagggagtttgctgtgccagcgccacacaggtctccagcacagtgtgggtatgaacccaagggggtacgcgggtcccagtgcatccaggcggggcgaccggcagcaagagctcaagacagccgcgggtcgcactagagtaccccggggagaggggtaacccagaaatcccagagtcccagaacaggattcgagctgaccggggaagtcccggagcctgcggaggcgccaccgcggagtccctggtagaccagggagggaaggatcccggagcccaaaatcccagaacgcgacgctcagctggtggagtctgggggcaggggaggtaacgccgagctggggtaccctcaaggacctgcaggcttccgaaggttctggggtcctcctccgtaacccaagacctggaggccagtgggggagtatcggaggtggcccaggatcccgaaatctgcgggaatgtcccctgcggtgagacaagcgtacgaatctgaggacctctccccaagtaaccagtgaccagaggccagtaggggcgcggccgaggtgacccaagtgcccaagtcgccaagaacccgcccctgatgaccatagtggggatctggggtgggggccgtggcggtcccgcccgggtgtcccgcggtgtcccgggtaggggccgcggcgagcgcgtggaggtcacttacgctgctgttctcgcccgtccagtgcaccatcgcctggttgtgcgtcgcgtcccccttgagcacgaacgacgtgctgatgagcgagacctgcgcccgcgaagccactccggccagcggcgccgcccgctcccagcgccggtagcccgcggcgggggcgccgtcctcgccgggaccaggagcgggaccgggactcggacccggggcgcctggctccgtgccgcgcgcctgccggtcctcgccgccaccgggctccgcgcgccccgcgggagggctccgcggcacccgggtcagttgggcgtgaggacccaggcgcccgggctcaggggagcgccccgccgccccgcaggcgcccagcagcagcagcagcagcaggagcggccgcgagcgcggcgagcgcggcggcggcggagccccggggctcggggctcgggcggtggggccggggcccttcgaggcgcgcgagggcccccggtgcgccatggtcgccaggggcggcagcggagccggcggcggggcggcgcggacgaggggaccgcggccgggagagcaggagggcgctggggagcgcgagcgagagcgcagagaaaggagccggcgaggggagggagcggcgggaggaggggactcggcggccccggcgccacccgcgacgccgagcgcgcaccgccacctgccggccggcccgccgcccaggcgctcgtgggaagcccggcgtacccgagcgcggccccacctccaggccaggatccccttcccagctcggtggttcctccggtcctccttcccggctctcccacctcttcccgtcctccctccctctctccaggtccagccacggttctgcggctctgggctcccgctgggaacagccaggtccctgtccgggagctgacagcctgagggagacagaccaacccaggaggacacatatataggcaaaagaactctgagctagaaccagggctcccggcgcagattataaagggttctcctcaaggggcctctgaagaggtggcagtggagagggggtgaagcccgtgaaggtccctggggaggcctgctaggcggccggagcggggtgggggggtgcagtgcagaggcccctaaggtgtcctcagcagaactgccccaaggactgccaggcctctggctcagacatcgggacgtgcagtggcttcatctcccaacccaggggccacgagggagctaccctgaacaggacaagctcctgtgtggggaggcgtggggagggggcagggggtgaggtcctagggacctggcaggcgcagtgaggaatgtggaaactgaggctcggagcacagcaagtccccacccaaggtctcgtggccactttagttcagtagcgataaaaatgacttcacagagcagccaccctgagtgtcagacgggcctccaggaacaagcacggcaggcgcttcccgaggcaaggccagggtcagagcctctgccaggccagggccaccctgcccatggccttcccccagaggccccgcgccagataggagcccttgggccggggtcccagtcataccccacctcccagctgggtcccttggctccagagagagcctactggggcaga

SEQ ID NO: 10347 - DNA, 6000 bp, Homo sapiens
acatgaaatatagttgcatatatggacaccgacttgggaggacaggtcctgaatgtcctttctccagtgtaacatgttttactcacaaataaaattctttcagcaagttccttgtctaaatctgggaagcagttttatattttaatttctttgttcccatgtttgtctcgtgctgaaaagagacctcctaatgttcatgtcttgataaaatgtcacctgcagccacgcgtgcggcaggacgtgccacccagcactcctggtgtccctctccacgggaactcagggtgtccagggaactgctggcctgtccttgtccccatggtcccagtctcactgtcactgtgtgctcatgtttgatggggagggctctgtgctggggacatcctgccagggtgcggggcacactgccagataccacctggccagggctgaccccagccttggaggagcctgcctgagtgagtccccaggctgccactgtgcagagggggaaactgagggtctcaaagagccttggacccttccggtcagtggagccattcattcagctccagctgcctttcctggtgtgggtagaagcacggctatatatggcgaaaggcacttggtataaaacaaacaggtgctttatttcatcatcagaaacctggtgcatagtttaaaaaacaaacagaagccctgacagccttggagtgctgcagctcggagtcactgaaggagtaagtaagtctggaggagctgcctgagcttcctgcttaggggccggcccccacccacagggtctccctggactggcggggggtgggggtcaggcagtgggcaggggcctgacctaggctcccactctgcctggtgcccacagcctgggcacagtggctcagctactcagccttgagcgtctgtgccgggtaactcagcttctgcaggaggaagaaggggagcaaaaagagcccggaccacgtggtgaagcaggcctgggccccggccagccagtacactgcggagagacggtggcgtcacccagtccccgagggggctggcacttgggaggcgagggcaggtgcttggcccccagcctgccccagcaccatcccgcgccctcacctgaagcggccaccaggggccccgcggccctggccagagcacctaggctgcgcagtgtacccatgaccgtgcccttctgccctggtgagcctgtgggaagaggcacagtcaggcaccactgcccttctcccgctcaggtggcttcggccgagggaagggggctcaccatagccagcgaccacggaggacaggcagggcaccacaacggcggcggctggtgggagacatcgaggaggtgcccgtcagcccaggggagggtgcatcacccagcccctgctgcccatcggatcccctgccagggcagggccactcaccaaaggagtagagcagcagccccaggcccagcacgggcagagaacgtccccagccgatgaggaggaaggcgggcaccagcagcaggagggcctgcaggtgggcacggcagcctcagcacagcccgtgccctgcaggactcaggggactgcctgccacccgctttggagggagccccctacccgcttcacggcagcaacttccccgccagggtggatccgccgggcataggcaccctggatggtggccatggtgaggccgatgaggaaaaacatcttcccctgctgtaggctgggagcgggtgtgttagtgcagggcacccggggcagggccacccagggcagggccagggcgagagtggctgccaaggcttcctggggatgggggttgcttccctgaagcaggggcgttatttcagggagacagcaggccgtcgccagatggggacccacctactgaactggaagcgctggtgtgtgaggaagctcagcgtgtactccaggcccgagaacaggaagaggtagaggaagtagactaggcccaggcggcgcaggctgctgagccctggggagaggtggcgcgtgctgagaaggcgaccacagcagggaagggcgccgcccggggaagcccaggggagagcaggctccacgcttgggttggtcgagtccttactgtctccagagggtgggtcctggccacgagcgacagccgagaagcgcagcagggccagggggctgagcagatcagccgcatcacggaaccccagggcgatagagggcgcctgtggggatggcattggagagcctgcaggagcggctgctggcctggcaacccacggactgtggcctcaagggtcccaacaccaagagagcggcccagcctccctggcatctggggctggcacacaggggcactttacatcgctatggaatcaagcctccagcccctaggcctgtgggtcccagaccacagccctacccgtttctccaggggcagcgtctctggcaggaagcagaagatgaacagcaggtcggaggctgcgaagagcagggcaaaccagggtgccatttccaggggcagggaggctccgagcatagggcccagggtgaagcccagtgagaaggccaccccaatgaccgcctagggaaaagaccacccgagctgcacagggagacccaggcccagaagtcaccaccaggaccccaaaggcccagcctgtgcacttaccatgccttgactgcgggccagaggcgagcccaggtcagcaacgatggccgtggagaggctgacgttccctttgctgatgcccccaatcagcctggaggccaggaaggccgcaaagctccgagaggtggcccagactgcatatgaggtggccacacccatctgcccaggggcaggggccaagaggcaggggcggtcgcttaaggccaggagtggctcagagtagggcttggcaacccagacaacacccctcaaccctgccctatttcgaagcatctgagggccacttgcgttctcagtgccttcctaggggccaggagcagctccttgaaagcctggctctggaacaggagccactggtcccccgagaaccccctccaggatgcgatgagggccaaccagtggccatgaggggcccacagccacctccctctccccacctaaccccatggggctactggctgggtgggaggaggcttccccatgggcacccaggcccaggaacataccaggcacagcagcatcaccgggcgcctccccaagcagtcagaggtggccccagtgagtggcgcacacagaaactgcaggacagagaatgccgagccaatgagacctgagagacagatgtcaccatcatggggctgcctggcaccatgagctgtggtcttggggccctcaaggccaatgtccagccccgtcctgagggtccagtcatgctgggccctacactcacaggccatggcccttgagccgagggggccccaatggagagatgaggaaggatctgaacgtgacacgcggaggcaagggatcatgcccagaagccaggacatgtgggcaagggcaccagacatgccagcccagggagtgggaaggcaaggaccgagaattggggaggggcctgggctggaccacgtccaccaaacataggaccgtagagagcccgccaagggcacagagccagccatacctccgaacaggacactgttgtacctcttctccactggcatcccgatggcggtggcaaaccagtccaccccgccctgccaggagccatagagggggtcctaggggatgaggaatcacgataagggctggggaggtctgatgggcctggggggcagggggcactgtgggccgcagggcaaggactcacgtgggcacggccgtggctctccaacagcccgggcagcaggggcagcagcagcgtgaaggccaggaggtccagcaggaggccgagaaagacaacggtgaccacgcggcgctccggcggctgctggtggatgggtgggcgcggggtgcagcctccaccccctccccatcccatggtgggctgctctgacctggcctgggtggggtgcggcgggtcgggttagcggggaagccgagtcctccggggcctggcatacccccacacccgacagccggcgagcaccctaaaggggctgatggcaggggctctggcctacggacgcaggggccgttctggcctgcgcgatgcccccgccccgaacccaggcagcaggaaacgcaggcttcggggattgcacaaaaaatagccgcaaaggcaacggtcctgagagaccagggtgagcacatcgcggacctggccccaccccaccccacggccgcgcctcccacgccctcgtaacagcgagagaaaacttgaagccgcggggaacccggatcccgatcccgatcccgatcccgatcccaaccccaaccccagccccggcccgcgccccgcgattccggcccctggcccggactcggtctccctggcgggggccatggggtgcacaccggacgcaggagcacccccaaccccgcgcgcctcccactccgccatcccgcgtgcgtcccggtcccgcccccaccccgcgcgcccccggtcccgccccccaccctgcgcgtccccggtcccgtcccccaccctgcgcgccctctaacccccacgccgcgcgcctcccaccgcccccaccccgcgcgcccctggtccagccccacaccccgcgcgccccctactcccctaccctgcgcacctctcacccgccccacccccgcgtaccccgggtcccgtctcctcccccaccccgcgcgtcccctgtcccacccccaacccgagcgccccctacgccccccaccccgggcgcccccggtcccgccccgcacctgccgcggctgcgcgctcgggacggacggtcgcacagacgcggaacagggcaccaggcacgccgccaggggcgggacggccacgcccggccacgccacgccccggaagtgacgtacatctctgcacgttctcttccggccggagtcagtggcggggttctcgccggtcctgcgggtcgctgcttggctgtgggttagcagcaccctgagcggagcggaagagctgcccgccgccgcgtaaccccgaggccgagactcctggcctggcctccttgggcccacgacgcctgccccgcggagcggacccatgggcctgaggtttgtgtgcggggcctcaggcgagcgctggcgcagcctgtcccccatcgtctgcgccctgcgggcctggccctccccgtggaaggaccgcgggcttcggggccccacgctggggggctgactcctgccacacacacagcggtggccgcgggcctggggcggcagcacagccattctgctcgggctgcgtgagctgaccccgctctctgtgcacctacttttgctgcgtttggtgctgagcctgaagtcccaggacaggcggctgagggggaaagatggtgtgaattgggtgggcagagacaactgaaagccacaggacccggttggcacctttttggccgcctgcgcctttgcctgcagccccgctccctgggtcacccgaaggaggagctggcgctctttccgggcgcagaagcacccgacccacgctggaggaaacggtccctctgggcaggagaagctttgggcctggctggagcacactcacggaaccacgccaacgcctggcctgtagccagctcccacctcccctcccaccttctaaaatgcttgcggatctcacgtggccgaccctaaccagatacacatggggaaaggaatcaggtggcacacataccgcctttactccatagagaacttccaattgtgggtaagaacaaagccccacctcttcctaatagatgcagttttccacctgcagccaaaaagacaacctgttattagcttttttcccagaggacaggcatctctatgaaactgccattgcaaaatttgccgacagtgagataaccagctccattttgcttctaacctccatgccctccttgtttactgctgcacgcaggttgaactgtgggaggaacttagttt

SEQ ID NO: 10348 - DNA, 6000 bp, Homo sapiens
cctaaagacacgggattcatagaaagggaatgttcggattaagataaagattgtggagaccaaagttcttttgaagtcttaatagtggcggcccttaaagacaatagatgaaaatgtttcctattcagatcttagttaatcgctttaggattgggaggatctggaagaaaaagatctagctatgttaacagagattctttaaagatgcaaattctcccctacaaagaacagctttgcagggccacttcaagatatggcaaagaaacatgttttagggtaaaataattttgcttttcttccttgtctcataatgctatgtcagagtcaagttggaaaataactcatgatatattggcttaaataaaacccttctgatgagaatttatgatttgtagggcatgactccccagacaccttagataggaatttgggcaagataaaaaaatcagtttagtccttactatatttcagctaggacaaattgctgctatttcagaagtaccaagtatcaaaccagaaagggcttgatttaggaaccaaacccagggctgttttggtaggaaaaaaaacaaaggcacaaccttagctatcgggtgggaccttagcagtgtgggaggacagccattgctttcagtttggcctaacaaaaagggtggtgttatgtaaacaaagcccctttagtagtcaaaatcaaaaatccttcctctttttccttttgctggccattttcctccccaccacaccatctttttttttttttttttttttttttttttttttagaatttagccacttctcaggccttcttccccataatttggaactttcctttggatttgatcaagttggatagagttgatcaaaccctgatcaagttggatagagttgatcaaacccaatgggaaaaagaccaaaacaacaataaaaaacagacaacaacaacaaaaaacagttaggcaaaacaaacaatggcacaatttatatgataactgagtgctctaatggtaaggagaaattaagaccagttggtcgttaatcttaactttaaccaagacaaaccccaattcagttacttacctagggacgagtctctggctatagactgctctctaccattcaagaagcaggaaaaacaaaacaaaacaaaaaaaaaaacactccttttccctgttggaagtgagccaaactccaacgtcatggaaacagaaaatttgtctttcttgatagaagcaagtaaaactccaaaaaagagaagttgtacagcaaaataaactttagatcttgaccaaatttggggaaatcagggattctctggagggggtgctctcagacctcagcaaattgtcctattggtttgagctgtaaaattagctcatgctggtaccaagcactgataagaggtttgccaaaggtcaggggcatctccactcagaatccctctgtggttaccaaaatgtgaaccccaaaaatttgagacaggtctcagtgaatttacagtttattttgccaaggttgataacacaaccccatgacacagcctcaggaggtcctgatgacatgtgcccaaggtggtcagagcacagttgggttttatacattctagggacacatgagacatcaatcaacatatgcaagatgaacattggttctgtctggaaagacgggacaactcaaagcaaaggcaggaatactggaaccagggacggggctttccaggtcataggtagataagagacaaatggttgcattattttgagtttctgactagcctctccaaaggaggcgatcagatatgtcagtgagcagaggtgtgagtttgaatagaatgggaggcaggttggccctaagcagttccaagcttcacttttccctttagcttagtgatttgggggctccactattgattttctttcacaactcaataacccaggaataattaagggaaaggcaagatggaggatgaattactcagcttactgttaaaattttctcagtgatataatttttgcaaaggtggtttctactccccagctaccacccctcttgtctagtcatcttattccttgccccagaaaccacagacctccctacaatgtagcaactcaggggttaaccttgacacaccaggaaccctcccagacctccccaagctcgaaagacctgtggccttgtcccttgaggccctaaggctctactaatcattatttattttgaccatcacccctgggtctaagtgtcctagcacaaagaccaataaaacagaagttggcattttagagggtctcagttattatcgcattctaatttttgagtcagaagagtaattttcctagaatcaaagaatgggctagttggagatttttttaatgctcttcttttagttaaacaaacaacatgattttgcgggggaataaatatcccccaactttatgtcattaaagacagtgtgtggtactataacggtattccccaaagtcatctagaaattatcaatgaaggaaaatacatattataaatttctgctaggcaacatttaaactggaaaagcagtggtcttaaatgagtttaaatattttttttctgaattttttctctttattttcagaattgaaaagcaagaactacaacaaaatgcctcttacctaaagtagaccttaatatgcaactgaaattcaataaagatacattttttaaagtctgttttgttttttaatgtccaattaccaaatgggttaagagcacatacttgaagcccagctttcttggttagcatcttggttccacacttactggttatgtgtgcataggccagttactcaatctttgtgtgcctccatttcctcagctgtaaagtgggggtagtagtatctaccttacaggattttcatgaagatttataaagcaaatatttacaaagagattagaatagtgcttgccacatagtaaatgctatccaagtgtttgttaaataaaaaataagcaccatagatcacgtttaccatcattactaatttttgataaagacaaaattttaagttggaaatccaaagaaaacgtttaaatagaagtctaagttttgggccgggctaggtggctcacgcctgtaatcccagccctttgggaggccgaggtaggcggatcacgaggtcaggagattgagagcatgctggttaacacggtgaaaccccatctctactaaaaaaaaaaatacaaaaaattagccgggcgtggtggggggcgcctgtagtcccagctactcgggaggctgaggcaggagaatggcgtgaacccaggaggcggagcttgcagtgagccgagatcgcgccactgcactccagcctgggcgacagagcgagactccgtctcaaaaaaaaccaaaccaagccaaacaaacaaacaagcaaacaaaaagaagtctaagttttaaggcttgttatggaaaattggcataaatctccctcgctttcaactttcacctattccactctccgtggtgttccttctctgcaaagtcatccatatgtattataaaagtgggtgccttggactggtatgttgactaatttgttcttagctcttctctcatccgcctaagaacaagaaaaacaagattgaggcctctgctatgaaactcttaggtaataaaattaatagcactgttcatgcctacttagaacaaaggctacctgagtacatgagaatattttcctcagtgttaaaatgccagagcacaaaggcaccccagttctccctggtgagggtttgagcccgaattgttcactaccccacccctcacctttttttttcttgagacagggtctcactctgttgcctggactagagtgcagtggttcgatcatgtctcactgtagcctccacctcctgggctcaagtcatccgtcctcccacctcagcctcctgagtagctgagactacaggagtacaccaccacatctggctaatttttgtagagacagggtttcaccatgatgcccaggctagtctcgaacttgtggactcaagagagccactcgcctcaacctcccaaagtgctgtgattacaggggtgagccacccgccagccctgcccactccttgttttgtaaatacctgctatcaggtcttccaaccttggtttggttacttaacctcactctttgcctctaatccctcatctgtaaactgagcgttaatagactgctgtgagatttaattaatacataatgtgcctgcatatgtatggtataacaaggatatcataaacattagttattaataattcgtggaaataagtctttccagttttggcattgcttttcccttaaaggtttatttcaaatacccctatgacccagaaaatggggcagggtagggggagttgcctgctggagacagaacggagagtggatggatatagcgggcgtggacggacagcgacagaagctgataacagcacagaagggcaaagtctgctcagcagcccccaaaataaacttgagcctggcaatcggcgcagaaccccagcagtcagcagcttcggtgcaaagcaactaacacctgaaggcttccaaaagcagcagggctctctctagcgggggagccttttcgaccagagaggagccagaagggggcctcagtgcagcctccactccactcaattcccggagttaccttggcgggctccacgctccgagagacgctgttgctctatgaggcgtgtctgtgtttctctagttcgcggctccagcagtcgcgccaaggggcagctgctactcctgccagatacaccagttatcacaggccgctcccaggcctgcgggggccctgagaattcgcaacaagccccgggcagcagggctcggctggcgctgaggccccgcctggccatgcccattggcggaggctgccccgggggcggggtcagggcgccccattcccagaccccgcagccccgcccgccgcgggtgcgtgtggagaggcccaggtgaggagcaagcgcccgcgttccggaagcccgctcccggggccatgggggcacaggtgaggctgccgcccggagagccctgccgagaaggtttgtgtctgccctgagccgagggacctggcagctgggtggcgaagagaccgggtgggcggtccccggacacttgcggagactggaaaggggggctgtaccgactctaaacgtagtcgttcactcattcattcattcagtcagtcggccgtccagccaggcgttcaacacttatttatgggtgcctaggcgattcgggctgtgctggaaaacctgagtggaataaggcaggtgggactcccactcgattcgcgaggccgaccagtgtaaattaccgcgtgctgcgtgtgggacggggaaactcaggatgctatgggaagaatcccgagtccctctgagaaggacgtttcctctgactcaggctcccttccagagtctgcggccgacgtcacccggtgggcagagggcgtgtctgcctggggggcccgtgggagttctgcgctgcgccctgcgctggctcccggggatcgagcaccgcgagaggttgggcgcccggggccgcgggggtgggcgttgggcaagtctgggccgcccacgtctctcctcttccttggaaatgaaaaggtctccaaacccatgagcctgtctgactcgctgtgcagtcactctggctgcttaaggcgagagccgtactggagaggaaacctggaaccgggagcactcgtttgcaggctcttcttactgcttctcacctgagccccgtgaaatctctgggcgaggctccttgcccttcgccaagtgttcgcaacactggcgggttttctgcagtctccatacagaaggccccgataaaagtagggaagggggtagggggagcgactggaaggatgtagatacattgaaatgatggttttcgccgtaccaaggggaaagcagctttttaatttacctgataatgcagtaaaggggaagggaggcagtgaaag

SEQ ID NO: 10349 - DNA, 6000 bp, Homo sapiens
attcttcaccctttgaaattcagcagtctgcatgagtgctctaaccaatggaatagataaaagtggcactgccagttctaagtggaaccttaactggctggaagcttctttaagacttagagacaggaagaagccacgtgtaggtaggtgctccagtgacaactctggctaagctcccagcaagcatcagcttccagtcatatgagtataccatctcaggcatcctgcccagagggccttccggtaagtccaactccaactacatctcaccacaactgtatgagaccccaagtgagaactgtccagatgagcctggccaaatcacagaactgtgaactataataataaacaactgtgttttaaacaactaagcttggaggttatgtagcaataaataaccagaatattgagatcaatttacttgcctgggaacagttaagtatccagaatccaaaacagttaaaagccagaatccaaaagggcaaaacatctattaatgatgagtgatgggatgtggtgttcggtaccccaaagaaatgactttaaaacaaaatcctctttcttctccctcccccaaacccaaagcagtctcagggttttctgagaaatgtcccagtacggtgacaccctcaataaaatcaattcccttctgtcttgaattgttccaatatataacagaggaaacaagttttcccccaccagcctgtgataactaatgagaaaggaatctgtacaagatgttgactttgttactcagaatgtcattacaactgttatataaaaggattcagattttatacatgaagctgtaattctaataataaaaatatatttaatgactcacaggactacatttgagattcacagtggggagagagaagcacggacactataccaggaactgaacaagccaagaagaaattagtgaaaggttttttgttttgctttgttttgttttttttgagacggagtcttgctctgttgccaggctggagtacagtggtgtgatcttgcctcactgcaatctccacctcccgggttcaagtgattcccctgcctcagcctcccgagtagctgggactacaggcacccgccaacacacctggctagttttttgtatttcagtagggacagagtttcaccatgttggccaggatggtcttgatttcctgaacttgtgatccgtccacctcagcctcccaaagtgctgggatcgcaggcgtgagccaccgcgcccagccttggtttttttttgtttttgttttttgttttttgtttgtttgttttttatgaaaggatctttgaggaagaaatgaaagtaataaaactagtcttcagacaagtctccctaacagaaaatgtctataatttatcacgtgtcctggtatatactacttctgttataaattagtggccaaactcttctatttttcttctccagcatattggaactcaagaaactcattctgtgtaagaactagaaagaacgttataactcatccacctccttcaatttaacagctgagaaactgaggcccaggcagttaactgatgaagagccaaactgctgatcaggaaaagaaccaagctctcagtgctggtgccaccatatgttcaattttattttaccagaactatacctttgaatgtcaccagtgtatgtcaaatgtagtctagcagttcagtgtgaaaatgaaaattaggaaaccatgctgttggcaatctcttcttcataattgtatgggagtagcaccgagtctgctgtttttggcaatcacagacaggttggtgactctgtagagagcagaggtgtgtaacttttcagaagcaagctgccaagctactgaccccagcttttcagtcactaacatcttagtctgaattactttaaccaaaaccatatggttgcctttctgttgatcatcactagagaccatggtacaataaagcaggaaatttaaatatggggtaattttgaggcagagagcaggataggaaaggtatgagggagtatctgagaggaaggctttgggcacagagaggagaggaagggaaggcaagaggcagggtaagtgaagggccctcataaggaaggcactcacttaacaattctgcctggggcagctagtttagtcccatagcctaggtctcctttcaggcttcccatactcacccacccacctatgaagaccttcacaatcagaaaacatgcggctctgttctggacctctccaagcaagcactctgcaattctttgaagctctctacaattccaggggttttgctgcaacctaatccatagaaagggctaaatttgtctctatgcactccacagaattacagcaaactgtcagggaaacagacccaaatccttttatttccttaccaccccctgctaggaaacggcagagaaagtccctgggtgctttttgttgctgggtagctaaaatgtgcaacttttagaaatgttcaagtagaaacaagaggcctgaactcactaccccaaaaagaaccagtcccagttcggtagtccgtgcctctccaagtcacaaagtttcaagttccaatcaaatcagaatatcttactcaaaaccgtggctacccaccacttttaaacattttcacaaatggagaaggggcaaagaaagaaaataattccttcttcctgtacttgtagcagtgtttaattgcagggaggtgggtgactgctcccgggaatcatgcacaacactggcaaaaaactgcctgtggaatgatcggatatgacatccattcatgtgtcccctcattatctttattagtcctgaagacagatgacatgctgacacggaaagtggtctccaatcccttgcatttcccctcacaaaacatacatgaccaatgcaaggtattataatagaaaacagaaaataaaataacctggtaagagtgcggtacaaaaaaagaatatgaagagccgtattgacaactattctcacagatgtatatacgtacagcaaacagcccaaattaaaggagaattcaaataaatacattccgtgttcagactgctgtggataattattgatcctgcagttggagcattgtttacctcacactgaacagcaacttagagaaccccctacccagacagccaccatctttactttctatggaaatgcgggtgcccactgaggaagaggatgagatgggatgagaaggggaagaaaaataacatggtctttgaaccaacgttttccccttgtcctggagaactctttgtctggctgctgaacacgtttgccagatcaaggaaaagaatcaaaacaaacaaacaaacaaaaagagtaggcgtcccagcctaattacaataggttcccaacacattgcagtcccaagcagagcatcatttgaatcttgtgttaaagcatttgctctctcggttccccaataaaacatgcctcgcacaccttctcctttgcatttctacaaaggttcccccaaacggcccgctctgtgtcactcctttaaaaatgaggacgtggggcaggaacacactgaaatatatgttgacggtgacttattatcctgacgatgatatatacatacaaataaatccctctaccccgcacccccactgaccagtccattacgcacagggagcgctttccagctgaagaggagagcgtgcaggaaacgttatttacgtgcaattacaggaccatataccacggcatctgcatcctacacaaagcccgagatggtgcaagaagatacacgctgagcatggcacagaccagccgcggcaacacggagccaagccctcgtccaatcagatcgttgttagaaggtggacctcagggtcggccgtgcccgattagccttccctattatgacaccacgctctgcccaacatctatatcccaccgagagcaaatccaattcgtgtggttgctcatttctcaaactgccgaaccctttcttttatctgcatccctgctattcgttcctcaaaaagccaccagaaggcctcggtgccccctttccgcctcgatttctcttttcacctcttcccattcctcgaaaggattaaatgtttatctctccaacgcgcaagctggaaaggcggaaggcgaatgcctctatgctgctccggcaagcgcctgcggggctgcgaaaagtaaaggcaacgaacaacgtgggggaaatcgtcgcgaatcgatcggccacaatagttggaatcccaggagcgctccaacttacccaaaatatgacattgaagccaaatatgaagtatttgatgcaacaactgacttcaggacccttgtagtgcttcccggacatcctctgggttcatgaagacacttgccccggcagcccgagtttggagctccgaagcaccgttgctcggagcagcccggcggggagcaggagctcagggacaccgcacggggccgcggcgctggcggcctgggctcagccgcgcggggaccgaccggcggagagcggctcccgcacctccagcccctcgcgcgccgaggccgccggagccggggtggccgcgagaaagcagggaagccgcgcgctgcaagctcaagcctcgccgacgctagccccgaacacaaagcgagcgcccgcgtccgtgcgccaggcggtcggtccgtcggttcgtccccgggcttcgggcaaaggcggccgcggcagatgctggtggagacgccgctcgcttgctcgcccgcccgttcgcgcgcgccctcccacccctcgctccgcccgcctctcgctccgcccgcccggccggctgctcctccgcccgcgccgcccgcagctccgcccgccgcccaagccttggctaggcgcgcgcgcgcacggggtcgggcgctcccgggcggcggtggcaccacgtagccgcctccttccaccgctcgctttatccccgccccttctcgggccaaccccaagcgccgctgaccccgaacgtcgctgcggggtaggtagggggtgggagggtggaggaccgcaggcgagagggagaaggaagggcgcccggggagcaggctggcagagtgaccgggattgatgagcggcgcagctctggagggacgcgggcgagagggtcgctcctcggggagagggctgggtgagtgaggacctgcgagccacccccgacaccccttccagggtagccacactggcgccccctcctccacaacaggcttatgtggctagagaagatgcgatgccactggacagggaaggaaagtcgtcgtggacttcgctgaatggaaaagggggtagttggggaaggtggagaaaagagccacgggaagtgggaggaaaggatgaagggatgggacgttgaaaaggaaagcttcctgaatccctgtgtgactctaacccaacctccccacctaccggagaaatgggttttatcctagaaatggggacgaggaaaaagagatggctcaagggagtcctggcccgggatgcgatcctcgccctagggtctattgcaaccacacaaacccggacagcgcacgctcccccctaccccgacagaatagtgcctaagaaacctgcttgcctcctaactctaggaaggaatccacaacggattccagggaggtcttctggggaatctgaattgggtttttggatcacgaaccattaagcttttgaactctggggaagaatagaacaggtggctggaaattgttttagaaccctacctgagcaggtgtgctcattagttgcttatccgccctcctcctggagcactttcataggtgttggcaaagcaggtaccagtatttcacggaaggagaaggaagaaccgcccaggactgtgtataaatgtctatgggaatatttttaaggattcaaaaggctagaaggaggtgagatcaaaaaatttttccagcaccacccagtgcaacccgatcctggacacagaaatctaaaagatgatacttaaatacttgagtttgagagcctctagttataaggtttcctacgtaacaa

SEQ ID NO: 10350 - DNA, 6000 bp, Homo sapiens
acagagttgaagacagccaggcaggcaaggtgaaggcacatcaggcactgtcccaggcactgtgagggatgtttttgttgcttttgcttgcccaacattccttactccctattcccagacagggcactgccttttccatgattctggtgggggctacatagcatccaagccacctattaaccacagattgaggtggacatagacctgaccaattaaagaaacattcctctggctataatgactactgtaagagagagcagaggatcaagcagaaccaactagatttccttcctgggctttatggataagagctagagaaagaagctctatccctgaattttccagttatatgagctaaggtattcccactttgttcaggttaatttacattaggttactattacttgcaaacaaaagaactcggactcatgtaggcacctgcataccttttcttatttcacctaacaactttataaggttgctattactcactctattttagccataaggtaactgaaattaagtggcttccccaagttcatataacagataagacacattcaaatccaagtctttctgccccaggttccattcagtatgcagtattcagaattaactcaagaagaagaaactcactgccattcagaaaccaaacaaattctggtttaaaaattacaggagaatgtagtgggcagagggagagcagcattaaaccaggtcaaaggacctggcttctacttatggctctgtgctatgacctcaactgctacgactttgggcaagtaatttcatttatttgggtgttagttttcttatctattaacaaaatgaacacaaggtccttttgagtgaaaaaaaaaaaaaccacaaacaaacaaacatgggtctgctttaagcatacagattctactgttactatatgtcaagtagatttcaacttgaatgtcaagcctaataacaggtaacggctcctggggtacaatgttgcaaaggattctgagctatagggatccactaagaaattagcactggcttccatgatcacaaggaagaaaagaaagtaaaagctgcatacctgccacacatctgccatcactgaaagagtttcaccttggcaaagaaatgttaccatcttttacgaatgcagacagtacttctgcaccaccgctgattcatcagtacctgctcaggattttcactcattcctcacgcacttaactaaattaaggaatgaaagtgcaagaaaactaagtggtttggaaaatacagcttggtgccactaaagaaaatatgtctaaatggcctacatgaggaggggggaggtagtttgggggaacaataataatcagtctgtttttttaaaatacatacatatagactatgtgagtagggtaactcagaagctaccctacttagcttgtgagttaagtagggtattatcacgtccactttatagaaatggaaaacgagagtcagacttgcccaagttcacccatttctaagtagcagaagcgagatttgaacccaaggcccaggtctctttccaatcccatcatcctcactagtcccacacttcaaatgagttaactaatcaaattcccattgcagagtgacatattcattattatttggagttgttcgaataatataagttcctcccccaaataatctgaaaagtcgttactctccatttgtaatttaatgggtagacatgcatttgagtatatataaatttagtaaaattgagcataaaagttaaatgtttaaaagaatgatgcagaagcaatcagcctgttgttggaaggtagggactgcaataaaattgcagtttcaatgcaattttattcaacttaatataacctctacaacaattcagtgagatggaaatctggcatcaggcatatatttgaggaatggaatggaagaatagaaattgaaccagataaaacgcatcctagaagtaacagcaaatgcttcaaggaaggcacttaccaaaaggcatactataacttattacatttcattaagtctgacaaccagggctaaacctgaattagaatatgtgcttctggtatttaccagacttttctctataaggaatccaggccaaacaaaataacagccaaacttttgacatctaattgtagtaaaagcacaggacatccatcactagctcttctagttaaacttcccacaagagaagatggggagtggggaacggttgcaagaacaggagataatacacaaagcaatgacaacataaaatcaaaattgcttaaaagaatgtatgtttcctctacgtcagggggacagtgtccctgaacaacacagcccatgaactcacttaaggtgatgtgacacctactcacatcaatacatagcagaactgcaagttgcattgtcatgcggtccaaccctgtgacatatgcacaaagcttttctcaaacatctctgaaaagcagtcatcactctgtttaatcacttccagtgacagggaactcagcaccctatgggactgttactgtccctgaggcccattaactcaaaactcaaacacattttcaccactcagggagaggtggaagtgatcacagggctctccaaagggcttgccaacccaactgtgcctcctgtctctaccattcccaaatcccccctttccctgagcaggactcaaaattagcacagtgttaataaatcagtggtttcagagttagaagggacccttaaaaagccaatactgtgatattcataccacagttctacaaaaggaatctcaagaagtgcttgggccaaactgggagggagagtgtcctgtttctcttcctcttatttcaacctaggaagctcccactttaatttgttacatatagaggaccaaggtagttttttaaaaggaggaggagaaaaaaaggaccatttacaggtaaataaactgaggtcttaaaacttgcttaatgaaatcatatagctaatagttgcagggttcagacaacaacctcgtctcttggctccttctctggtgctttctctaccagataacatctgaccatctacagggcaaaattcaaactctgcaatgatacacaaagccctttaagatctccgcgtccaatttttatgagagtcccacattccagtctcactcaaatgtttattgaaccaacttatgtcagactgttacctacctccacagcttagcgcatactattctcttagcctgagatgtccttctgcactggaaccaactaatcctctttcaagatttgttttaggcatcatcgcctctataaagccttttctggtcctcaggtagaactgaccacattctttttgtgccctacacaacacctgcaaggctttatggcacttgttttatgtctatgtccgtctactccaccactgcttttacatcatattactctaacacgaggctggtcagaaggtaggtgcttcatagacggtcatcaatagggcgagtgtattcatctggtccaatcccctttctaatgtttaagtatcctctgctaactgtcattaatgcatgcatgactacattcattcaaaaatatctgagtgtctatacagtgccaagtgtatgccaagcagagaaggatttactgtgaaattaatgaggcttaagctttagggtccctctcttcaatcttccaaagctctgaatctttcttggtgatttttatttcttgaagagggcagacagaactatataagctgtaggccccacaaaacctagatacctccttggtgtcacgaacacaaaagggaacaagacaaacagctctccccttatggagttttctgtttaatgggaaagacagccatttgttcattcactcattcaacaaacatttactaagcaatgctatgagtcatgcattctgagatgaaaacaacactgtccctgcccttaaggaaaaggttcctgttcccagggagatgaagggacacctgctctgatcagggaacagaaagtagttgaggtgactgtaacactgtgtttgcgaaagattaccctaaacccgtctcaagaggaactgagtcctacttattgcagagacaaagggaagaaagagttcggctgaatacagtttttaatctcaactaggggtgggaggcagacaagtaaatagaacaggcaaatatggtgtggtcagtgctgcaacaggaagcgaaggactgtcaggaggtttcccctgagtgcaagtctgtagtgacggcgaactcatgacctcacaaagccgcccatgcactttccagatagagatttctgaggatctcctttcttgtcccccaatccctgtcgccgcaggagaaatctgttccccaatatgcgtcccccttcctcaaaataaggctgttccttcccccaaaaagctgtagggtctctgaggccaactcttctgtcccccttagagccacccccttcacacaatgcttacgggacggggtctggtttggggcccggggtccctgtcgcaggactgccccctcctcaacccgccgtttccatagcaaccagctcaccacttcgcgggcccggctggagaagtcgcccttgggccgggggctccggcggaacagctcgtcccggctgccatcgaccccgccgcccaccgccactcccagcgccttgttccgcgtcttcacggtcttgacgctggcccggaatagcagcgtgatgtccaccgccatagcgacccgcaccctcagccccacactaggcccgcccacgtaagcagccggcgaccgcggcgcgaacccggccgctgaaggactggtcctgccccacacgcctccccccggcaacggcgacgcgagaagaaaggttccggcctgcgccctgctaccgcggcgggaggaaaaaggttccggcctcagccggcgcacctggcggaggaggaacctcgcgacgcgctctcgggcatcggtttctcccagcaaagcttggagggtttagctgcgcggagagctcagcgagctcttctgtgtctgtttggggcgtgtgggctccgggagcgtgaggaccgggaagctaggaggctccttcccttctggcggctccctcactgagaccgggcggtttggttgcgggggaagtggagacgagccacccttgacctttgactgcaagaactcaccttgagcaggatagaggcacgtggacggtgaccctcgggatgcaataaatgctgagacagatcaggtgtgcaaggcacagagctagaggccagaggcctttcttctccaaccttcagtcacctctttttaaagtgaagccagcatcctcctcggggtttactgtgaaaattaagtgagctgacgcgtgctgtgttttgatgttgcttggctcctagtaagtggccaataaatggtagtaatcgttaataatgttattattataatcactgttatttgtggtaaaggaagaggctttagagaaaaggcgtcacctgtgcagagatttgaaggatgaataggaagtttagatggagacaaaggtgaaagagtggccctaatgccgctggattctcttcatccttcatgcatagtttttaattgtaccgtcttgagccatagctattaaaattgacaactcaatcaatgagtttcttctgcattttaggttcatgttctgttttgtgttgttttttgagacgggggtctactatgttgcccaggctggattgcagtggctagtcagaggcgccatcctagctcactacagctggaacgccagggctcaaacgatcctcccggactcagcctcctgagtagctgggactataggcacgtgcaaccgtgcctggcctatggttcagttttaattcaaaatctcattgatttcttcaagatttcttttttcataaagaggaagcacaagtagaatatgtattaaaacagcagttttaatggtcatcaagataaaattttcacaatactaagatgttatttgccttttcgctctgattttcttatgag

SEQ ID NO: 10351 - DNA, 6000 bp, Homo sapiens
ttttaaagagaaaatgcaaatgacctcatggctagagctcatatactattgtctctaacagagtcaacctgtttatattctgctgtcttttccttcagtggcttaaaaaagtgtttaggtgcatactggttgacacaagaaaaacagcacgctcaataagcaaaaagtttggatatttcatggaattatgttgttgtttattttcaaaatgtgcttaagatacaaatgagctgtacaaatattcatgaaagtcaattaataatatctaagactcaaataaaataacctgccaggaaaggagttcataatcctgcccgccccccaccacccccattcttttcccctccaaaggccctctgcattcgcctccccacctctaccacccacacacctttccggtccaagctttctttcacataaaccaactttgttctccccccaacccccaccctccgactttgtcacttctccatccttttaaaaagaagtcagaattgacaagccaaattcttttatgaagaaagccaacagcgtgatttatccaaaacagtggcaagaaggtgattattagctaaaaagatatatttaagacaacaattgtttaagcctttcgttagtttactcttaacaggggtttgtgccaacgcagcttcattcaaattcacactgtgtgggcgctcggcttcaagagcgtctgtaaatgctgtccagagccgaactgaaggctttttttgcaacccgagttcagaggagaaggatctggtaacttgttcactaaaacatgaattcgaggttagacaactgtgtaaagttaaacaatctatagcttacttgtacacgcgactaaaagcatcgttaaacaaagcaaaatagagccaactttattaatgcctgggacagacgcaaagaaaaaagacctttgccagtgctagaaagtaagtccctcctccacatttccctctcccttcacgcagtttcccttcatgcccaggttactgagaagggaaaggactgacaggatggaagagcaaaggagggagctccaaggtggcaaagtaccaaggggacggaatgaaaataaatgtgaaagggtggaacaacgcgaaagttaggttacacacgaaggagtgggagaaggtgaccgcccatctctgctcccacaacgatacacataagctaatatcctaaaaatagatacagtgcaccagagatacaagggccgggctagaggaggctttctgatggaggagatgagagatggtggtcctttcgcttcagccttacctcgttggacaaaatgcttccgttggagatgatatcaggctgctggtcggtgtaaccggtgacgatggccccgcaggggttgtgctcagtgtccgtactccgcgaagggctgcagggcttaagaaacatcaggtcggtcttggcggactcaggggtcaggcatacctgatagcagtaattctggttgtggtggtgggagccaaagcccccggactcctctatcggcacctgggccgggttactgggtacattggagctctgcaccagcatgatgtctgacttgctgagtttcttcttgcgcgcccgggcttggcggccacagcaggtcgaacctccgccaccgcagcagcagcagcagaggcagcaatcgctggccagacaagtatagatgttgagcttcttctctttttggcaacgcacggccagcacgatcatggccagcaggaagatgaaggacaccgagcccaacgcgatgatgaggatgagggtgaggtctagcgaggtttccccgccgccagagcgactggggcgctggtgctctcctgaccctccgcctccgctcccgcccccgccctggggctccacggcgccatccaccagctgaaccaccagggtggcggtggaggaaaggggcggctgcccatggtcgcgcacctcgatcaccagctcataaggccgctgggggtcgcgcttggccgggactcggcgtgctgtgcgcagctccccggtgcgccagtccatgcgaaagaggttcatttcgttgccacgcacgatgctgtaagtgagccgggcgttctcgccgtcgtccgcgtccacggcggccacgcgggtgagcaggtaacccggctccgccgagcggggcagcacctcacgcgctggagtcccgttgcgccctggtagaggcgccacgatggcaggggcgttgtcattttgatccactatgaggatgttgacagtggcgttaccagccagcgcctgggggctgccagcgtcccgggcttccacctgaaaactgaagtccttcagctgctcatagtcgaaggagcgcagggcgtacaagtagccgttctcagagttgatagaaacgtaggtgaagacgctcatgccctggatctggcactcgaggatagagtaggcaagctgggcgttggcgccctcatcccggtcggtggcgctcaccgcgtagatgtaggcgccaggcacgttgttttcagtcacatacacgtcgtagaccggctggctgaaacgcggcgcgttgtcgttcacatccgacacttgtacctggatcgacttactggtggagagcgcaggctcgccccggtcccgagccactacagtcagggtgtaggagtcccccgcctctcggtccaggggggcttcggtaacgatggtgtagtaattcttaaaggaagacttgaggcggaaaggcacgtctcccagtagctcgcactgcacctgcccattctcctctgagtcgcggtcagtcacgctgaaaagggccaccacagtgccgggcgccgcgccctcactcaccgcttccttcacggtgctgaagctgatctctggcgcgttgtcattagcatccagtactcgcactagcaccttgcagtgcgcaggcacggcgttggggcccaggtccttggcttgcacgtacacttggtacactgggctctcttcatagtccaactcgccgcttacctccagtctgccagtgcgcggcgagagtccgaaaagctcccgcgcccggggcgaaatgtggctgctgaaggagtacacgacctcaccgttctggccctcgtccgggtcggtggcgttgagctggatcacgagagtgcctgggggagagttctctggtagggacacagtgtagacgggttggtcgaaagcgggcacattgtcattggagtccagcactcggatggtgagtagggccgtgccggtgcgctgctgctgggggggcaggcctgctcccccgccacctccccctccttctcctactcctcccccacctcctccgtccaccgcggtcagcacgtagcggtgcaccgcttgctgctctcggtccagtggcttctccagcaccagctcagcgaatcggttgccatccccctgggtctgcacgtccagggagaagtagctgttgggggtgatctcgtagtcgcgcaaggagttggtgcccacgtctgggtcgaatgcgctctccaaggggaagcgagtgcctggcgtggcgctctcagagatttccaccgtcaggtctggctccgggaaagagggggggttgtcattaatgtccagcacctcgatctccacctggaacagctccagggggttctccagaaagacctccaggtgcaggacacaggaggggctctgtttgcagatttgttcgcggtctattttctcgttcacgtacagcacccctgtctccaggttgaggtctaagtaaggggtccttgagttgggcaccgtctgaaacccgcgagccgaaagttttgtaatgtccagacccagatcttcagcgatattccccacgaaagtgccatgttcctgctcctcctgtaccgtgtagtgaagctgggaaaagactccttccaccatccagagcaaggcaaacaataatagcacaatcatctccaaaaggaaaggaagtagcttcccgcagccagtcagccacccaatcacctcccccaccaccacgaaacaaaaaaaaatctgaaaaaatacaaataaaagtgcgctacgtgggggctcctgtggctttctgtctttaaaaatcttactccttttgcttcattttagagcttcccgcaatccagcctcatttttttttaaatcttagcacaggaagggtgacaggcgtcccctttcctcatctgtaatctttccactgactaattaataaaataacaataatacaatagtcagcgtcctttattccgacagtcttggcgctggcaaatcccaaagaggaaatttcgatatttcaagactgtcctcggtttgtcttcttgctgatgggaggagaacgaggaggaggaaaaagaggaggaggaggaggaagaagaagaagaggaagaggagaaggaaaaggagatgctgttggcaccgttaaacatgcctcttaatgtcaacggctggcaaatgcaaaagggcttaaaatcagcgatataattttgtgccggaaaagcacagaacggctctgcagcttaaaactttcattctcttcatttctccggatggatgttcttcttgacatttttttcctctttcgctctatttgtattttttgtctttcagagtcttggttccctctgtcctcatctccaccgttacttgcctctctgtaagtgtaatgagcagtttcttttctgctgttttcttcccaagcctctttccctctaacctgtctctttttccttccagtccttccttcctcctgcttcagcctctgagcctgtggtctgggctggcagtttctgagctccgagcgctcggcttctccgtttttgcgcagcgccctcattctgccaaccaatcgcccaggagcaccacccaccgagctgccgatgattggccaaactggccgccaaacagacacgtcacgcggcagccgggcggggcgggacagaactctcgcccgagcggccggggtgagtgtgagtgtgagagcgagaacagccccgcaggtcccgaggcgctggctggggacaatgccgcggaaagttcccagtccccagccgcaggtaatggggagggaatagagaggttcccctgtttgcatcagcaaatgcgaaaacataatagcaacagctgcgatatcctctcctaggagcgggatttccaatgatgctaacattctttttcctttaaggtattttccctaatacgcatcatggaaataaatcatcgagaagggaaaaagtagcgcagggcccactaattggcaagggttacctaattaagggaccctagcagagactggcagggcattttaaaagtgagtattatatggcatgtgtcaatctaaaggtgagggggtctgacggggccgtgaggaaaggcgcgaagcatacggagtagggggtggaggtgactcctaaaaagcggaggaattcacgctaaaggatgtggggatgacagcgcttacagacgggcagacgcgttcgacgtgcttctttcctcccaaaatacatattcacaaaatacttaccaagtagattaactcactcgaggacctagcttcgagccgtgagcgcgttcatcagtgactgaggagttgatttgagccgcttcctacaagcccgccatcctaacgccgggctctggggcatccggcacacagcaccgccaagcgctgcaaagcgcctctgatatccctgcgccttgtgcggccaagtgccacgcagcggctgggaacaccggctattttctattttttttttggcaattggagatcgatccctttacccaccatgctagattagaccactgatttctgccaatcctggggtcagcccgcgggatgaggacagtggggcggcggcgaacgcgggcggggtggtgggcagggcccgtgcacacgaggggcccgagtgtgcaccgctgcgggtatctgcgaacacgtttgcacatgcacggtacttgcatccatcctccctggcccagggcttagctctgtgtaagccccaacggagcctccccgagttccgaaggacg

SEQ ID NO: 10352 - DNA, 6000 bp, Homo sapiens
agaccagcgggaggcaaactcctcctggaaaaggccagggagtaaatgtctttggcttcccagatgtctcccccagctgctcagttctgccagtctggcacaaatgcagccacagaccatacatacacaaatgggcgtggctgtgttctaataaaactttatttacaaaagcccctggcatagatcctggcacttgctaagtgccattcacacatgttaactgttataatgaagaaaaacagcctttctgtccattcacctctacagacttatgaaaggcataacacttcgggttgcagttctgaaaaccaatactaacatcaaaggcaggagggatgcccccggccccactggggagctgcccctcccacactctgaactgcctctaggtgctttcaccacgggccctttctcctctactttccagtatgaggttggtgcaaaagtaatggcaaaaaccgtgattatttttgcatctaatagtgactgtggccactccctgcaagcgctcctgcgtcccacctcctacagggcttcctaacccagcccttcacagcatgaggcccccacagctccttccctgtccctgcccctccctgctgatccacagccccctgcacagtccacctggcctcagaaaagaatgagcaaagaaaatactttctgaaggcatccagggctagagtcaggatgctgtggtcccaccagtggccagccctggggtcactgtctgagcctccacttacagcaacaccaatggccactacggacatgacggtgacgtgcttccattaaaagcaccaagaaggggccaggtgcggtggctcacgcctgtactcccagcacgttgggaggccgaggcgggcaaatcacctgaggtgaggtcaggagtttgagaccagcctggttaacatggtgaaaccctgtctctactaaaaatacaaaaaaattagccaggcatggtggcaggtgcctgtaatcccagctacttgggaggctgaggcaggagaatcacttgaacccaggaggcggatgttgcagtgagccaaaattgtgccattgcactccagcctgggcaacaagaaagaaactctgtcaaaaaaaaaaaaaaaacaaaagcaccaagaaggctttctgatttattctcatgccatccctgttggaaggtcattttccgttacaagggtcagtgtgctccgtggggcaacatctgaggcccggagtcagggagccccacttctgagtcccccagtgtcctgagacttggctccctctgcggtgttcacgtagacctcaccctgtgtggtgcccgtgcagcaaagatgagataacccgaggcagaagcgggaggttaagtgctgatatttccttacgtggccctcattccccttatccagacaaaagaagtgagtacaggggctaagcgacttgcccaacgtcacactgtcagtagggtgggagctggtcctcaacacagttccactgacctagcctggtccctcatacctctcagcccaccacaatggtggccactgctctgatcattagtttcatcgttagctaaagaaggaccccaaatgtgggcgtgggagtttgctctgtgacaaggctaaatgaataaatattctcatagcttcttcaccatcatcacccctcataaatcggctacctttgctcagagaccacacctctgatccccacaccaacctagccaaagagatgccactgcccccttttatacaggaaatggaggctcagagaggttaatcttcttacccaagatcacacaatgacaagggataaactacaggcaagtccaacttcagaagccctgcaggttgatcccgtcgccactatggggagaggagtgacccagcagaactgggacacactgcagtcatcctcagactccccaagggaagcccccatttagttagaaagcccagcagggaggcacttgcccagtcacagctaagtgaggcagggcctgaatgggaaccctggcagtctggctcagagcctgaagagacacaaggtcccaccctcgaggagttaaacagatagccatagcctgcagtggcaattgctgctggcttaagcattagaaattgttccctctgccacttgtcccacagcccaatccacccttacacaccaagagagtggggccacggtcctgccacttcctcgtgcagccttcctggccgggccgcctgtccccatctctccctgcacatgactctctgacagcacgggcagtgtctgtgtggtcacctccccaggaaaacagagcccccaccaaagtgggaccatctctcaggccacctcactgtgtcccgtgtccccagtctctagtgggcaagatctgcttaaggaaaaactacacaaacaaatatcacactgtatgtgtataaaaagttctgagaacacaaatgagagaagcacacaatctttccggcagagtctgggaaaatcacactgatggaacctgagagctgggcttaatcatgaatcgttctccacatactcaagggaggggagcattgttttagacggggggaaaaagaagcatgtgggggaaaaacccaagtgtgaagacatgtctacgcaacacagaggcagcaggcgtggctgagacattgtggcagggagaggggagagatgggctggggaagccaggatgtgaggaactggtgaggtcgtgggggcggtgggagtcatgggtggtttgtgaaggaggaaaatgccagtcatctcatgcattgggtccacactgtgagcctttgggagctgcttactgcaaaaagactacagataagaattaccccagactccagagcagagatgttcagcattacagaccggtacacacctcaacagcaacaaaaatcttgcaacaagccacaagcctccactgtgcgctacaacatcagtctctgcagagctgcaggtctccaggagggtggaaatgccctgctaggaaaggattctaattcccccactctatccccgaatgtgtccctcctccttgcccatcccagctagtggagccaccacccaccagcccagggtgctacaggaagggccagctcctcccatggcctcgccctccacaccagcgggttactctgacttaggggggatggccctgctatgcccaacattcactgtgggtggagccctgggagaggggctgaggctgcccctgccctcctccccacctcctcctctgctctggaaggcagaggccatcagatggtaacagcatcctgggacagcgccacgttccaggaaagctcaggaggggcaaggggatctccctgactacaaggagctggccagctgaagttagggcgttcgcggagagagcacagcactggcaaaggccaaggacagtgtgcctgcgagtgtgcgcagatggggcgggcggcggaggagggctggcggttagatacagtatcgctggagctcagagagccgggcagaggctggcggagagccgaggctggcccagccttcaggagaccggcgagctggggtgtgtgggagcgggatgcttctaaggcgaaaagaagcgccagcctcgtaagcggcctctatctgggctgcccaggccggatgctcaggagcccacagcaggggggatggagcgaaggaccgaggggctgggaggcgaggccgcagcgcactgacgcaggccagcgaggccgctggccccgacgcagggcgcccggcaaggtgtctggcaccacgagagtcaatccttgcgcgccatctccggaggccagtgcgcccagggcgcgccggcccggcaggagggtgggtgccagcctttcttcccatctctcgagcctcctccccggcgcccacgtgggcggagcagcgcgagggtgtgcgtggcaggggccgcggcggcgtgtgccgtgcgtggggtggggtgcgggctgggcggcctcgccttcgggccccgcgccgccggggcgcggcccccagctccatcttctttgccacctgggcggagatctgggggactgtgacctaccctgcggaagacacggaggggacgggccggccacaccccccgcgccactccggcaggcaccgggtgggtccccctcccgctccttggcttgagggcggaatccggagaagagtggaaataggggtggcgtgaaggagagctgggggctgggggcgggaccgggagggggtgttgggggaagcgacgcagcggctgggagattttgcaagggggtctgaagaggagtgggggatgggtatggaagggtgggggaccactgaggtgggatgcgagagtggaagggggacccagagggggcgcgatggccggaggagggggagatggacgatggggcggggcggcaccggtcgccgcgtcccttgccgccaggtccgcccctcggtcgccgggtccacgggttccctctggccagcgctcgcctcccgccccccggcgcacctgtacccacctgctcggcgctcaggcccgagccgggcagcagcagcggacgtagcgagcgcagccccgcgccgcatcctccggccgccccctccccgctgcgagcttacgccgctgtcgccgccgccaccgccttaaaaaggacaaaacggaacagaaaatgaatgcatgcacaaaaaaaatcgtaaaaagcaattgaggaggatggcagtcgcgcgcgcggctcggcggggcgggagtcgagaggccgcggcactggtggccgcgatccgggcaggcggccggcgcgtgccgcacgcgggtggctgcagctccctcggtcgcccgcgcccggctcaggcacggcaccgcccctccccccggggagcccctccgattggtctgtcttcctgccagtcaggcaggagggcgcggcgcccgccccgccccgcccccgcccccgccccgggcagatgccgggagctctcctgccgccgtgggagggggagctgagctgccggagcgtgcgcactgggccagcgggcggccggggcagggctggggtcccggcgctgagcgcccccagccgcgccgggcagcctggcgcctcgctgagtcggagcaacccccggcaggagctttcaggctctggtcaagcctcgggacccgggaagctatccctgccctcgggggctcgagcctggagtggggcttgcaggtaaagcggggctggggccgtcctggccgtcagtggtcaggaagacgcagcgaccccggagatccatgtccccctctgtacgcatgagaggtctgaaggtcagaggttaaagcgcacgctaacggcggcagagccagcaagcggcagagctgggcggatgccagcctagggagcctccccccaccagcccaggctgcccccagcaaagccacatcagcaggtcatagccaaatgaaagatgtgctgtcgagctgagacttgggaggggcaggactcagctgggcaaacattcattcagtgtcattagacaaatatttattgagcacttgctgtgtgccaggtagtcactaagatgtggggacaccacagtgaacagcagagaggaagcggctgcccaccagagcttactttctagcaaggagaaggcagggaagagcacccaccaaagggagcagcatgggggaacaccctgactgctgtgaacgggacatatttgagaatctgataaaagtatctgggccacagaatggtgagagggagtgtgtggaagatggggggcgggggcacagaggggcagcacttgcaaggtcttgcaggctggcgagagtttggagactgtctcacctggaaggtggtcccatggaccattgtcagattgatattttttaaagtgcatcagtcaggataagctatgttagccacagtaacaaccaaacccaaatctccctggtgtgtcttgcccacatcatacatcctgcctcggtcaatggggctctgttcatcagagtggttgggagcccaagctgctggggctgtctgccag

SEQ ID NO: 10353 - DNA, 6000 bp, Homo sapiens
cagacagtctgtctcaaaaaaataaataaataaataagagagagaaaagaaagaagtgtgtgctcagtgacagaacagtgtagtggtataacagttacagaaataaactgaaaatattctataaagatatgccctataaggacagatgccctaataatacaaattttacagagactaggctaaggttgcaaaaaaattttgaaatcatttgtaacttggatcagtaacgtgagctacaaacggtttttacagatgaatatttatcagtttgatgacagaaaacaccaactctgaagtgcaattaaggaaaatgtcatcccctcccccaccaaattctatccctttcattaacaaacctatattatacttattattatattttaaatgtcattactaaaaaattttgtggaatttgttttctggttatctaaacacctatataatatccttgatttttccccttgccctaaacaagcctaaaatatttacaatctgggactttacaggaaatgttttccaacccctgttgtcttaaataaagctccatagagggggtcagtggggagcactgaggattcaagaggccagctccaccagaccagcaaataataatcaaccttgttagtgaggaaaagttggtggtgacctagacatgtttgtgcaatatattcaaagtgaacaggtcctgccaactagttgtacataggttcactttactagggaatatacttgtttttaaagacatatacttattattttcaaaatactccctttttgtttttaaaatgctaaatctagaacctcaatcagaggtattgattattggcaggaacacctaaatctggacagatcctaatgagcatcaatcactttgatgaaatcaaagctaagagtatgaaaaaaaattctcttttgtacaaggtgacagaatgtaccagaagaccacatttaaacataactcagggatcctgcaattatctggaaaatagctaaaaaccaggacgaagcaaaaagaattctgaggccgggcacggtggctcacacctgtaatcccagcactttgggaggccgaggcgggcggatcacgaggtcaggagatcgagaccatcctggctaacacggtgaaaccccgtctctactaaaaatacaaaaaaaattagcccggcgtggtgacgggcgcctgtagtcccagctactctactcgggaggctgaggcagaagaatggcgtgaacccgggaggcggagcttgcagtgagccgagattgcgccactgcactccagcctgggtgacagagcgagactccgtctcaaaaaaaaaaaaaaaaaaaaagaatttctgagttctgagaaaaccaaatgtcatgaagtccacgcactcaagcttatgcacttaactagtaggaaagacatttagctctcagtcagaactaccaggttgtaatgacacacagttacattaagcatagatccagggttatcaaagctataacaaacaagaagccccaaattaaagctggtggaaagagtatggtgacagcaacaacaataaaacaactgttgctgccagatttcaaaaacatgatgcagaacagtctgcgaggaaaacagtctgtcagaaaaactaaaaagcagacgtaagtacttaaaaagtatagcaacgggcctcagagcctattgagacatttgggactgtttgcttctacaccagcactttgggaggctgaggtgggtggatcacttgaggtcaggagttccagatcagcctggccacctggtgaaaccctgtctttaccaaaaatacaaaaattagccgtgtctggtggcccacgtctgttaatcccagctactccagaagctgaggcaggagaatcgcttgaacctgggaggcagaggtggcagtgagccaaaatcgcaccactgcactccagactagcccacagagcaagaccccgtctcaaaaaaaagtatagcagtgtagaataaattggtatagaagcaacagtcccaaatgtctcaataggctctgaggacatcactctattaaaattcatatcagcatcgatattcattttaatgatctcaagataaaatcaagtaaagataaaactgcactccaggctcaccactgcactccagactaggccacagagcaagaccccgtctcaaaaaaaaagtatagcagtgtaaaataaattggtatagaagcaaacagtcccaaatgtctcaataggctctcaggacatcactctactaaaattcatatcagcatctaaactcattttaatgatctcaagataaaatcaagtaaagataaaactgcattgcataaactctgtttagtaaatcgaggaccagagaaatacatttgccaaagggttttgagttagagtgctcacaaaaggttggtgcttaaggggaacaaatgagtaaaaattattatggtcatagacagctgaagtttaactgaatttattaatttacctgaggtaattattatgtatatttcaaataaaatagtaattccgttttcctaaaggtaaaaatacattaggtatacattcccgagtcactgcccataaactaggatcagaacaaccagaattataaggatcaaaatactgacgttattcctttaatgccttaaaattagtctttctttgtacatttggcataggacaaaggcgagctcattttggacagatttgttaaactatcaagaggttgtcaggcaattaggcagcaggtcattactaagaccgataccttcaagtatctattaaaaccatcattttgaaactgtgaaatctggaaagtgatcagctacaaagggccaaatatggaatgcagaagatacagaatgtggtggctttgtgtccgggattggtgggttcttggtctcactgacttcaagaatgaagctgcggaccctcgcggtgagtgttaacagctcttaaggtggcacgtctggagtttgttccttctgatgctcagatgtgttcagagtttcttccttctggtgggttcgtggtctcgctggctcaagagcgaagctgcagaccttcgtggtgagtgttacaactcttaaggcggcgcgtctggagttgttcgttcctccccgtggtctcgctggcttcaggagtgaaactgcagaccttcgcggtgagtgttacggctcataaaagccgtatggtcccaaagagtgagcagtagcaagatttatcgcaaagagcgaaaaaacaaagcttccacactgtggaaagggacctcagcgggttgccactactggtgggcagcctgcttttattctcttatctggccccacccacatcctgctgattggtagagccgagtagtctgttttgacagggcgctgattggtgcgtttacaatccctgagctagacacaaaggttctccacgtccccactagattaactagatacagagtgttgacagaaaggttctccaaggccccaccagagtagctagatacagagtgtcgactggtgcattcacaaaccctgagctagacacagggtgctgattggtgtgtttacaaaccttgagctagatacagagtgccgattggtgtagttacaatccctgagctagacataaacgttctccacgtctccaccagactcaggagcccagctggcttcgcccagtggatcccgcaccggggctgcaggtggagctgcctgccagtcccgcgccgtgcacccgcactcctcagcccttgggtggtcgatgggactaggcaccgtggagtagggagcggcgctcatcggggaggctcgggccgcacaggagcccacggagtgggtgggaggctcaggcatggcgggctgcaggtcccgagccctgccccgcgggaaggcagctaaggcccggcgagaaatcgagcgcagcgccagtgggctggcactgctgggggacccagcacaccctccgcagccgctggcccgggtgctaagcccctcattgcccggggccggcagggccggcctgctgctcccagtgcggggcccgccaagcccacgcccactcggaactccagctggcccgcaagcgcggcgcgcagccccggttcccgctcacgcctctcccaccacacctccctgcaagctgagggagccggctcccaccttggccagcccagaaaggggctcccacagtgcagcggtgggctgaagggctcctcaagtgccgccaaagtgggagcccaggcagaggaggcctggagagcgagcaagggctgtgaggactgccagcacgctgtcacctctcagcttgggtgctgcaacaggcaaagcagcagcctgggtttctccagccccgtcactcgaacccacgggctcatcaccgcacggtgcggccagacgccctttctcctacgttgggagcgaatctcctcggctcacacaacccagccaccggctcccaccgcgctggaacccctctggcagcgagggtttgtcccagtgcgggtgacgcccggaaaggaaccagtcccaacagcgcaggagactgaggggtccctccaccaggatccgctcacctgcttccaggtgtgtcgcctaagagcggctcctgttcactttcgttccgcaggccggccatagttacactccctacaaggcgtcttgcgcccaactctcgcgacacctgctttctcccatcccgggtggcgtgaagctggcaaaacaagcctgtaagtgcgcgtgcgcacctgacggtcagacgtaggcggaacgccccgaggtcataggcggggtcacgcggaaggccgggcagcgcagggcgaaaggaggctgtgtcctcagcctcctccctcggcacgcgcctcccatcctgacggggactgagagcccaggagagctcggggcgtgtccaaactgccgcgccgccctgctccgggtttgtcttcctccctccgtttctccttccgctgtatctagcatttcggttcctggaaaggttaccggagctgcgattggggctgggaccaaagttgagtcctggaaagggagcctggagagcggcggtgctgggaggcccggccagctcgatcgcaggcttccacctggcggccagtaagtagccggtccggttaagtagtaggtgcgctaagagctccccgcgcctcttagcgcgccgtgtacgcgcctggaggcagggaccggggacgcggagctgggcgggagactcgcgggtcagggacgcggggtgaggctgggggtgagagacaaggctggagtccgtggcgcgcttcggagggctgagataatgggggcgagcgcgcgggcagtcccttccccccgtgaaaggtagaggtggcttccagctctcttctctagctcggctaaatgcaaaggcgccttacctggagggcttgtcagagccaggactgaaggtgggatctgctgcttgtaacctgcaggtccccggatgcgcaccccaacggcgcctgcgcctacgggggcctcagccttgcaaaatgtcactcagcagagcctgctgctgaaacgtgggagttgaaaaaggtacagcacctgcctagcaatgaccagctcctttcgtcacaaggaagatgacatttttagaaaacatgtcatgggttttcactagatctccatgtttatttcttggtggttatgtattaacatcttatctctactattaggcttgtaggctagctggcgtcagtagtcattctgtgtctcataaattaccgttttattagcgccagatacattgtcatgtaatttcatttgatcacaagtatcctatgagataggcgaagcagacacattgctagtttactgaaaattaagatccagacaagttaacccagagtcactctgtgtggaagtggcaaagttggaaaccaaacttaatttttttaaattaatatttatgagcatttaccctatgctaggtcctatactagttacacagtcatgtatggtatatgccatcacttctgatctttgtgtc

SEQ ID NO: 10354 - DNA, 6000 bp, Homo sapiens
caaacaatacaaaaaataataataataaattagctggactgtagtcccagctacttcagaggccaaggtgggagaattgcttgatcctgagaggcagaggttgcagtgagctgagatggcacaaatgcattttgtctcaaaaaataaaaataaaataaccatattccagtgaactaggttattactatcttacactggtcaaataaaaaaccagaagtgtcatttctaaaattacacaaaaagttaacattggcatgccttacacctgctcctaaagcctaacagggttaagtcacagaatggtgggctcagttagtctatatcatcacctaccactatacattttaggtgggttctaatgcccttccatgtgttctgcctgactgtgacagagttttcagcatctaaatcactttgactgctcaatagaaatgcatgttccattcctgatccagaactgagaattactcagagcctgggctacagtctaggaatctgcattttaacaagtcccaaggtgtttctaaatgctcataatgagaccagctccctgggctgattcagtgtattcccatagccagaatgattcttttttttttttttgagacagagtttcgctcttgttgcccagactggagtgcaatagcgtgagttcggctcactacaacctctgcctcccaggttcaagcgattctcctgcttcagcctcccaagtagctgggattacatgcatgtgccaccatgcctggctaattttgtatttttagtagagacaggggtttctccacattggtcagcctggtctcgaactcccgacctcaggtgatccacctgcctcagcctcccaaagtgctaggattacaagcgacagctaccgcgcccagccctagaatgattctttagtattaatttgcaagtttcataaaaccagggcccaggtatcatgtttcctgctctctgacatctgagccactggaacatccacgcccagccctggctcacctgaggtccccaccctgccccttcaacttggcttcaatcaactcttcaccatggagacaccaacttcctcatttttctcaatgcaatgaaatatgtgactctggccagcagtgtattttttaaaggagggatcacattactgtaaattgttattttcttttgccctggatttctttaaagaaaaaaatatgtcgggcatggtagctcttgcctgtaatcccagcactttgggaggcttaggcaggagaatcgtttgaacccaggaggcagaggttgcagtgcactgagattgcgccactgcgctccagcccgggtgacagagagagaacctatctcaaaaaaaaaaaaaacaaagaaaaagataccagatatcttttaagcataagagactgtaaatcatgtgcatcaggccaaacataattccctttcttcctgttagactagtccataaactacaaaatgaggattactacacaatgcagatatttctacatgtgtatatgtaagtaaagaaatacagcaaaatcagctgtgaagtaaaaatacacatatctaaccctattttctcctatactcctcataatatgtcttcacatattttcatcagtaaaatgcaggaactcactcagaaggttgctacaagaatgaaatgaggccgggagcggtggctcacacctgtaatcccagcactttggaaggcagaggcgggtggatggcctgaggtcaggaattcaagaccagcctggccaacatggtgaaaccccatctctactaaaaatacaaaaattagccgggcgtggtggcaggtgcctgtaatcccagttactcaagaggctgaggcaggagaatcgcttgaaccagggaggcggaggttgcagtgagctgagattgcaccactgcactccagcctgggtgacagacgaagacccttgtcaaaaaataaataaataaataaaaataaaagaatgaaatgagaaaatgcacataaaatgttcagtccagcatccaacacagaatgaatgcacagtaagtcctagctactatgatcaggccaggttgttttgcgtacatgctcagcgctgcaaaggtcttttaaattaatttactcaaaacttgcgtttctcctgatgaggaaaccaaagctctaagagttaagagtcttacccaacagtgcacagctactggcagagccaaaacagacaccagtgttttctaaagcacaattcaatattcttttcaccactccatgatacttttgttcacacccctaattgaaatgtaggaccaagagagccgtaacgttcagaatatgccactcatctcaaagctataggttatgcccaagcagactggagaagtaaatgatagaatgagattgagtctgtgaaagtaattcattattacacagttgatcgttttcctatttttttgtggtggtgggaagggcatttatctcccatcttgagtggtttcttttgtttctcttttgttcaatcactttactccaggaagtacaaataactattatgcagtatttgggattttgtctggtgagagttagctaggaacataaaggcattcaaaagatttacatttctagtcaactgaagaaggtgaggtggcaggaaatccaaggacaagttactctccatgtctgaaacataaggctgagttatgtcagaaagagagcaacagatcactatcattttttaactttaaattacttttcttgagtctgtgcttatgtacttaaagagaagttgtatattctctcctacacattcattctctaataattctctgctcttatctatttataaaactaagaataatatgaagatgaaaaaagtcaatgtttgctaaacctaagattttactataatctcttatggtgaataacgagacaatgctagcactctttgtttgacatcacctcaaattttttatagctacattggcattctgttcatgaaacacaagtaaagcgatgacttcattcccgaggataaaggataattgatcttaaccttcctatcacttttccttaactcaaagcactaatgcaattgaaggtactgataaataaaatttctccaggaaatgaatgacattgtgacagataacctccaagttacctccaaaaagtacaaagtacaatatgattcagaatctcaattcaggaaacccttgccccacagtgtgaatggaaagctgccaaaaatattttgttgaaaagaaattcaaactttgaggatattttttcttcctcagtttttaaacaaaaaaaaaaacctaatttcaacaaaatcccaacaattcaaaatgaagcaatgttcaaagctggattattcatttacattaaatttattagtgtgatgcttttattaccacaaacctaaaacattttgccacctttatctcctgatgttaccaactaatcctgataaaacatataaagctaagtaatggctctggaaaactgtgtataactatattaagttgctacttcaccaagatagtagtattcccatctcttttccctttctttttttccagtcactgatgatacttaccatactgagctggagtatgtgaatatggctgattttggccacataattttgccatactttttaaaacagaggtcaacagctaaattaaggcaaaattttaccacatttttaaaaatcggagtctaaagaatggagggaaggttattgattgccacgttaatgtaacatttccctttccagaacaagtaattatgcctctttaatgtaaatatggtaacccactcaacgtaagctaatctagagaacagacgcccaaagcacactgtcacccaatacacgagcgcacacacacacacagtggccagaggacagagcaaattcagaaacccagagctcagcaccttgcatagaactgtcacccctgacaaccttcacacaagcacacctggctggcttagatttgcagcaccagtataccttactggtaacccagctgcagcccaccatcacagcccgcaaacgcaagcccacaaccccacacaccccgtcactttttccaagagacctgtacgccggccccaagcctcactggctccgagcccgtccggagtttccgcggccgccccgaggccactaaccgtgtctgcagtcgcagtagccccagtccaccttgccacgggcgtctccgtagaaacaccagggtctgcccgcgccgtcggggctccgacaaaagttgtggcgctgtcctcgcagctgagcccagctcgctgggggcgaccgctccaggaagggtggcacctccgcccaccgcagacacggggcgccgaagtccgtcacgctgacccatggctcgccggcggggcagccccaggggtgcggccggggcgtgtgcccggcctggagggcgtgcgggcgctgggcagggagcgcccgcggggggcgcgggaagcgcgggagaggcggcggcggacgcgtcctcgggggccgctgctgggtgggaaggtaataggggtagtgcggacccgcagggggcgaatggcggtggctgtggtggagggaatcattgaggacagaatcaaagccgaccacttcggggagcgcccctaacatcagggctagcacgaagcgggcgagcgtcatggtgccagcgctgcggggtctggtccatgctccccagcttctcgggcttggagcggagaagaggagggggcgggggcggggctgccgcgtccctcgaatcccccagccccctcccgcccccgcacgcggaccgccctcgcctccccaaccttgcctcccgccgctggtgccctgccgcgcctcggctcctgtcccctggcggcggccgcgggtggggaaatctggagctcagccgagccccggccggcggagaggaccggaaaagagaaggcgcggacgcagcggggagcggttgggcctgagccccaggtagcggcgcaggcacgagcccgggaactctgccccctgggggcgggcgccggccgcgcaagctgctccggacctacgctcggcccctgccaggcccaccgcagtccgcccgcacggcactgccagctgctgggaccgagcccgagggtgcccgcgcggagcacggtcttggctgccccttgccagcatgcagcaccagcacagcccggcgttggcggctcccaaatctggcaccggcccctgccgtcatctctcctccaacctcgtcgccccgtatcttgcttcctctgttttgaaatctttaccaaagtatggatggatttagatgcagctcttccctgacaactcccaggataaaagttatcaaaacccacgaggaatgttaaagccatttcactgaactatacgctcttcaaggacaagaccacgttttattcagcttgatatcaccgtgcttaacaccgtgccccaataaacattggctgaaattaaaatcctgaaccgactcagggaaaggagcttgagcctttctgcttcctgcctcccactttccagccggtgccctggacaacaccagttgtttggttattattgggattcagtgaggctctcttaataccaaatttcctctctaaccagagaagacttcatccgtcccggtttccatcctatccaaaaagtccacccccctagcacctgcctcgttttttgcagggcaagggacttctgttaagcctattcatttgcctctccagagactctgcctgctgacaattttgaagcttcactgttggctcgacctcagcttagtagggccctttcaacactcctcgcccccctcccgcaggctccaaaaaactgttggcttagaatcttaaaaaaaaaaagttactggagctgtatgttttagtattttgcctttcagttgtttctgactatgctaccaaagtttgacaaggagaaggaagcccgtaaagaaggcaacattttattttctggcatggtcacgtttcgttgtgaaaaagcaatgctgtct

SEQ ID NO: 10355 - DNA, 6000 bp, Homo sapiens
ctgcttgatgatgaaagagactggctgatctgctagactgttgacttgtataagaacatcttgaagtggtgggaatttatcttagattttcattcctggatcatttttatggtctgatccagtgaggagccaatgaggttttccatggctaggtcaaatatcaggttggagttgatggtatatttttatagaactttcctggaatgcatccttgacctgggaataagaccagagataagacattaaagcatcacagtacaaagtagtattactgccagctatgggggcctttatgatatccaagatcatagatggtgaggcaaacagtctatagctctctttatcactatcttatattggcttaggcctatttctgtaaggcaaaccacttcaactgagattagtaaatagaaaaatagtgacagtaaaacccagaagttggcatcaggacttggaaagtatattaacaaaacagaatacagcaagccatgaaggagtatagcttattcaccatacatacttcctttttgcttggccgcacctatcttggtcatgcctgccttggtagtgctgcactgctctcttggatcatagtatatttcagtcttatgaccataacagtagtttcaacccttccttacacacctttccatcaaattatctcaaattttttgggaggggtgcagtcctacatttactgtagtgtttatttattaaaatttccacgtcttaactgtgttaatactgtatctttattatgactgtttgtattaattgtactttcttatttttgtattgttaatcatttggtatctaggtgggtccttgatgactggagaggtactacctctcccagggttagctaattcctatgcaaactaaccaatccagaatcccccaactcccaacacagacatcttgggttcttatactcctggccaatattgccctatcctaatcactccagaccagctaccaggcaactagggatatcccctacgcccgaagtcggccaaaattatttcaactagccaattttaaacctgttcaagcctgcttatccagttttgcccattccttcctcagaaaaccaaataaaggctttcctgcagtttccttgtacttcctctccccattgaccctgctgcttctaggtatggcacccttgcatggtgtaaggtgccatgcttcctgtttctagggatccatgagtataaaaatttcttctttcatgacaatcattttcacatctgcatatcttaccatatctgattaaaataaatcctgggtacattttaaaacactattattttgtgttattggtctagttacaaagttgtatagtttggccctaaacctctttttcctgatcaggttttataccttttaatacaattattttgcagaccatgacttcttctaggaaatcaaagtcctaaatgctttaacgatggttaaatagctacagattacatatggtacctgattgtaccttaaaaggtgtgcatctgggagagaattcaggacctggtagatgcctttgacttaatcttggttagatgcttccttgaaagatgacatgttacaaatagttaaccttggctggaaagagacaaagcttttcttaggaggttttatgtcctctgtcgaggacattagcaggactaaagagtttatggtacatacctcttgcatgtcccagcacagtgggtggtcatcaatgtattcagaactacactgctaaaggcaaatgcatctagatctctttctaatgcataagaaaagctgaagggcaatacacagccttgaggcagtctaagccagataaacagctgcctgaaagggaatactgactcttccttccatagttaaaagttcatataaggatgctaacatgttttaatgcttcaactttcccccaagaaacctcaaactactacaattttgtccttctgccacctctccctagatatttatcatatatagctcaagaaaaacagtgctaaacaaaacatgttaaacaaaacatgctacaaagtcttttgtttgactttctttacttatatctccgaaagcggctttaatgagaagccagaggaattttaggggagaagttcaaacctgaggttctggcctaaacataaattctggaactttaatttaaatagacatgctcaattagtactcaatgtaaatcagagcatgttcatacccgaacacgatcaagtacaccagtgtgattccataacccaggtgggttctgctggcccaaacaccaaagacctataaatgtgtacactgatgcttaagatgtgtgcactgaaattggctcctgcggctacatggcaacatttccaagtaataactttattcagctatccatctacttagcctcccttaagaattgcaattaaggtaatcaaatatttgtagttgaaagtttctcatacaccaaggtgcattaacacggttatatgatatggttttaggtaagtgattttccactaataaatcttatctacctgttcctagaatagtgcttgctgtatggtagttactcaatgcatatgagagaatgagaaaattaatgacacctgtagtaaactgtacaatgtacactctatttttatcacagtcagtaacaaataagttatccaactatatttggacaactgggaaatatgtaagacgaaggctaataaaacatattatttaaaacaggattgttaaagattctacttcataataaactgcttatgttaagaaatagtagaaacaatgatcctataaaaacatacatgtaaatttagatttagcttttaaagcttagaacctaaatctacctgaaaaaaagaaatatacattaaaaaagtatcttatttttatattactatatatggatcatttatctcttagaagcaattgtcttttaactattccattctttcatattcttactattcacgtttcaatccccccttgaaagtttgtaacactagttcagttactattgtattaaaaagatatttttaaagggtttactctccctcctaaatcagacagttcatctatagtaacagcagtggcagtatattagggaacaggtctggtagatgtggtgatgaaagcatggggaagtttttttttaactcaataggatgtgaggtatcatctaagtaagaggccgaagtagaaaatgttgcaagtttgtcagaagaaaatatgaaatattaataattgttaaggaatgtgataatatgatggactaggaaaatgtttttggatttttagtctggctggttgtcttacttgcttaatgcaatgattgttattgttacaatgcttgatagtctaaaattccccgtcactaatcttttatatcctaagatatatctctagtgcgctgtatcatcttctgaaaatacagctctaatcagcttcctcataactggaaaagcatttaatggcgccgagcttgtgtaagctcttcaggataatatcctttaagcttaagcctcatctttccaggtttctccttcatcacatgatctccatacattctacatttcagtactaaaagtatggaaattcttgaaatagttcatgcactttcatgtctctgcttttggctagtattccttttgcctggaatactcttgttgggtcacatgaagtcctatttattcttttctacttagttcaaatgctacagcagccatgcattcaactaacatttagctacctacagtgcctaaagtatgtcaggcactggagatactaaacaatgaacagtgacatattaaaataacagaatatctgttcagctattaagatgaataaggtggagttacacaacactgacaaatctcaaaaacattatgtaaaacaagctagctgcaaaaagatgtacacattacagattgcataaaggtggttaggagagtggtttccttaggcaaaaggaaagagaatgagacggggtagagctgacaaaggacttcaatcacttatataatcatttatttctccaattcagtggtgagtacacatgtgttatagttttgtttctaccttttttctgtctaaaatcgtctatttaaaaaaagcatctttaaggctggataccttcctgaaggcactggaaatctgtcatactgccactaacttaaaattaccttccacctcttgcatttccctttgtttcctgttttgacattgcgcacacattagttagtacactaggccttaagagtggaaactgccaggtaccagctttagctagattaaaacatgaccctcttcccaggagactcctgaccggttttctcgtcctccagggacccagctaggatttcaatgaactttggcctgaacccctcggccgaccctagaataatcgcccttcaggcccggattgcttctgctctcaccttccctcaattcatacggggggcaaaaccagactgtatttcccgcaacgaaccctggaatgcttcgctttagcggactccggtccactcccatcagaggatgcccttctttcgcctcacctccagcccagccgcagcgacccggccgggcccagcgctgcaagcctcaggtctctccagcagagctgcgcctctgctctccccacacttccctccgcaacaccacttccggcctacctcacaaattccccattccagccgaaaagaactggatcggccctctgcgcatgcgtgagaccggggcggtgtccgggggtgccgggagcgggcggtgcaggctccacttttccacttccctacgctctgtcggcagtctcgcgggatttccgcctctcgcgggagttatttgaatgccagggcggtaacgactccctaggcgcctggggccctctgacaagaaaccctaggagacaccgcggagaactctgcctctgagctggtgggcgggccggatgtagccgagcgcggacagggctagtccggacagagtcccagagccatgggagcgaaaagagactgctgcggattaaggaggcctttcggttggcgcagcagccacaccacaaccaggcgaagcaggtagtggcgctgaatcgctcctgccgcggggtaagcgctcccggcccgcgcccgccccagccccgacctggcggggccaggacgctggttcatacactccaaggtgattttcatagtctttgtggaagaattagagaattttgaactttgatatcattgcacgtgtttacttatttagagaatcgcattgtgtttaataatcatagtattcctgtgcgactctttaggttagcagatcattgatttttaacataaaactgcatttcattaaatagatttaaatatgtatgtatatttctgtcctctaatgattgtaacaaagcagatttcttgatcattaacaagataggttcgtgcaaataagtgcatctttgtcacaaaccaaatttttttgtggttgagatatatatttatatatatatgtgaaacaaaaaacatataaaggagaatatatatatattcttatatatataatatatactgctttatttttttgggttgacatatatatgtcatatatagtttttttttaaattctaccttaaacagggaaacatgttagatacaggagcttgaatttcaactctgaaacttaatgcgactttatcagcatttctctttctcaagctacttacttcttgtaggattacacagtcaaatttttaaaaatttttgattctccaactggatttttttttttaatttttgagacggagtctcactctctcgcccaggctggagtgcagtggcgcagcctcggctcactgcaacctcagcctcctggttcaagcgattcccctgccacaacctcccgagtagctgggattacaggcgaccgccaccatgccaggctaatttttgtatttttcaaaaatacaaagacggggtttcaccattttggccaggctggtctcgaactcctgacctcagg

SEQ ID NO: 10356 - DNA, 6000 bp, Homo sapiens
ggctccaatcccaaaggggtggggatggggctagtgtcctggatgcaatgaaaaacaaaccattttgataggtgggtgactagaagatgctaatccacagggctgtgcgagaggacctgtgctcagggcactccttggcgcagtaatgagcaatgcttacagtcacacaagagcaaggactgtcgatttcaccaaaaatgcagtgattatgatggcacatagagggacagggaggctggtgggacagaggagagctaaacctccccacggcctttgggagaaataaaaaaagaatgtcttaagctttaaaggagcagcttcaacagcagtaaatgcctgagaaaacagaccacttaggatcccgcctctgggggctgcggccaggcagggcaggagaatgcctacaactggacgcttcaatccacagactcagccctttttcaggcatgctggaaggacaactaagatcactgctaagggacacaaagatgtaggaaaagatatgtgagtagagtgtgtatgcgtatcgggtatcaccatgattacagagttggggacagcaagtgcatggaaaagcagaaagaaaagaaaaacagaaagaacaaactagatgtttcttttctctttcactgaagtccagaccttaaaagacacagaagaagggaacttctaacacaagagttccttgcccggagcccgaggcaagaggctccttcatggaagaatctaggcaacttctgcaacggtggcccccaaaaccacaggtaaaactgcatgagcactgtgtggagtatccagtttggaactggtaacgaccccacctcctaaaaaggcacagcatgagtgacctcccacaacctctcatgactggggcttgcatcctgagcaaggcttgtcttccttcccaggacacctgtttccaggatggctcccgcctctccccaagggcagggaagtgaaaccacagggaccttccctggacaaaccctgcccatcccagagaagaggcatgagacgggtgctcctcgcacacaatgggaaaagtgaagtcatttcgaagacaagtgaggagcctgctgtaggctgaatagcgatccccaaagatatccaggccctaatccctgggactgtgaaagccatacggcaatacggatctgcagatgtgagtaaactaaggctcccaggacaaggagattatcctggaaatttgaacatggcagaagaagacagaagctaggcgcggtggctcgtgcctgcaatcccaaccctttgagaagctaaggcaggaggatcacttgaggctaagagttcaagatcagcctgggcaacatagtgagaccccatctctaccaaaaaaaaaaaacagaaaaaattagctgggcatggtggcacatgcctggggtcccagctactcaagaggctgaggcaggaggatggcttgagccaggagttcaaggctgtagtgagctatgattgtgccaccgcactccacctgggcaacaaagtgagaccctgtctctaaaaggagaaaataaagaggaggagaaagacagcgatgtgacaatggaggcagggcaggagccgggagccaaggaatgaggccagcccccagaagctgaccaggggggcagttttcctccagcccccagaagctgaccaggggggtgaacggctctcctccagcctccagaagctgactggggcgggccaacagttctcctccagtgcctcgggagggagcttggccagctgacgatgacaccagtttcagcccaactagggcaaataaacttttgccattttcagccactaagtgagtggtgctttgttacacagcaataggaaactcatacaactgggaagggaaatgtttctaggaattccaccaaattcaaataaaatgtaaaatggtctgggctttaggattttgtgtgcttgaagccctgcatgtgttaagtcgtaactaatgagttgtttattccttcagcctgctttttgttgttgttgttgttggtttgtctttgtttttgagatggagctttttttttttttttttttttgagacagagttttgctcttgtcacccaggctggagtgcaatggcgcaatcttggctcaccgcaacctccgcctcccaggttcaagcgaatcttgtgtctcagcctcccgagtagctgggattacaggcgtctgccaccacacccgaataattttgtatttttagtagagacggggtttcaccatgttggccaggctggtctcgaactcctgacctcaggtgatccacctgcctcagcctcccaaagtgctggtattacaggcgttaagtcactgcacccagcccagcctgattattttgcttggtcagtctcagacaaaaataaaggtccaaagtcaatgtgatccacatactgtcaaccaggcctgcagagcccactcagcccccttctatcagccggaagcgctgactagcggcagcctcagcctgtcctccatctcctctacccccgaccttcccacagcagcagccaggccggctgggtcaccagctgtcacctctgggccctcaccacctccaggacctcactgagtcccagctcccagcgccacaggtctcctcggcctggccaccccttcttccccgagaccctcatcctaaacagggcagaaagggagccagcccttgaccctggattccctcctctttgcagtgcctgtcgagtgcctccctcccacctcctgaccctccccaggacatgccctcaggccgcgccacccctgccctctcctgagcactccacaggtcagtactgtacctccagtccacgtgaggggcctttcctccgcccttgtctttgtcaacctccctgagacctccggtcaccactgccctgtcgctcctccctctgctctgccagtcacagaggcatccgcatcattgcagttaccagggctagaactgtaagcctgtctgatggcaggttccagcctcaggaggtctcagagataaggctggacttgcagttttaagaaaaagacccagacaggggtgcaccaacttgtgcaggctcagccaccccactgcccttgcctgagcccctgccctcagccaacatggcctcccccacctgcagagcatccagctgaggcaccacgcagggcccgggcaccggatacccatcatctcaagtccccaaaagcactggccacgatggacctttttatatcgctttttcaggggaagaaacttcgcactgtgacaattactttctaaagtgaaatataaactggttctcccttactcagaattgctctgccctccccacgtcgccttctctaggggaaggccagcaggactccaccccagcagcccttgctgcccaaagccgcctctctgccctccttggtagtctccttgctgtgaatggtggggctgctgccttgcctgggaaggccccccagcgccccttctgtgcaggccttgccggccatcctgcacgtccctgtggcctcagaagggccctgcacaggacggcatggaccacgctgaggacttcagacaaagacactcttagcccttgcagcagctccaaagacaggtccaatgaggaaactcaggcacagagaaggtggtcacctgcccagggacacattcccagcaagtgaccaagcaggtgagaggccaggtggtcctctctgtccacactccacggctctgggccccctctgtgttcaccctccactgtctacactccatggctctgggccccttctctgtctgcacggctatgagactctgtctacactccacagctatgggtcccctctctgtctacactagatggctctgggccctctctctgtctacactccacggctctgggccccctctcggtctacactccacggctctgggccccctctctgtccacactccacagctctgggccccctctctgtctacactccactgtttatactccatggctctgggcgccctttctgtctacactccacagctctgggtcccctctctgtccccattccacagctttgggcccctctctgtctacaccgcacggctctgggacccctctgtctacactgcacaatcgcggcaccgcggctgaggcgaccccaggtcgctgcagtgcgtctggagttcgggtctcggaaggcagcttctgccctaacaaagcggccgctcgtggagtccgacgagggaaccctcccagcgctcccgggcgcatctcgcccgcgggaccccctgcccggcgccgcccccgcgggtcccgccaagggcccgggcgggcctcacagcgcggggccccaggaggccgcgcacccgcccggccggaggccccacaggcccgcgccccgcgccgcccgcccccgcccccgccccgccccgccccgcgccgggcccgggaccaggagcctgagtcaggccggcgaacaaaaggcagggcgggcgggcggcgaccccgaggggacgggcgccgcgcagggctggccgggatcggccgggaggcggagggcgcgggcgcgcgccccggagacgaaagaaagagcggaggcggcgcgccctgcccccgccccggccccggccccgcacacctaccgggccgcgccgctcgctcccgctccgggcgcttcggcccgcgccaccgcccgcgcgcgcaacggtcgcctcggcagccaccgccccccggggtcgaggcgagggcggggccgaggccggaggaggggcggggacggagaggggcggggcgaacctggtgaggcggggccaagggggtggggttggggcggggcgatgcgggggcggggcacggggcggggcgagggccttcgcgtcgggacagcgtggtaacgggactgccagggaagcagggatgagaagaagcgagggacggggcctccacggccgggggcgggacttccgttgggggcgcggcggcgctggtgcgcacggtgtgtacccgcactggcccggccctggtgctgggagcgactgcgttcccgcaagctggttttctctgcctccgctggcccgggacaccctgcgaagggcaggtcggtgtggccgggaggagccgcccctgcctgggctgtctctgtccttcgccgtcggtgtccgaggaagtcccgctcccgttgggtctctgtgcccgggaaacctggctgtggggagtcaggccccggcgccctggcttttcggctgggcagatgcccggagctggcggcagcttcgggggcggcgtgagttcccgcggcgaagccacggggacagccaggaaaggccgttccctccgggccccgggacgcccgcgaaggcggcgcggtgactgcggcgtccagcgggtctgcccctcccggagcgcgggcagcagcgagggcgggaccggaggcaccgctggcacgagaggaggagctgcccggccccggcctgcgcctctggccctgtcccagccgccgccttcaccctttaggccggagttccttcctcgccctcttcgtgtcttccttccccggcgctgggtctccctgccccttccttcctgccttcccctcattctctcccgccgcgtttttccctcgagacgcatccgtcgctgctgttcacgctccagccctgccgcccgcccagggactcggcccctctcgggtttgcttctttcctgtcacctgccttgatgggctcaaaacgcttcccctccgtccccgccaccgccccatggtttcttggcagctctccatcatctagtcttgtgtgattagtttggatcccaggaggaaaccaatggcattctcagtgggacaattaattaagagtccagcagggttcccgctggcagaggcgcggtccgggagccgggaagccacagggcggtgctgaattgggacaggtaacagcagggagggaactgttttcacctgcagggctgaaggagcgcggccagagcggttacaggaagccagacaaagagagagagatac

SEQ ID NO: 10357 - DNA, 6000 bp, Homo sapiens
gtttttttctgatcaagaaaaatctcagactaagataagtcttctttgaatagaggcaactcaggagatgaggtagatatgcaagaaggagccttttaaaatgatatatagctgaatgcctttacatacacatcaataaagatgttttgctgatttgactttaaaaaacaagatcccatagtcaccaatcaaagcaatctggttatcagtgattacattttacttctttttttatttttatttttattttttttgagacagagtcttgctctgtcgcccaggctggagttcaagggagccatcttggctcactgcaacctccgcctcccggattcaagcgattctcctgcctcagcctcccgagtagctgggactacaggcacctgccaccatgcctagctaatttctgtatttttagtagagacagggtttcaccatattggccaggctggtctcgaactcccgaccttgtgatccacccgattcagcctcccaaagtgttaggataacaggcgtgagccaccacgcctggcctatattttacttcttgaggaatcggtagaacagctccagagtttctatggctcccaaaagaaaccagctggtactgacttgcccagagcctcaggtccagatgaaggggaagtgtatttgtcctgttcattgcatctctgagacctaatgctacagtcctgccttgacctgtgaagaggaagtcaaaggtgtaaacagtctcccactggttcccttgccatcccatcccttgttggccagccctgactgtggccagttctgcatccctattactgggagacagtcaacctgccagcacgtctgcagagattaggagcgcaaacttaatattctgaactgcatagctgctcttaaaggtcatgggatctcagaagtttggagctaagaggaaccatagcttgtataataagtttcaattcacagatgacaaatatagctaaagacataacaactgttaacgttcaggcattgtgcgaggcattgtgctgggtgctttatagatatcatattatttcattcttgtgacaactctgagttaagtattcttatccttattgttcctattttcaaaatgaggatccttaggatttgagggattaaataacttgccactgtgcttgttcagcttagtccaagaaatccttagggacagaaaaaaaatgtttgattcagttctgctgattctcaggacactcttctttctattaaaatgatcacaggcgagtgaagaggcatttaatatgtatctcaggcactgtgctaggtgtcaaggcagttcactgggataccagatgaaatgtaacgtaaactcctgcctttccaggcctaagggaggaaaaggaactgctgggtctctgcaaagctctctcttcatgaaggcccaaacgcttgtaaggaaatgccttattaatgctcacaatatcccctaggaagagggtgtgggaaaaagagaagtactattatgcctctcttgcaaatgagaaaattgaagcagaaacaattacaggccttgcccaatacgaggcagtcaccactgaggccaaaaatgaaacaaaattgtcttggttccttccacgatattcactggccaaaattaaaagtctctcttcagttacctctggtcactgcagggttcaaggacaattatcatttgagacaactttttggataggaattctcttactaagcttcccacacctactcatttgaatttcatcccttttccctcttccctttttgacatagacaagtcggggcatagacaatcttcaaatgaaaaaacaaagaactggaaatatcagagtagattatattataactacattagaatcaagttatgaatgaattctcccatagtaatactagtggcaataaagatgactgccacatattgattacctattctgtgcctgatactatgctaagtgctttatacttggtcctacaataatacacatgcagagacaaatccaggttttgtgggtcctgaagcttatacaatttgaagggtccttcttaagaaaaaagaaaatttgggatatagaatgaggtacagggcttcgcaagggtctgtgcaagtgagagacccaaagcttaactttgcgagtttcatggtaaatgcatcactgtgcccaagttagctaacagctcatatccccagttttacaagcaatgaaattgaggaccaagtaagttatttgacgtaagtcataaagcttatactggcaaggataggatttgaacatatggaatctgactccaaatctcacgtattttctttgtgtggcttctaataaaaataaagttgctatcacctattaagcactaactatatcccagaaagatcacaccttaaggttataagaattatttgacaaagcagatgtgatcgttagtccttattatccctatttacagatggggaaaacatgaatcaagtaagattaaacagcccacggtcaccgagctgggacatagtggaagctaggtttcatgcccaggagtgtaacatcctcaatctttcccactgtcccatgctacctaccaccctacaggtaatccaggaaaaagcagaatagcgatgtgtgacttacctctaatgacaacagtatttccacacctgcccactgaaactagccctgtcctttagtttcatacaatacaccgtgcagtcctccttagctgggattgagcagctctgaaagtccacttccctgtactattacttatcagaacagagtccattcctcatggagaaaaacacttggaaatatcaacacaaactcaggccccagccaagttgccttacagccaccccctcacccagagaaatggagacacacagagaatctaagggctggctatatgggaaccacggggaagatcactcatcctatagggctccttgaaacagcctttcaaggccatataagaaaactcacatatttactataattggattgctttactctagtcacccaaagcaagagtttacatcctcaaacacagctcaccatggatttggacatggacaggagtggagaaaggattcagtttcttttttccttgaacatgattgctcaaaggaaactgaccctcgagacgctcagacagtgggccttgtcttcccttggcaatgtgaactttaaaaattacattatgctttgccatggtgctttttgaaaaactgcctttaactgccagatttcaggtactcacttaattacttttggaaactcagttaaaggaagatatccattgccacctggaataaaatagctttactgactggagagtgcagtgattcaaagtagactaggcctgggcttttttatctggccgcagcaagtgcagaccagtgggagaaatgaagcgtgcagttatggatgctaacaagaaaggctgctgctccagtgattatttttcttttttaaggaaaaaatgatcccagtaattctcttttgttcctcttttgacacagcttggtggatgtgggggaaagggcagatgaaatgaccagtgaaatcaaaagatgaagtcttcttaaaggactggctctccagcccaatcatctagaggaagagacaagttcagattcttgtagggtatctaaatgcatctgtgcctgaaaattatggccgtttgagaaaaacaagaattcatggtgagacaaagcaacacagactgttggtacaagatacaaagccactaagtcagcgttcagcaaagactgatggatgaattgtcacccagcctaaaggactggcccagctaccaactgcccctgcccagcccaagagggcaagaacacaatagaccgcacacccacgtctcatccccaggcgcacaccacttcaaaggctacagcaagcagacaacataacctgcctcttctgcggtgtctttcattcagttctgtttcttcatgaagtgggaaggaaacaagtttgggcccacctgagattggggtgtagacggaaggagtggggagagatgcaaacgacagaacacaaccgaaggcctttttaaaagtcaggatccatagccttacttatcactgtaaagggaacagagtcggctccatccttcctcatccttctttaaccctcgcctaccaagccctggaagacagggacgcaagaagagctctagcgcggagggtctgcctgagtgctggtctttcccatacaagatgtagcagcagggatgggagggtgagctggacgactccacaacacacacacagcccgccccgcctcaccttctcgatactctggtctacagccttctggaagacccgggccaccagcagcgtgacgctggtcaccagcaggagcagggacaacgtccccgccgtgtagaagcagcatcggcccattctgtgcgccgctcacgggccgggccgggccgcacccgccagggatccaactgcaaggagggaggagccgccgcagaggcgtcgaagacccgggacccttcggcgccacgcccacgccctcccggcgcacggttcgtgcgcgcagctctgggctccgcggcctggcgagcgcggccccgggtgcaccgggcggatggggccgcggagggacgggcccggactcggtttcggtttccttcgccgggcagccgtggcgcccgcctagcgcagctcgggagagtgcagggagcgcgcagggacgtgacgttcgcgggccgggctcgccgcaaccccgcgaggcaaccgccggcgactgcgcggggaggcgggcgggggcggaggccgcagtcatgtgccctgcggcggcggcagtgattcggcccgcgccctccccggccggtccccggtggccctgagtggctgcggcgcctgagccaggcccggcctggccgctcccagcgccctgcaccgcaggcccagcgctcgccccaccgaaattgccgaacctggttcacacactcatttactcattccgcagataggtctgagggcctcccatgggccacgcgctggggattcaaggtggctgggacattcccctgctctagaggcgctcgcaagttagcggggacaccgttaccgcaattacaacacaatgtagcaagtgcttctaccaggtgcctgctgagatcatgccagcaagcatgttctgcctggatgacctagggccccacattgaactggggcctgggggatgcataagtttgtcacgtaaggggcatgtgcaagaatggaagatgtgcaaaaaagggaggaggaggcatttcacggagaaggaaacggtgagcaaaggcattgggggtgaaagagcaaaacctgtaggaagcaagaaggaagttccttttgactgtaggctcaggtgttcagggggtggagtcggaggtgttgaggccccaagaggtcagactttgaagggctcttggtatcctgttaaagatgtggaagttgggaaggagcttaaagcaggcatcgctggtgttcttgcctgctttgctcactgtggtgtcccagacacccaggaccaagacctgcacacagccaggactcaagaagtgttcgttaaatgagtgtttcttctacgccagccctttactagtttctttgcacagttctactcatttaatacccttggcagtcctatgaataggaggttgtgtttgtcccagtcctccagaaacagtcccagatgggggtactatgcaagagagttttgagggaaaacagggagctggacctgggatgcaggtgtgatccttgtgaaggaaagaggcaagcaaggaaggaaggttgggtggaaggaagcatttgatatatatacagtccatgtataaaaagttcagcaaggccattggggtggggaatcctttagccaaatgggcttgtcccagaagtctggcatctcccagaaagaggcccgccttagtatccctgctgtgctcagtcatgagctgggagcagccttaggaagctggcctttgcagcaacctagg

SEQ ID NO: 10358 - DNA, 6000 bp, Homo sapiens
gcagcctgaaatcagaacagaattgcaatatataagaccaaaacccacattaaatgcacgtattacgtattcctctctgcatttgttttcaatttctccaagagataagacggtgttaaagtctcctcagaagtatgatgtgaaataatttaagcttatttaaagcataaaagttataagttgcttaacaaataatattatacagggaaaaaatcctaaattaaaaaaaaaaacaaaacaggccgggcacagtggctcacgcctgtaatcccagtactttgggaggctgaggcgggtggatcacctgtgatcaggagttcgagaccagcctgaccaacatggagaaacccccgtctctactaaaaatacaaaattagccaggcataatggtgcatgcctgtaatcccagctactcgggagactgaggcaggagaatttcttgaacccgggaggcagaggttgcagtgagccgagatcacgattgcgccattgcactccagcctgggcaacaagagcaaaacgacgcctcaaaaaaaaattgtttttatatttattaacaatatgatctatgaacctatgaattatatcaaggaaaaaaaaataaaacaaaacaccaacaaaaacccaatacgggccgggtgcagtggctcacgcctgtaatcccagcactttgggaggctgaggtgggcgaatcacttgaggtcaggagttcaagactagcctggccaacatggcaaaaccttgtctctactaaaaatacaaaaaattagccgggaatggtgggtgcctgtagtcccagctacttgggaggctgaggcaggagaatcacttgaacccaggcggcagaggttgcagtgtgctgagatcataccactgcactccagcctgggtgacagagtgagactctgtctcaaaacaaaacgaaacaaaataagaccaaaccaatatgatcatttcacgcttccttcatgtccctggcagagtgacacacaaacactttcagtgcagcatcatctgccaacattcctgaaaggaaaaggctctaacaatcttctgtttagaccatcttagtctgttcaagctgctctaacaaaatactataaactgagtagcttataaattgcagaaatgtatttctcacagttctggaagctaaaaagtccaagatcaagacagatttggtgtctggtgagggcccactttctgattcatagctggcatcttctttctgtgtccatggtagaaggagtgaggggtgtctctctagtttcttttataaaggcactaataccattcacgagggttccactctcatgacccaatcacctcccaaatgccccacctcctaattccatccccttcgtagtgaagatttcaacataagaattttgggggaacacaaatattcagaccatagcagggaccagagagggaggggggattgagactgactgattctatttgaaataaatccaggaaatgaccggactcactaataatattaaatcaacattgcgcttctcaggaccagaatataactcttgtgctacgttcattcatttcaaaggttaattttctagtatatgagccagtgaagctaaacaaggagctgtccatgaagttatgtgtccaagaagacacctcctggtacttcctgggagatactttaaagtaacaaacacagtcatcaacttgggaaaaagccctaaattataaccaatactcagcatgtatccatgtatatctaatattatatattcaacttctctaaccattaatcaagctatacataatgatgctttctgaccacaggagcaaatactctcactcaatggggacaggcctcataatcacactactgtggagttaatatgagatatttcagggaaaaaattaaaactttcttttttttttttttcgagacggagtctcgctctgtcacccaggctggagtgccgtggcgcgatctcggctcactgcaagctctgcctccagggttcacgccattctcctgcctcagcctcccatgtagctgggactacaggcgcccgccaccacgcccggctaatttttgtatttttagtagagacggggtttcaccatgttagccaggatggtctcaatctcctgaccttgtgatccgcccgcctcggcctccaaaagtgctgggattacagctgtgagccaccgtgcccggccaaaactttcatttttcaaactatcactgtggtcttaggttttgtgacagaatctggttttatgttatttagcatttatagagcacttgtatttatctcattatctaatctctgcagcattataaggaaggcggcttggtatagttcctttttgtaaattacatgcagataggaaggtagtgtaaaaagaaaactggcttagcttcaatctgacttccactaaggatgattattttccatgacctatttggagttcacagtcagggataagaggcacagtcaaatgctccactgaaaatggctgctgagaacgcatactgctctgggactccctgattatcttaagggaaaaagatcccattctcttcccacccattctcagttcttctattcaaaatagtgtgagttggtgcacaaaaatactgagaagatgaagtctttgttttagacttttttaaagagatggtcttgctgtgttttgcccaggctggactctcctgggcccaagtgagccttccacctcagcttccagagtagctgggactacaagcgtggccgccaccttcggctccagactgtcctttaaatatgcatcgccggctgctgtggcatcttcagtcggcatttacactgtcctggagcacagtccgagcagagctgctccatcacgcaaggaaatagaggaaatcagcaattccgtaagagtgacggggtgtgaagaactaccgtggctagcacagggacttgaggtccgaggctctgtcgccagctctcttgagacgcaggcaagggagacatgaggtccgagacagaggattgcacagaggattgtgggggtctcccgctgaagggctggaccaactgatgcttttgtggcgggatgcagaggactagagagaccagcatgggtgaaaacaggaggatatttatgttaaggtacgcaccagctcagtggattcacatccaaaaagctgagccttgaacaaagactaagcaggatttttataagcaaacttacagaagcaaaacaaaggcagttaatcatataatgacaggtcacataatctatagcataactgatgacttggcataacttgtggccttgcatagctggtggccttgtagctgcgttgaaagaaaaaaccaagaactggctaaacacagatatttgtcctcttttttttttttcttcacccctgctctggaaggggggtgtctggagcctattcctttggattcgacttctcaaacagaacagcgttatcttataactgtccttaaagtgagcttgctaagcaaaagaaaacttgttcttcttttctttttaacccttgccttgccacattctgggccttggctttttcttttcttggagtgaatgaatgcagtacttattactatttttaaatttctgcctcactttaataatgataaaaggctgaatttttgccaacttgtccatctgtgaccacgtcgtgctaaagcacacttgacacaccatagagcctcagatcaaacctcaaaaccaagcagctatgttaaaaataacattgccctacaatcattatcggaaggttctcgcccagagtagttcccaggctgctattctttgtcccccttaagaccataaagacgccgttcttttttggtgggacaggttgtccaacacaagcaggacactgcctgccgcatcctgaagcaacactgtcaccgaggtcacaccgagaggacaggacaaggacacagggcaagactaagaagagcaaagcgcagacttctctcatctgggccaggagatggggactgggacctggcccgggcagcctgaccacactgcacagaccccggctccggctccgtgcagatctgggttcccccagtgggaggtgtcggggctctccagggaaatcggggttctccggggatgtcgggttccttcaggggggccagggttccccgggattcggggttctctggggggggggtcgggggcgcctgccgcgcacccaccttgacgcgctttcagcagcagcgagttggccacgatgttctcgagctccatgtcctggcgccgccgccgccggcggattctgcgagaccgaggagactgaggaggcggaacaggaggagacgccgccgcccccgtgcatagctcgccgggcaccaccctctcctcgagctccggacacgatcccgggaggctgctccgccgccaccactgccaccaagggcgccgccgccgccgcctccgcaggccctcaccagcaggggagcggtcggggcgaggggagggggcagcccgaccgcggcgggtcccagctgtcaccgctgccgcgctatcgccccggttcttcttggccccatcgccctcgcctcgcgcgcgcaactccctcctcagtgccctgcccccgggcagccccgagtcaatgccgtggctcacttcggacaggggctcactggcaggggcgcccgccgcggccggcgacccgctcccgggcgggctcggcgctaacggcttagctgaagagggagcgcccctcgccgccgcggccggggcactacagctcccagaaggccctgcgccaagagtacacggcgggccgcggcgcgtggcctgctgggagttgtagtcgctgagcctatcggcgagtaagccgagcctgcgggcgcggtgtttacttctcgcgagtcggaggtgctgcgctgttctcgcgagacgaggaagcggttccgcggcccggcacgtgtcttagggtagcgcgcgcctgtctctcttcgggtctcgggcccttgggcgcagcggggcgcgcgccatggcgaaggcgaagaaggtcggggcgcgaaggaaggcctccggggcgccggcgggagcgcgagggggcccggcgaaggccaactccaatccgttcgaggtgaaagttaacaggcagaagttccagatcctgggccggaagacgcgccacgacgtgggactgcccggggtgtctcgcgcacgggccctcaggaaggtaagcggggggcgcacggggagccggaaggcaggatctggaccccacgctgctctcggccggctgcgtccttctcggtgcgtcggtttcctcgttgagcggcacaggccgtgacaggcacacggcactgacttgatagtccgaaagcctctgctgttctctgagctggagtgacctggaaactctcgccgtcttggagaccctgcactcgtgttatttcggcgactcctccaaccgggtcaggccgagtcagtcacttcgggcggcgccctggaccaagctgcttgttaacccttccgcgtttactttgagctctgcaggtttggggacggtggataggggctgtgtaggatgctgcgtttgatgtttcatcggctctctcccgaagcgcgtaaccttgttccttgggaagtaactctatggaaactcattgcttcctagtttttttaacttttttttttttaaattttcactgaggaacatacattagcaggttggtgaaaaaattaaggcacagaaaggacaagtgcatttcctaaggtcacgcacctggtaagggctgggcatgcattcacatttcaatatctacaaagccttcttgctaccccgagcgcttctgtttgacctcgcttctaggttcggggagataaaggtaaataagacttgcccttgccttcatgagctcctgatctctgttcatcacagtgtgcaagctggatggtctttgaatcaaaacacatattatccttactgcgcgaagacgacagcctgtataatgaataggcaagatagac

SEQ ID NO: 10359 - DNA, 6000 bp, Homo sapiens
gtcttcttgatcggaggaggcggtagacagggacatgggtaacttcacagagagtccctgtggcctggcacaggtgcatgtgatataatataaatggtatatgagctctcctctgggatatgtaagcctatctgcataaagcagttctgtaatgtaagaactttggaatgatgggtaggggaggagggaggagagagtaattttttcttatggaggctgtattgctcaggatttaggatgccccacaaacatttaggaataacatatgtcaaatcactagggtgtgatggtacattttatagatcaccttcaataagaagaaagccaagacttttagaagtatcttggagcctgacctgtcccaaagtaggcaaggcctagggccatttccattcaaactcctgggatcaagtgattctcctgccttggcttcccaaaatgctgggattacaggcatgagccacctggcccggcctgtggtgtattttaaatgtttatatttaacacattaacactttgaacataaaagtatacaatgactacatcattaaactcatttgagtatagtatcaacattctaaatttaaggtagagcccaaagagccctcttgcttcccctcgatagcccttagagtctgtgaagaaagctctttttctaagtcccgaatgattgcataatttcaacaggcaccagcaatcattcattaagtgtacttgttcttctcagataaagtcttctgattttaggtatagagagatcaccgtatctccttgccacagcatcagtctcctcattttccgcccttgtctgtttgtgttgctataacaatacctgagattgggtagtgaaaagaggtttatttggctcatggttctgcaggctggacaagacgcacggcacagacatctgcattggatgagggcctcaggctgcttccactcctgggaaggcagaaagggagcacacctgtgtgaggcacatgggcagagaggaagctagagagagaaggaggaggtgccagctcttttcaacaacccgctctctgacaactcactcatgcctgagggaggcattaatctattcatgaacaatctctcctcaggacccaaacacctcccattaggccccacctccaacactggggatcaaatttcaacatgagatttggagggaacacaaatccaaaccatagcagagaagtcaccaggaagagtcctgattgtctccctgccctggcatcagcctcctcatctaaactctgggagcagtaaccccttcccaagctgtctgcccctccagagtgtgttcagggttattagtggctggcaagcaggggctactccctggatgagagggcaaagtctctcatagggtgagatgatcctgtggcaataaactaacaatgccaattagcggtgcagacatgtcctatagatcagaaatgaggaggaagtcccaaagggcattgagaaacttaaatctggattttggggctttgtgtcaaaagcttctgaacatagctgtgggtagagaagatggaactgaacagaaagacagccaggccagctgctaaaaagttatgccagcctcggtgataagacagagattactgtgggatcacagactgctattttgggaacatacattattttcttaaaagctgtttatattttctgtaattaggtcctttttgttctgtcttatgttaacacatttaaaaatgctagcctggtcagctgtgttaagaagaaccaagaaagagattttcattcggcttgtccagagttttaaaggggaagtggcttactaaccgcctgacatagtggaaacagagtgagatcctcagagagcaggtaaactgagggcaacttgagctgtaaacccttgtttagaaactctcccacactaagatacatttatcaaatttgtctccatctctccatccccacagtctgttactgtcctggtggcccagacaagagagaagaagggacctcaatgaacaatgaaaaggaagagtaccctgggattggtggtccagggatgggaggagtgggtacctatggagtttgccctccagaatggagcccgcaaacagaaaatctgattgtagcagtcagagagtagggggtggaagttcagtgtgagcatgaacttctgagtgccaaagtacctaggcaggcaagttaccaaatttttttttctagttagggaaggagaggacatatagatgacaggaggacttcaaccaatgcctaggtaggggacatgtgagggttagtgggctagcattgctccttaagcaaactggggcacagagcagagttaatgtagctaactgaaacttaacagcagagaagaggcaggattaggggaagagaaaggctgccgattgtggacacctgaggactggagaccacccacccatcaggctggggacagttgaatcattcaggaccccaccaggttctatttgaacacaggactggtcctctggggctgctgcttgaagagctttggtagctacaaaatgtcccagcctcagttctgcccttaccatctgctccagttatctactgagtaacctaccacaccaacactcagtggcttaaacaacaacaatcctttattttgcattttgagcagggctcagcagggaccactcacctctgctctgtaatgtctagggcctgtgactcaaaaggctagggacagctggggactggtgggacatttctcttcctacagactcagggcttctccccacagtctttcccatgttctctgcagcagtctccgggtagctgaacttaggggtgacttgaggctccaagagcaagaatttgcaaaggccccagcagaagttgcaaggcatttatgatctagcttcagaagttccaggatatggtcatttccactgtattctattggtttaacaaattgctaaaacctgcccaaattcaaagcgagaaagtatagaccccacctctcaacgaaaggagtaacaaataatttgccaccatttttaaaccatcatgctatctcaccaagtcctcaacaaagcctcctaactgatttgctgtcctcagattctcattagtgacagatcgggatgcagcaatgcgcagagtagaaaaagtgagggttttggaagccaacagccagccctacatcctggttcaagcaggatccaccactcagcaaccagttgagcttgttaggttacttaactcagagccccagtgttcttgagtgtaaaatgaggataatacactatagttgccaagaaaatgtacttcttggatcttgcagtgtagatagcataactgaccaatggctccgcctcaactgctgagctctgctgaaatccataccctgatatttatccctaggttgctgcaaaggccagcttcctaaggctgctcccagctcatgactgagcacagcagggatactaaggcgggcctctttctgggagatgccagacttctgggacaagcccatttggctaaaggattccccaccccaatggccttgctgaactttttatacatggactgtatatatatcaaatgcttccttccacccaaccttccttccttgcttgcctctttccttcacaaggatcacacctgcatcccaggtccagctccctgttttccctcaaaactctcttgcatagtacccccatctgggactgtttctggaggactgggacaaacacaacctcctattcataggactgccaagggtattaaatgagtagaactgtgcaaagaaactagtaaagggctggcgtagaagaaacactcatttaacgaacacttcttgagtcctggctgtgtgcaggtcttggtcctgggtgtctgggacaccacagtgagcaaagcaggcaagaacaccagcgatgcctgctttaagctccttcccaacttccacatctttaacaggataccaagagcccttcaaagtctgacctcttggggcctcaacacctccgactccaccccctgaacacctgagcctacagtcaaaaggaacttccttcttgcttcctacaggttttgctctttcacccccaatgcctttgctcaccgtttccttctccgtgaaatgcctcctcctcccttttttgcacatcttccattcttgcacatgccccttacgtgacaaacttatgcatcccccaggccccagttcaatgtggggccctaggtcatccaggcagaacatgcttgctggcatgatctcagcaggcacctggtagaagcacttgctacattgtgttgtaattgcggtaacggtgtccccgctaacttgcgagcgcctctagagcaggggaatgtcccagccaccttgaatccccagcgcgtggcccatgggaggccctcagacctatctgcggaatgagtaaatgagtgtgtgaaccaggttcggcaatttcggtggggcgagcgctgggcctgcggtgcagggcgctgggagcggccaggccgggcctggctcaggcgccgcagccactcagggccaccggggaccggccggggagggcgcgggccgaatcactgccgccgccgcagggcacatgactgcggcctccgcccccgcccgcctccccgcgcagtcgccggcggttgcctcgcggggttgcggcgagcccggcccgcgaacgtcacgtccctgcgcgctccctgcactctcccgagctgcgctaggcgggcgccacggctgcccggcgaaggaaaccgaaaccgagtccgggcccgtccctccgcggccccatccgcccggtgcacccggggccgcgctcgccaggccgcggagcccagagctgcgcgcacgaaccgtgcgccgggagggcgtgggcgtggcgccgaagggtcccgggtcttcgacgcctctgcggcggctcctccctccttgcagttggatccctggcgggtgcggcccggcccggcccgtgagcggcgcacagaatgggccgatgctgcttctacacggcggggacgttgtccctgctcctgctggtgaccagcgtcacgctgctggtggcccgggtcttccagaaggctgtagaccagagtatcgagaaggtgaggcggggcgggctgtgtgtgtgttgtggagtcgtccagctcaccctcccatccctgctgctacatcttgtatgggaaagaccagcactcaggcagaccctccgcgctagagctcttcttgcgtccctgtcttccagggcttggtaggcgagggttaaagaaggatgaggaaggatggagccgactctgttccctttacagtgataagtaaggctatggatcctgacttttaaaaaggccttcggttgtgttctgtcgtttgcatctctccccactccttccgtctacaccccaatctcaggtgggcccaaacttgtttccttcccacttcatgaagaaacagaactgaatgaaagacaccgcagaagaggcaggttatgttgtctgcttgctgtagcctttgaagtggtgtgcgcctggggatgagacgtgggtgtgcggtctattgtgttcttgccctcttgggctgggcaggggcagttggtagctgggccagtcctttaggctgggtgacaattcatccatcagtctttgctgaacgctgacttagtggctttgtatcttgtaccaacagtctgtgttgctttgtctcaccatgaattcttgtttttctcaaacggccataattttcaggcacagatgcatttagataccctacaagaatctgaacttgtctcttcctctagatgattgggctggagagccagtcctttaagaagacttcatcttttgatttcactggtcatttcatctgccctttcccccacatccaccaagctgtgtcaaaagaggaacaaaagagaattactgggatcattttttccttaaaaaagaaaaataatcactggagcagcagcctttcttgttagcatccataactgcacgcttcatttctcccactgg

SEQ ID NO: 10360 - DNA, 6000 bp, Homo sapiens
aggagtgactttttccaaggtcataaggttataaagcaaaggattacaaatgagaatagaatatcattaatttgacagtcaatgctatataggctttccagagacttcttttatgcaagtagtccccaaattggagcacaaatgagctgctaggattgaatttcagagcgtaaactaagttaaagttaaaaactgtcaaaagccaagacactgaactgatcaaaaaccaaaataagtaacttttcattgttcgtttggtctatatatactaattaagtaaagcaagtgagaattttaaaagcaaagcaatagtttgtcagaagtagctaattttactttgtatctggtttgtggttactccaagtaatttcccggttttattatttttatttttctttgtgaacaaattaattggctctagatcataattttagaatcagtcaccctttaatcatccatttggttaagtttggggccactgggataactatgtgatataggtgaagactggttaaatgaaaacatattttaataaaaatgtatttgtaagaagaaactgacaaattttcagttacacaaagaataagacataggtaatatgaatagttaaaaccttcgtcccactcgaaatcttttaagggtattgctaaaaattcagttgacttttctgggtttcattcttcctgcctctgctcaatctctaacagaggtgaagcaagaagaggtctaaccatggttaaagggagaggagagaggcaaaagagatggataataagttgaagttttagaagtccagagtcactgttaaagaagaaagaaatgggtccatggcactgttaccagtagaaacaatatgttcacctatacccgacttcaggctttcttgttttacaagcaatacctatccccatgcatctccaacacctgcattacacaggtactgtttcacctgtgctaccctcacaggtgctacccttatttacaccaagccttctgttaagtctccatggtgactagaagcaacctagatgcttcagatactgaactatctagtagtggcattatgaaacagaaccaaactgattaggcaagcagtctaagcaagcacagagtttacaaagcaattcaacaacccaaccaagccaaaaacacagatttcctaatgcttagtccaaagttgatttgctgtacttagattcctaaataaaaatatggctatacagaaactctcctacctaggacttctgcagatgaatcaagtggggaacaagcacaaaaacataacattgattatttggttttatgtcaaaaggaacaacagaagttggtagtattttcaaggacaggaagaaaatacagaagagatcaatctgcagttcttgataaccactacatccagagttcaaggccagtaaccacatatgcaacaaggaaatacacaatgaccattctgagagagcaaataaaaacaggaatgatgagtgggattcccaattctaactatgttaaaaggtgtaagtactcgcatctgagacatgcgtcagcctattgccaggctaaatataagtcagaacgggagttctgagaacgaagtgatgaggaaaagaaagcttagacttaatggagacacatgtttagtataatacaatatagagcatatacagctattcatacagacaaatatacatatctagtttctaaacatataaatcaacaaggagagatataaaacaaaaaatgaacctcagacaccacgttttattttattcagatggaaagagtttggataagtacctaatatgtacattcatttagggaattctaggctgttgggactgatcaacaaatgtcttacctgtaggagccctaaattccttgtgagaaatgataaagggaactttggaactgactgatggttcagccaccaagacactaagattatgactttcaaaaagaaaagccaaaggttgccttaacttgcagggggatctagatctcaagggcagtggtgctagactctcagaggcacacaagaatataaaaaaatcaacaagtaataccttaagtccgagcatctagccgtggaggactagtttgattcagggagaaatgctatccaaatgactccaggtgctgccactcaaaggccctctgacccaggccagctcctagggaatcgtttttaaaaattcttaaaaggaggggaaggaaggattacagagcaggggaagagggcagcgctagacttagcagcctgggcattgaagaaggactaaaataattgtttctagtggggaaacctctaacaaatatggttatcggagctacagactgggtgctagcagtggcaggagctatgtgactagcagagcagggacaccaggggaaaagaaggaggggcttatgtggaggctcagagagaacactggccagtggctccagctgaaatactcctggaatttggaattctcacctaaatcctgatcgccaaggctagtgtgacttggtaaagcaggagtggccactgacatctcctcacacaaaatcaatggaactggggaaagaacaaggactaccccaacagctaaacctggaggcatctccctgataatgacttcctgcaactatgggttaaaaaaaatccagccttaaacatggtgaaccatgttggtgaagaatggatacgtggtataatgaagtccatggaagtccaggtatccagtcccagaaaaagccagggaagaagtgttaagtgatactgcaagctcaagatctgtgctcatcaataggcttcaaacaacttcatttcctctccacgcaaacaacaaaaaaaggcttttaaaatggtggctttcctgcaactgagaaatgttttaaagaaagtatagtgaagcctggctacatctatctctatttacaacagagtgcttttaatattcaagtctaagtaagtaaacagacagttgagagatttgctattttgtcttactgagatcctgccaatgaagaaagtaaatactcttgaaagcaaatgtttaactgagaactaaaccaaataaagtatggttgagaatttttaagtggttaattgaaaaagaccaaacaagaccgtctgtaattttccaaaaatatagactgcttcaaatagaacctacgtccagttctgggaatcagcaaatcaattagaatcgcatctgatcaactttatgccccttaagtagttttaaaatttcagtactcaagtacaatcaatgatgtaatcagcctcacaacttagttatttgcatgaacttcaggaaataacggctaacacagccccttttggacaacagaagtaattttttagttggaagaaatttaatggagttatggttcagttgctgtttacagcttgagaattaaaacgttgggttcactctatattcaagaagacatccatctcaaaaccttttttcatttaaaactaatctgtaactgcaatatgaatacaaatgcaagttttaaaaattcttttaaaatgagaataaaaacctacagcttatagaaactgtaacattgtaacaatacgtttaaaactggtcattgaatgtaggattcataagtacacattttctcatctagtaatttttttggcataagtttcagttcaggaaaagttcagatgcaacattttatggagtgttaaatatttctgtactgggcaaaactactgaacttcatggtcactaccacaccgtcagctgtctgtgaaaaatctacttgcagggcaagttaacaggtttctatggctcaagtttgcttaaaatacagaacaaaaaaagtcaccttggcatgaatataattaagaaatcagccgtgtgcttctcacgtttgggctccgagacgtgggagatgcccgctaacctaagaccttccgagggcgatgcaaggacccggacagaactttcccggccgcagaccccttctagggcacacctggcctggcgcggccgcgggggcctcggggctgcgcgcgcaacccgcccgaggaactgtcaacggccgcggagcctcggcagcctcggcggctccgcgcgcccacagcctggggagccccgggaggcaacggcagccgcgcggctcgggggccggggttccaaggcgcccccgccgccctcggtccccagtccgcccctcggagcccgccacggcctagcgccgcccgcctcacctgtgcggccccggcgcctctcccgccgccggtcgctctcgtagaagcccagcgtctctgtgagctgaggcgccggcgggggcccctgtccgccgctgccgcccggctgctccgcctcgccgcggccgtcccgctgcgggccgtccacgccgccaccgccgccttctcccggagcggccgcgtcgccgacgcccgccatgttccgagcacaacaaactgtccccgccgcctccctccagcctctgcctccggccggccccctccccgcctcgccccgcccctcgccggagcccgagccgccgccgccgccgccgccatccgcggcccgccgaccggcgcgagccattggcgtcagcgacgcgtgtgaggccgctgccgccgccgccgccgccacggtagccgccatcttcttcctgccctcgccgtggcgggcgacggtttctcgcgccgtggctggctcggccggccggggcaccgcgccgggctccatgcagccgggctgcgcggtcccgcagagcgggcgcctccggggctcgagtcggggacccggcaggagcgggccggggatggcggcggcgggcggcgggtcggccgtggagccccggagaggcggccgccaccaccgctgcccgcagtctgcgaggtgtccggcggtccgctcagggcctcttttgcagactcggtgcccggagtgcgccggcgccgcccgccaggtcttggcactgctggcgcggccgcggcggcgggggcccggctccagatcaccgacccccacgagcgccggccctgcctgcccgctattttggttccatctcttctgcatatttatgcttgcctgttacattccctggcctctgagtgtcctttggcagtttccaaagcatttgggcaagaaggagcttgggcagcttcacaacaggtggggacgcgcaggggaggggccgcggccggaccggcagagtttcaagggctggcgcgccggcggactttccacactgtctttcgggactggggttaggagacagcccttggccaccactgtgtccttactttgtcgctttacttggggctggacctcccctttccagctctggcgtgtgaccccgcaacgagcgtggtgtcgagaccaccaccagctggggcggtgggagcgaaggtgccccaggctcggggaaggtggaaaccttttccccgctccccaagtgattgttgcgcgctccggtgaggggacagtggtacctcgatttcccgtgtgccagcttcgggactcagctgtgcttttgtgtctctttgattagcaaaagcaaaacgaattcctccccgaacactaagcttcctggaaacttccctagacctaaacttgagaaccgcatataaatgggccttgagggttctgtcgtcagtagcgggttacgtgattgcaaacgagcaagtttaaaacggagtgggctttgggctgcagagccgcctggcattctgacagctgagcaggaggcagaggtgagagtccaagatggactaaaaatgtcccagcagctgggagcccaacctcggcccaacctcgttgaaaggaggaacattcggtgcagccgtcggaaccttattatttatgaaaggggacagctcacaggattacatttttctaagccaatcctgtgaccatcctccatgaaattctctattttggttgcatgtggtcaaaactgagcctcactgaaacaattgaaaacaaatactcccgacaaatcttaagaatcgttttgaaaatcaaaaggtggggaaaatgttgt

SEQ ID NO: 10361 - DNA, 6000 bp, Homo sapiens
atgaaaagatgctcagcagcattagccatcagggaaatgcaaaccaaagccacatgaggtactattacatccactagcatggctatagtcgagaagtcaagcaataataaaaccacctttgcaaaaattataactgagaaaattattacagtgaaagagatctgacctaactgactccatcttgcttctaacctccaagtagtccttgttcattcctgggagtaggctgaactaactttgggagtttatagtttaattttgaaacaaagacaatcacagccctttcccagaacaaacccccttccttcctggggaccagactgtctttgcaggactaacaaattagctacaagattagaaattatggtttaagagtcatgcagctggaggtggcaagattctgaaccttcccaaattgctcctggggataacatcactattgtaaaatctaggatcactacttgagatattttgcagatcctgcacttgatggatcagctggcaccacccagatcgatgaactagctcatctggtcgtttggctcccaccctggaactgactcagtgcaagacgacaaactcatctccctgtgatttcacctctgacctgaccaattggcactccccactttctgacccccctactcatcaaattatccttaaaatccccagtctccaagttttcggggagactgatttgagtaataaaactatggtctcctgtacagccgcctctgtgtgaattaaactctttctctattctaattctcctgttttgataaattggctctgtctgggtagtgggcaaggagaacctgttgggcggtttcaataacaagagttagcaaggatgtggaaaaattggaaccttcatacactcctgggggaatgcaaaaatgatgcagtctctttgaaaaacagtctggcagttcctcaaaaggttaaacatagagttttcatgtgacccattcctaagtctatccctaagataatgaaaacatacttctacacaaaaacttgcacatgaatgttcctagctgactttttttttttttttttgagacagggtctcactctgtcaccaagggtggaatgcagtgatgtgatcatggctcactgaagccttgactttccaggcttaagtgatcctcccacctcagcctcctgagtagctagggctacaggtgcatgccaccatgcccggataattgtttctatttttttgtagacaagcagtctcactgggttgtgtaagctgatctcgaaatcctgggctcgagcaatatgcccgtctcagcctcccaaaacgctgggattccaggtgtaagccaccacacctgaccaacagctgaattatttataacagccaaaaagtagaaacaacccaaatgttgatcaataaatggtaagaagtgatatatccaaataatgaaatatttagcaataagaagaaattgaatactgatatatgctaccacatagaactttgaaaacaatatgctatgtgaaagaagccagtcacaaaaagacaacatagtatatgcttccatgtacaggaaatattcagaataggctagtttatagagacagaaagtagattaactgttgtctaaggctggaaggggcttgggagtgaatagtttctttttggggtgatgaaaatgttctaaaatagactgcagtgatggtttcacaactctgactatactaaaaaccattgaattgtccattttaaatagtatatattgtatgatttgtgacatatcttattaaagtttattaaagctgttataaaaaagagcatttacagccacacacaaaaatattatgaagaaaacaggtaattttttttttagaatctaggatttttcaaagttattttctaagaatgataaaaatctaaaaagttacaatatcattagactaaaaatttaaaccatttatgtgaccaaaaaagggtaaaaatataaatgtctttagttgtctgtattctccagcagatagcatgctccaaaagcactgaccttgttgtacgtgaaaacctaatgttaggtatacatatttgttgactaaatattagatagtccttgacacatggtactataaaagattaatgcttttcagagtaattttctgtgaaaaggcaataaaaatctgtgtttggtcattttttttaaagtggcaaagaaatgaacttacttacgcatactaaaaactatagcactggggccaggcatggtggctcatgcctataatcccagcactttgggaggctgaggtaggaggatcacttgaggccaggagtttgagaccagcctggccaacatggcaaaaccccgtctctactaaaaatacaaaattaggcatggtggtgggcacctgtgatcccaggtactacggaagctcaggcacgagaatcacttgaacccgggaggcagaggttgcagtgagctgagattacatcactgccctccagcctggtcaacagagcaagactgtgtcaaaaaaaccccaaaaaacaaaaaaactatattggcaacactttttaagccttagataactattcacctatcctcaattttggaaaaaaaaaagtatattaaatacataaagatattctagaactcagttcaagagttcaaatacactataacgaatatttaaaatatttagttttcaatgcattgtagtttagtgcatagaagttatttacttctgaaaactgatgactgacatatgacaaactatttctactgcttgtatagctactgattttcttgagaatatttggaactgtgtagtctgaatttctccaaaggattggaaaaaaaagtcacaacctttaccccttttctgaaaacacatctgatatctcactttagagattggaatattcagtctccgtggttgagaagagaagtcacaaagtccactgaactcatagcatcaccatatcaaagtcacactgatggcacattggtgtctacctctttcatgccagcaggctacgaaaatggcaatgaattgccatccaaagaaaacagaaatggtagtggaatttggttagcactgggcccaaggctgattgcatctaaattaggctctaaggcagatagcatctgactactttaacgttccaaacaccatcttatccatacattaagtgcagcaaaaaatgcatgggtgacatgaaatttaaacaaagttctaatttcttaatatatggaagccaaatttaacaaaattctactttcatgaaatttcataagaatatccttgaatttggaatatttagacttaatgattctatcaccaaaacttaagtaaactaaagatttaaaaaaattaagccagttatgacagaatatgagatcctttagggaacttttctgtttgaattaacgacaacaacaaaaatttaagtaaaactttaaaaagaccatccaacttcatctgtcacgatggttcacagaatacccataacacgataaagcccttagagttaatttaatttaatttttttttgagacggagtctggctctttcacctaggctggagtgcagtggtgcgatctcagctcactgcaacctccacctccgggttcaagtgattctcctacctaagcctcctgagtagctgggattacaggagtgggccacaacgcccagctaatttttgtatttttagtagagatggggtttcacaatgttggccaggctggtcttgaactcctgacctcaggtgatccatccgcctcagcctcccagagtgctgggattacaggcttgagccaccacgcccagcccttaattttagacaacgcagaaaaactggctccagatacacttgggtgacttggtcaacatatgaatgttaaccatgatgtgacagatcagacttcaatttctttagactgaactagaatggctccgaagacgaaagtcaggtcaggaccagggagaaaaactgggcaaatacgatttttttttttccatttccaacagaggtttgaagattagaaccaggatttgggaagcctcagttcaggagtccaccgaggtgtgtgtgtgttgacaggtggtggtgatgccgagggcgtgttgacaagttttccccgcccttgacctttagcctagatattaattctaccaactggggcaaccccagagggaggaagccagggtcccccaacaggctgacagcgcgtgacctttgccctagatagcctgagaaagctgatgagagaaggggcgagaggtgcctacagcccccaggaccggccttgtcccttttgccctaactcctccacttatccccaccgcccgtttcctctcacccaggcaggacagcttggctagcggcaccagcatgttcaaagtcaccaggactctcggtcggacacaacaggaggactgtccgctgctcgcggcgggcgctggacctctaggccgcggggggcgccatcacctgccggaaagcaagaactctgctgcagttcgcctccccgctctgccgaccgctcttgcttcacggcgttcccacctccttctcgctctgcgccggcgccatggatgacgcaacggccagccgaggcttccgggtcatgtaccaaaccagggaaagataagggactccaagtcccagccggggagcggtgaaacagccacagcgcggccagaggggtccgcgaatcccacagcacgacgcacgcgcagtgaaaggcagtagaaggcggggcgacgcacacggcttcctgggaggtgtagttttctctacgagtgcccttcgagatcgattggaggctcgcgcaggagccgtgagttgcctaaggtgaattgactcatatgattggctgtcccgaaaaatgaaacgtctttgtggtccggggctgagacccacgaggagactgggcgggatttctggcgttaggaggcggggcctttcggctttgggcgcgagtggttaaaagacagttggtgtcggttcggcttctcgggtcggattccgcggtcccaacccttccccatggccgaccctgaggagttgcaggtttcttcgccgcccccgccgcctccctcttctccctcctcttcagacgcctctgcagcatcttccccgggcggcccagtgagtttgggctggccagttccgagcaggagcagcggcccaacggtggaccagctggaggaagtggagctgcagatcggagacgtgagtgtggtgtcgggaccgcgtcccccctcggcgcctctgggaagaccggcggcggcggggctcgcgaggctagggaatcggtcccccaacccccatgacccgggacgaccggcccttctgcgccccagagcgtgcgggcgggaagcgggggggatgccagcagctaaagtgccacccctctctgagggttccccctttagatttagtggtgaggagtcttaaggggttttccttccacccgccccacccctcactggtttctttttgtctcgccttctggtttcaatcatccgcagtaacccgaagccacgcagctctgcgctgcctgttgctggctctctgcctcctcctttcccatcggagaatagttttcattgcatgggtttcggagaatagttttcactgcatgagtttgctggctttctgtgggtacttgagatcaggctgtgatttctttccatgggacttagagcctgctgttctagttggccacctgcccagggacagctgataatgccattgtctgccccaggcctgcttagcgctggacccagcttgaagggtttaggtcacgtggattggcttctttgacggtttagttcaggactcctccctttgtatgattgctagaatgcatacttaggatagtttctgttaaatctcgaatccccagaaactagcaccccacctcccaaccgtaactcacacaccactggaggggagaagacagggaaggggagttttatgttctcttgagtgggtcaagtggaatgaggtatgtagag

SEQ ID NO: 10362 - DNA, 6000 bp, Homo sapiens
gaaacccggaggggcagccccacaaatgagggcgctctgacctgtcctcccattgccaccccacccaggaacagcccctcaactggtcacagccaccaggaagccccaggactgctcccacaccacagcagtgccctcttctccatcccaccctcaggacctacccagggtcctccaggcagccaggggccagctccaggacagggcaggagaatgcggtccaggtctggcacgtaactgagggtgggtatgctccagagaagtaaggcaaatggcccagatgacgaccacctggggtagacccagggtctccagggaatggctcgggggcagacgctgtgtctgtgtgtgcaggatctgcccccaccagcaggaaaggggcaggagggaggcaaagaggaggtgcccaggacttgtaccctggctgccaagcagggtggggtgttttcatgaggattgcttttaaccaaaagtcctcagccttctgcagacccagggcagaggcgagttgctctacatcatgtgctttaagtagagccctttgccagccaggaggcccagccacccccttccctgccctgtggctttggggggagacacagagtcacctcaaggccccagcccactcagcgcacggtgcacacatccaggatgcagaagcgtgcgcggcaggtggggcagggcacgcggctggccagccaggtgtcagggcgcagggggtcctggcggctggcgaaccacttgcccatgcaggtgaggcaccacatggggcggcagtaacactgctggcactcgcctgtggctgcctcctggcaggtcttcaccagcttcacgctggcacgtgtctgcatgcagcctatgcaggcctccagctcctgcgggcaggtggagcgtcaccaggagcccaggcagacacccgtgggcacccacccatccacccggccctggcccaggccccccacctggctgctgggcactgagtaggccgggttgacctctaccagggaggcaaatgtctccaggaacaggtcgcccaggctctggtggatgaccacatgggctgccctgcggatgggtgcccggagcttctcgcagagctccccgtactcagtggagttcagcctgcagggaggagagctgctgggcccctctgcagggcaaagggagcggaagatggaggctacaccccaaggagtgacagggcagctgtcgcaccaggaccaaccaggagagatggccctaaggccagagcccacggacccagtgccagacagcccagcctgggcacgggacggacctaggagcaaggcagctgtccagcctgagggctgcactgtcctgagtgctccccaagaatctgggggaggtggctccagggagtggaaggggaggccaagagtgcagggggacccgagggagggctatgcgggagggctcagtgactggtgtcttgtggacaccttgcctggtgtcacacaagcccaggagtgttggagtccacaccagctacacccagcacctcccaggggtcgtggcaccagagcctggctctggcctgccatgtgccctccgcagccccacaggcaccacactcttaccagatgtcaaaggcctgcacagcagggttggtgctggccacacggatggtgaggagctgcacgggcaagttcgagtctggcgagagctcatgctgccgagactccgtcacagtcaggtgcacgtcctgctgctgggccacgtgcactcggtaggtggttaccttcatcacccacgtgtctgtcacaatcacacgggcacctggtgcaccggtggcaaacttgtcaatccgccggaactcagtgttgacagaggaggcaacagcctgccagccagactgtgggagggcgtagagggccagggtgcgcgccagtgggtggcaggcccaccggtcacgggaccagtagtagatcaggatgcaggcgatggaggggagggtcacggccagcagcaggaagagccgccaggcctcaggggcctggctgagggcgtggagccgcttttctgaagccgcaaggcacatgcccacatagtagcctgcaaaggacagggtgagcctcaggggaaagtgagtggcaggccgctgtccaccccccgacagccctggacctggccctctgcccgggttccagggtcagctcccagggtaattgggctttacccactctgcacttccccagccggccactctctccctgcctgtggcaaaggcaggatatattagcggaaaaggtttttaatttgctgctttagtttcacacaatacgtaagtgttgaaaaaactacaaaagcctagaaagggaaaaataaacacaatcaggtgtcacctcaggcagagctgacccctggcctgccagggcagctgcctggacaggatctcagtctctcaatctcacccgctctgaggaggctgatcaaatgtggtgcatcccagagctgaaaagttatgtgcgagaaaggaagcaagtctcaaagaatgatgggacatgtccagaggacacggagccagcttcagggccctgctggccagatcgaggacaatttgaaggtccaaataagccatggagatggtgaggagttgcaccagcaggttccagttggcaaaaagtaatagtccacatttggagttggcccagtcactgcatttcaaggtaacatgacatataacaataggtaactaggggccgggtgcagtggctcacacctgtaatcccagcactttgggaagccgaggcggacggatcacgaggtcagatcgagaccatcctggctaacacggtgaaaccccatctccactaaaaaatacaaaaaattagccgggcgtggtggcgggcgcctgtagtcccagctactcaggaggccgaagttgcagtgagccgagatcatgccactgcactccagcctgggtgacagagcgaggctccgtctcaaaaagtaaaaataaaaataaaacaggtaactaatacctaataaagcttgaaaactttcaaactaagttaaaaataaaaagagcttgacatccgactgtgaggccagctgtgctgtctgctccaggtgtggctgccacaattcacttgtggtccctcataggcctctggggagggtgcagctggaagggctacagaaacccacccagtagccctagaaagtggcctggtcagggccccagccccactcagccccatccatctctcaagtgggcccccagcccaccctctccatgaggcaggcctgggcgcctccacccgacacctgcctccagttcttctgggcccaggcagctgcatcctcaaaccaggatgtggagggtcacccctcttgtatccccagagtggcaaacctggccagccactggccatctgtcctcccagggctgcgtctgcccccgtgtcctccagaggtacccccttgaaatccccctccagccactgcacaccccacctcccacctgtccgtcatccaatcagctgagagagggaccttccagagccccagctagcacctggggcccagcccagcacccccctggacaactctgagcgtcccacctgcactgcacagaggccctccccagcctctgcccctgtggcgcccccaaactggaactgcctccaaatccgcctgttctctccacacccaccttccaaggcctagtgcagtgccaccctccacacagcccctccgaccccttccgttggactcaatcaacagttgccttctcctggccactgcccccaaccacgacaagcaagggctgcttggccttgcaacccccaggcacgtgacggttcaggacttggtgggccggagcatcccttgcccaaggttctgaacttgggttcccgtcacctgcaagtcagtgccggcggcgcccctaagcgcgctcagcccacgccgcggtccctctggatgaggaccggcgcctctccccagctgcgcccaggcgctttcggggcctcggggagctggcggaggcctcctcctgacctcccagcaagccctgcgcaggagaggatgcggccggccggcccgagcagcctcaccgagcggcagcagcgagtggcacaacagcgtggcggccgtgcggcgcaagtggaagggcacgaaggcggcgtcctcgctgcccagccagcccgacagcaggttctgcaccgtgagccccgccgcgtggaactcgttgggcgtgaacacgaagcacacggcgaacaccagataggcgagagtgaaggtcacctcggggctgtccatcgcgcagccgccgggaagctgtcgagctaggcccccgccccggcgcgcggacgaggccgcagcgcccagtcccggacctgtcggttgcggcggccgccgcccggccgcccgcggggcactctaggacatggagtcccgccgcccggccgcccgcggggcactctaggacatggagtcccgccgcccggccgcccgcggggcactctaggacatggagtcccgccgcccggccgcccgcggggcactctagggcatggagtcccgccgctcggccgctcgcggggcgctctgggagatgcagtccccgtgcgggtgcggcctctcttctcggccggccctggaggcggcaccgcacctgtgcattgagcacaggtggggaaacttaggcctgagcgaggccctggccatgaagccccgcccagtagcgtcagttgcggaactcgaaattcatggggcgactgcgagcccggggtctcagcttcagacaccctggcgtgccctccactccggaaacggaaccgtcggcgcccgagcggggggtggggggggagggagggcggagccggcgaggcacagcttcccattggacgcccgccctcctgcggtcctgcccccggccgcgcgctgattggccgcgcgaaggcaaccgtcggcgtttgaaactccggcgcgccggcggccatcaagggctagaagcgcgacggcggtagcagctaggcttggcccccggcgtggagcagacgcggacccctccttcctggcggcggcggcgcgggctcagagcccggcaacgggcgggcgggcaggtaggagagcggctacacggcgcggggaggctggggtcctgggggcgcgaggccgtcccgccccgccccgccctcggccctcgccctcccgccccggccgccgctttccccgggaagcgtcccccacggctcctcctggggccgccgccagaacctgtaccgcgccctgtcatgggacccggccctagaccgaccgccgggctgggccccctggatggtggccaggggcggctagagctgggccaagaccgacggcggagcgggcgccccgaggtgctttgctctcctcgaccctctcctgtctctcggtcgcccaccttggctctttgttggctcccagcacgcggaccctcctgttgttctttggtcccttccggcctccgtcctggggccaactccatctaggccgcctgcggcggacacctgggcccctaccgcttccccgcacctgctgcgccgctccaccttccccccgcaccgcatccctcttgtgcaccagagtagcaccaaagcaccagcctggggccggtcccttctctgcccagagcccctcccgggcctccatagtcagtaaaggcccctcctgactaaggctgggtctgctgctctcccgagctcctccaggccgccagaaggcttcctccgagtcactttctccctgagttcgaggcttgcgggtcccccagcgatccagcaccccttcccctgccctgtacccagttattcagggcgaaaacctaagcgtcgtccgtaagtcccatatgtgccagtggccaggcccgggtctggtctggcatctactccttgggctccagaagcctgtggtttccctgcttcccttctgctcttaacctccccacccacacacagcaccacagtgggcttctcaagctgcagcaccgacctgccg

SEQ ID NO: 10363 - DNA, 6000 bp, Homo sapiens
tagaatattctctttatatatcattttgccccttgaacaaatatcttacaaggcccaccacaagtaccaaggtttcttgatagttgcgcttccttatattccctaaaatattgctatctgtacttttttcttttgatgtttgacccttttccgtttattctagactctaagttgctaaatggaaaaggtgacatttgttcaatcatccaaagctaaattgtgcttagcacaatttgtgcacagaatttcgtgaataaatcttgttaaattgcttaatcttacatagtaaacacataattgctgattgacttgcctcagtacacagttgtgtgtttaagggaagaaaaactatatagaagaggaaatatttttcaagatgttctttcaattggcagggcaaattgcttgaggcattgactggactatgattcttctatacctgggacaatttattgctattttcagggaaaaagggaaggataatgttatatatagcaaagatttttttaaaactatacagaatcttgctacacctccatgtagtaaatcataataatagtaaaattgtattcctagaaatatagttttcttcaatatcttacatagaaaaatagagacaacattaaaaaggattcctctcatcctccaaaacataccaaaagcaaaaccagtaagctctgtgctaagatattttactaaggctttgaagtaaaccaagaaaatattacattttttattattatgacatctgaaattcacacattcaagttttgacacgatgtgccctaatttattcaagtagcaatactgtgttgatatcaacttgtaaagatgaaaaattaaatgatatggcaagaaagtaatcaacttaaatgaaatattttctgttgcttccctgcttttggaagttgttctgcaagctcttcataatcatcacttatctgcatttcaaagaaagctgaacactgatgttttgttctttattttattaatatgataactaaaatccaaaagccatagaaaaattattacataaaatagcaatatccaaaacaagtatgaaagttttaaaaacttttttgtaaatattttgtaaatttttttctgctgcttttgccttaataatgcttatttactaaagtatagatgatactttagtgcttttatgtttttgaaagcactaaagtttcatctgtaggtttgtaaaaatatactagaaatactaaaaatttgtatagtacgataacattacactgatcaaattgtgtactagtaagcaacagaaactcttatacattactgatataagtgtaaaaacataaaactacataggaatactggcagtatctactaaagttaaacacacccatgcctgtgctatgcttagcaattccccttctagagaaagtcttggacctcaacatcatgatcccaaaatgaatacatgtattcaccacaaaagatgttcaatgatattcataacagtagtaacaaaccctaagaaatacccaaatacccatcaacaggacaatagataagttaattttgatgtattcatataatggcatatgatacaacaatgagaatgaataagctattgctacatgcaacaagatggataaatcatataaacataatgcttataaaaataaagcagactcagagtaattatataaagttctaaaatggaaaagatatacttattatataagtcaggagagtgattacctttggccaaggtagtgccttggaaaggattatggtggaggaagagggtggggtgagtgcttctgtgacagtcacacttctacttgctgaactgtagtctcttcacttgggtgtgttccctttgtaaaactttatctagagggaaatgtattatttgtgcacttttctttgtgtatgttgtatctcaataaaaattttaaaaaaatcttcaaagcctatgacataaaaagtctgtactagtgaattatttacttataaatatctgtggtttctggttgttgttgttgcctccaaattgccctggtaagctgttttgaaatttaaaaatatgttaagaattaatgccaatactttcttttgttttcatcttttttcttgtttcctttgtgctcaatacatcagggctagaattagagaataaagaatcatttccaggaagacatttattttacaaaatatttccagtagagggagcttcctttttttttttttttctataggaaatcctcttttgggggtcatcactaaaagtgaaaatgcttaattttttacatataattaaagttcttcatagagtgataacctactctcatctaagactagtcatggatagagaaaaatttatttgatttatgaatggagaaagaaaaacttgatgaagaatataagttatgaagtaaacttttgtatgttgtatgtcttttcaaagaagtacatttttgggcttctcataaaatttatttctaattaaaattatttaacattaaaaaagataaattcttataatcacaattatccatttgaaatactttttcataacttttaacaaaattggacaaaagtcagagaatctagtgatgaagattatttatctcagaacatgttttaacaaatatcatagtgattgccattatacaaatttaacctcattgaccaaaacattttagtttctgactttagcttcctaaatctaagtatctatcaactaagctaatctgatttctttgaaaaaaatgtattttaccatctaagccattaagaaatatagagaaataatcaatttatattttaacattaagtttgtactcctttacataataatttcagaaatataaaagctccatatacttggctttaattattacaaatcaaatttctgacaataataaagtcacaaaaattactagatcatatcaagatgatttttattgaaaatactttggttaaaaatagttcaacttcttattttgggaaaaaatcaataatttcagaaataataaccatcacagtttctattatatataggcaaatgaaaataatataactttctataaggtagtttgagatacactattggtttttataaggtagcccaaagatgaaaaatcgacatagcaataaagaatatttaaatacttcaagtagaaatcagtatgcatataacttagttactctagttattggacttcaatcctcctttgaaaaccttgcaagccataaaaatggaaatcctatggtaattaattgtaacagtaaaattaaatttatattggtgggtcaaaattctatatgagcagtaccttatttttacacattcattaagaacggggtaaaattatctgatcctttgtctagctctcttatactctttaaattatttttttaagcctaccaaatatgacaggatcatgataagaaaatgacatgtcatagaacaatttcatagtttaatggctttgttataatattactttactcaagaagattattcctgacatagaacatatctaataatctatttatgattttgccttcatgtattacctgagctaggtcattagaaaatagtacttgcaaggcccttattttgattcatttaacttaacctctgaatatagcaacaacatttggagtttctctcatcagtaaatgactatggtctgtatttctgcattaaaaaaagtaatgtctcgtttctaaatactaaatgttttgtaactttcaaaaaaagagtaacacccaaattatataattcacttagaaaacgggaactttaaaagcaatttgagaaggaaaacgtaggcttttaaaataatttttttttctcagctgcaaataacgcaagatgccagttactaaaatgcactaatcaatgaaaaagcaaatgagtaggtctcagtagatagactgctaaataatttagacagaaaacaatacgattaaattgattgtttcaacaagtcaatatagaattgcaaatttcccggtctcatcaataacaagtggttgcaacgtaatgcacaggcttaatgagttctccgactgttaaatccaagcgaactcacctgagtaacagtgctgcttcccagaagtaaaatcccgaaactaatgtccgaaagtgtctcacgtgggccatgatacggagagatattcacgatcctgaaaatagtcttatccaaggcatggggaaccagaaagacagaatgaaaatgtacaatctaaccccgcatggtgttggtgtagactgatgcttgggaagcttcagcaccttagacagctccccgcagtatgcggaccccttctcagcattgagcagaagtggagagtcacagtgttataaatgtgcaggtgatttttacagtgaaattacaaaaatgagtgagatgaaatgtctgaagtgcctaggtgctgggcaacagttctctaaagctccagcagcaaaggaagaatgttcgttcttccctgactgagacccaggattggaggaagaagagcagcaacagccggaaagaggacgcctctccacctgctccaagcgccgcccgccggaatccagctctccaccttgggttaaaacccgagacccggagcgcggcaaagggaagcgggggtggggccggacaacccggtcctgtcgaccaatcacgaccgcacagcgggacggagtgacaggccacttacgacggtaggcggggcttagcgcttcaccctttaacaaaacccaaacaaaccaaacggcgactggagcgaggtgggcggaaaaagccacctgggaaagtcagcggttttgtggattaggtagtgtaaccccgcaggagggaccctttagtattcccttccgggaaaaggcacactttaggtcttctcggatgtgacactgtctgttacactctacaccgaaatacaagagtcagcagtaaacccagaccctggcggagggctggggaagagaagacaatgtggtgcgtgaacgcccgtggaacggaagaaccagctgcttctagaatcctctcaagcctggccagcttctggccaggaagcgttgttgactggatttaagttgggtttccttaagtaatagtaagggttctaaaaagatgaaggtgtgaagtctaaagagatggctgctagagacgcaaggcttcccaccattttttttttttttggtctttcccgttttacatcttcacagtaagtttaagtgagaagaacagctagatcacatggtactataaggtccatcttttctccgtcatgtcagctttctgtccttctctttctctattcttttccccctctccttctctgtccctgttttcctcccctcccacatttatttactttgggttttggatggaagactggaaaagaaaagtgtgtgtgtgtgtgtgtgtgtgtgtgtgtgtgtgttgtgttgtttatgtatttcaaagtaatagaagttttttaaaaattaaaacttctttgatctttatagtggctcttatttactatcagccatgatcaaatgttcattccttgaatcttagattttccccaaaacttcctcagatatttattctgaaatccctactttcatctcttaacttagtctaatgacatgtcaaaaatgattcctcatcttgacacgttggttattcctgaaattctctgtttaactggaaagcataagtcaccaccttccaaccctctcatatgaaaaatctctctctctacactttagtaaaaaagttttatttacattcagtgacaataaagagtttcctggatttatttctagatgtttttattatacttgtctcttttcacatagtggttttctgatttaaatcataaactgccagaagtttcataagggacaccattgattctgcccaggaatatttgtacctggagaagattcataccatttttatcaacttaattattcacgatgaatcttttgaaatctcactaagcacaaaagctttttagttggcgattctttgaata

SEQ ID NO: 10364 - DNA, 6000 bp, Homo sapiens; identical to SEQ ID NO: 1118

SEQ ID NO: 10365 - DNA, 6000 bp, Homo sapiens
attttcttagagtctgttaacagaaagagatctttaggctgggcatggtggctcatgcctgtaatcccagcactttgggaagtctagatgggaggatcacttgaagccaggagtttgagatcagtctctacaaatttttttttaaaagttagctgggtatggtgtcacacacctatagtcccagctactcaggaagccatggtgggaagactgcttgagcccaggagttcaaggctgcagtgagctatgatggcaacactgtactccagcttgggtgacagagtgagattctgtctctaaaataaataaataaataaacaaacagacaaaaagttttaagaagagatctagagttggaattagcaaaaataaaatggacttcatttaatacatgtctaatgaatacctgtaacttgcctatactgttctaggctcttattatacaacgtgaacaagagacagaaaaaactgccaccctcacaaagctttcacagaattggtagaaaatgtacctacttaacctttctgaatcttcatttcatctgtaaaggtagggatccaaactatgtgtttttcaaactgtgcttaaaaacaactgaacttctacttctattttaaccgcaaccactttgcttttttctgatttctctatcagggatctatatacaatatcctttggaaaaacaaatcttaaaaaacgtttgtgggccaggcacggtggctcacgtctgtaatccgagcactctgggaggccgaggcaggtggatcacaaggtcaggagatggagaccatcctggccaacatggtgaaactccatctctactaaaaatacaaaaattacccaggagtggtggtgtgcgcctgtaggcccagctactcagcaggctgaggcaggagaatcgcttgaacccaggaggtggaggttgcagtgagctgagatcgtgccactgcactccagcctgggcgacacagcgagactccgtctcaaacaaacaaaaaaagtttgccatttgctaaccacttgtaaaagaaaaaacagggcccagcccagtggctcacacctataatcgcaagactttggtaggtctagccaggacgatcacttgaggccaggagttagagaacagcctgggcaacatggtgagactcagtctctacaaaaataaaaataaaaataattagccaggagtggtagtgcatgcctatagtcctagctacttgggaagctgaggcaggaggatcacttgagcccaggaggttgaggctgcagttagctatgatggagtcactgactccagcctgggtggcagagtgacaccctgtctctaaaacaaacaataaaaaacaaaaaacttctttcactctactctcattctgcacagaccacttctgtgaccagatgtgtgaatttttgtttttatttttccccaacagacaccaactgggggtcctccaactcaattcaattctgacactacctacctgaagttagactcggatcccacagattaagggttcagtcccacaagatggctccccacttcagatgcctatcataagtatcacaagtagcaggttgccatctgtacttctgaggaaccagttacaaactggagtttctactaccccctccttaggttcaattactttggtagaagggcttgtggaagtcaggaaaacatttaaatttattgtttattataaaggatattacaaaggatacagatgaacagccaaatgaaagagatgtacagggcaaaggatgggggcaggtgccgccaccctcccagcatctccacatgttcagcaacccagaaggtcaccaaatcttactgttccagagtttttataaagcttcatctccagcctatccactccccttcaaaggggatgatgggtggggactcaaagtcccaactctctaattacttggtctttctggttaccagctccagcctgaggctgtctaggagacccatcctaagtcatctcattagcacaaactcaaatgtgatcaaaagactccttatgagtagcaagcgacactcctatcactcaggaaattacaagggttttaggagctgttacaggaacccaggacaaaggccaaacgtatttcatatcacaccacaacactgaagtgagtgatttctaggtaccattccagttttacaattctgtctgttttatgctcatatttctgacctatttctttttcaccatgtctggaattccatagagatatattaaaaggctaactacttttgtaggactgaaaaataaatgagaaacccaaatgactgcttactacatgctgataccacgtagcaaactttttttttttgagattagcaaacaaaacaaaaagagatttaatcttgtttctctacttaaactaatcccttccacaaaaacaaaaatccttctggaggataaggtgtgaggatcacctgagcccagcagaccagcctgggcaacacagggagacctcgtactctacctgaccctagttcttacactttaccataactttcaaatttcctagcataacatttaaggcctttctgcaacctgaccccttttaacctgctcctttcggcttcgatgccttggcttcccatgccacccagcaccctctgcacctcttgactccttccactttccaagcatgccctgcactttcatatttccaaactttagttcatgctgtaacctctgcctagagtcaacctttccctcccaccccaacctgtcgagtccctcaaggctagccagaaccaattcaaacattaccaaatacagggcaagtcaggagagaggcagggactctgtctcatctgctaccctaaccttgagtccccaactggtaagcatgcaataaatgttgaaatgattattgcaacattaaaggaaagtagtgattataaacaagagaactcaagcatcatctatatttggcatcaaaacattgatttgttcttacagattttaacatcctgattacacttggctgagtacatatcctggcattcttgagtgttcacaaaatttataaggctgtaataaacatttgccactttaaaaactgttcactaagatgataatgcatattcagaaaatcaaggaaagacacaatccttgaatcactggtaaacatgagtctacaatgttctaaaagacttgggctcttttactaaattatcgtgttctagttccttcataaagctattttaaaaacaaacaaaaacaagaacttatattaaggttacaagaacaaacactgctcacaaatagtatttttacatttgttcagaacaggtttatatccaaaagcgattatagtaaacaatgactactgagagtacagcatgtaatactgataggtaaggctgatccaaagaatattaaggctaaagtatcactcaacttctgatcctcaggacaaacgatacacttcatgtttgaaaagcatcagttgtaaaacttagatgttgattaaactaattcataaagtccagcagattttcattaggaaattagataaaacaggtcaatcatctggagagtactaatgcagtttggttctcgtaccaacacaggacagaggtatttttctaaattcagtcaattactttccaaggttctcatctgacatactaagaagtctgtaaggagaattcctccacccttggcccctatccgcgaacattccaaatctcagcattagggaatgcatatccatcattttgcagcctactaaaagcccacgaccttaatatgaaagcggctttcgtgctgcatttggctgctgcctgtatgaaggccctgcctcaaagcagggccaactctggcacgttttttcatctctgaaagtggagctaggaaaaacacccagatctaaagatgttcgtttaaatccgtttacatctgctccctttcaaacactacaagcaaactccaaaagcttgagcagcagccgcagcggcaatgacagttcttgaggccgaactgggtcagggttacagttacacttatatagcatatttacacccttttgtctacaaacttgagtgcaaacttaagtttcctcaaggcagcgtgttcgctgggcctcgggaaccgaagcaattttcctgagacaggaagggcacaatccaccctgctgggtggctgcaccagccttctccggaccacgcactcagcggcctcggcttctggccagctctcgcagccaaggggtcgctcggggcaactcgcccgcgtccaggctaggtaactgggttttactacgtgggctcccagcttttcagtcgcccctactcgcccgaggccgtttcgggcctggggtcgcattacataaacagccacggccccagctttcccaggccggcccccgcccccacgccaggggcgtcccacccccgcgcgccccgcgccgtgccttccctgccccctacccgcacccaacccggaccccgcggcctccgcaccgcgcccgctcccgtccctcgggccgggcctggccccgaacgcccttcccggcccggcccgccccgccccgatgtggccgtgcaggccgcccagccggtgctaggccccgcgctccgcccgggccgcccgcctcaccgttctgctggtgcggcgccgggcccgcacccgggcccgcgggcgctgcggctcctgagacggccgctccgccgaacttgggcgggatccgggcgctggcggccgggtgagaggacccggcgggggccgacatgacggcgctggtggcgacggcggctccgcttcagggaggtgggcggagggaagggaaggcggggccggagaggagagaggaagaggaaggaacgcgcctggcgtcactgagggtgtcacccgggaccgcggctcaggtacccaagcttctccgcgagtccagcgctgccactcggcggccgccgcgggcgcggggatcctgggtcgctccgccttgacccacgcgccccacgccccgggacttacacctggggtcgctccccgcacgcgcgggcctcgcgccggtgccgccgcagcgccccctgcaggccggagccgagctggcccaggcctgagtctggcccggggttccgtggccccagtgccggccccgcggctgctgctccggcccggccaggtgccttcgtgttgaggcgaaaggactgggcctcagtgggtgaagggaccgggtggcccgcttccacctagggcagaggctggatcggccgcggcgaggctgggcccagcattactgggaggggaacttgagagccgcgggttgatgttcggagctcaggcgacgactgaccacccacccttcctcgaagaggaacaatggcttgggtttggtttttaatttttgattcccccacctcccctttcttgattccaaaggaaatatagcattcaagcgccatgtctgttgggaatatataattccttggcaaagaaagaggaaacatttctctgataaacacaagaatctcagtaagaattgcattattgagaacttttcccactgataaagtagggaagaggaaggggaaaatagggtaagggaatgctggaagacaaactttaaactttatctccttttttttttttttttttgtcgattgttggtgcatcctgttggtgttccgagaagttgtggctcagcttgctttgtctacattagtggaatctttaagtctttctggtctgtctcagcatactcactggcaggccctagactacattacccaagtcattttgccgtcttggaatcctgagtatgtcatcactctgtattggagatgagattgctcagaaacactgaattcagaatgggatctagcaagatggtatttctggagcaataagtcatttactgaatgattatgcaaagcataaattgcattgtagtcctagaataatacaaagcttccctttagttgttgccgtaaattaataactggcattttaatgcactaaatgaatttt

SEQ ID NO: 10366 - DNA, 6000 bp, Homo sapiens; identical to SEQ ID NO: 3820

SEQ ID NO: 10367 - DNA, 6000 bp, Homo sapiens
tataaaaagtcctcaggtaattccgatggtccctaccattatcttactgtctactttttcactttatttctctcattgttttttaagaagagaaagtactttaggcatgagaattatttgtctctctgatctaataatattaataataatgaatactttgagttctatatgttcactcacagattatattgtaagttatacacgaatgttatattgtggcaacaaattttcaagctaacgcttgttcaaggaatttagccttatttttctaaaactaaattaaacttctctgtttcccatgctacctgatggcaaaaaacacctttccattcagtttcaacagagaccatgagcaattgatggcaattgcttccacattcgaaaatgagatatggatccgcagtgctaagggaggtgggttgctgcattgggaagtctgaggttgctggagcaaatgatggtgaccatgtccactggatcacttgtggggcagtacacagaggcccaagttagaaaaccagcctgcaggtcagcttaaatgctgcctaagagaacagcctggagagatgaggtgatctcaacagaacagggggctaccaagttccaagggactaaggggccatcaacagccagctagagagatgctttgatagtggtgtctttgaattaactatctcagagtcagctttacacacctgccaaacctggagagcttataagtcaatttgcagcagtatcaatggagtagcaaggccatttctgctattattgcttctctctctccactaccttggaacagccagagccaggctcaaagtggggtgagcggctgggtgagtggttaaggaataagagctctaggcaggaacaaaaaagaatgtaagatgggtctcctctgtcccttttcagtagattttggctatgctttttgagggactgctatcttctggagaaattctgggaatttaaaagaaatttttaaagaaattgactgtgatatagaatcaaacatattaattagtttatgtgtattatgtgtctgtatgtctatggctaacaactggagaacttttacaaaaatttaagtatgactggaaaagtcatggggactgcctgagtttccatttaagaaagttgaaaagagatatcaggccacagaacaggtttcaatgggcagtggggggaatcactaaaattgtgctctgattatatctgacaagccccatttatccactgtattggctatatcaatatgttggctacaaataattcagtgtgcttgtcctcaattctaccatgattgctttgctgtggtgcagtggtgactatctgtcaaggcctgggctgaggagagaggcctctgagcagtttaatgaggcatcatgggggataaaaacaaacacattgctgaatatttcaaatgatcattccaaggctgctatctcattcagtcatcagaagaaaccgatagggtaagtgctattatttttcttttcttacacatgggggaaactgaggcttagagaggtaagattacttgccacaggggaccacacgtaagaggtaaatgaggagaatttaaagccagtctgcctccctcttcagcccattctctgaatatcatagttcagagtagatagtgtagcctccacgaatccctattgtggctatagcaggggacagtgtattgttctttttctaggagacatttttggagtgggggtgggaaggtagtcaacgaaatttactaactcacacaactctccctatctcgtaggcatttctccatgaaaaaaatagctctaaaaacagctagaggagatgtctgcttattataactggcctctgccaaaggcttacttttaattgttatagagccaggtcagttattcctttgactgtggaaataataagatggttataaaatgcagctttggtatggtttccttgcaagaagttcacattttctatcaagaaaataattctgtgtgtatggaagtgtgtgcctaagagtttttgagtgcagataaaattgttttgatgcctgaattctcacaaagtttagccaaaatatccaggtacttccaggctactgtcaatattgggattgctccttctcattcctccatgtggcaggacttttaaagaggaaaaaaggactgagtttagagtgctgaaataacagcccgattataatttttgtcaatttaccacttggacgtttattctctccttccctatatattccaactccttgctctttttgcattgtaaaatatagtatttttaggattatacaccatatgctaatcttttacccactcttcagtatcacaactttctttctctgtggggaggaaaaatccctgtcccctttctgtcttcttgccttttgattctatttgccatagtctaattgacaccccaaggtcatcagcccctgcctttgtgctaggacacgcaaaccacccaggccaatccctaacctgttttttcaaaaaacctccaatcagagagaatccacgacttccttttgtgaactgttgcaccgtgcaattgcacactataaatgtctttccttatctgtgtgtactcttatctcactgttctattttttctcctcatttatattaactctttcttacctttttttctgaacttctaggccttctctttccagaactggtggaagacaaatgaaacggccaagatggtaaggtgagtagttcctgggaacgcttgtgctctaaccccaagttatgtgggatggacactcgaggggtgatggcattcctcattttacaagttacttgcttggctgcggctgctccaccaagatagcaaacattctcgatcttttgaacttcatgagactgacatttctgagtctgtttgcgaacaggacactagagggctcccaggggttaaaaataagtggaaatttatttgaatgaaaactgattctctacggcatttcttttttccgaatttaaaattaaagtttattttgttaactattgtttttaaaagctttgtatctcttaaaaccatgcagcagtcagtttccaagttttgctttgcaatcagtagttttcaagggagcttttaaagctgaactgaaatgtttgaaatgtggaacactcttgaccatgaaatatgttctacttacatgcctcagcctttaaaagttctttgcattagagtcaaggattacattcttcctggagccaagcatggggccagctgtgtaagtaaggttgcttacgagtttcttctttttctttttaatagtgaaaaaacagaactagagatgcttttattttctttcagctgacttcggtggaaagaaaagaaataaaaagcagtcagagttgtgttgtgttgtgtgtgtgtatgtgtgtgagagagagagaaagagagagagagagagaaacagaataaatgcaactgcttccaagatatatggacatttatggctttgtattatactaacaatgtaagctaatggaacatattattaatatgaagtacaatttgtacctttagactaagagaatatgtttctaaattttattgttaatacttgctgcttgtacttagttaattcaggactttaaaaaataaaaatggtataggtatagagtattaaaaaattatctattacttgtcttaagttctttctgaatttcaaaaaggaaaagcccaggtttgtcacattttaacgcttttgcttcagagtcaacttaaatgactctaggtacaagttataaaacactcttggatttttgtggcttgttttcactactttcaagtgactatcaaatctatacatctatctcgtttgcatgcttttaaattttatttttaaaaacatttagtggtgatatttatgaaaggaaatgattactttttttcttgactcttgtagaggaacttaaatggtttgaaattgtgactcagttaactctgtatccattcattcccagaaacaagccgcatttctccttggggagactgataatttaaaaggtttgttgtgtcagaaacattcccagcttcatcaccaaccctttccttccacctctgcccactggagaccacttatatcccgaagcggacgcggcagctgaagtcaggaaaccatgcatcacattagcaggagccaactgcagactttaaactccgttcaacatgtggatgcggcagagaaatgacctgtccagacaagccggggcagctcataaactggttcatctgctccctgtgcgtcccgcgggtgcgtaagctctggagcagccggcgtccaaggacccggagaaaccttctgctgggcactgcgtgtgccatctacttgggcttcctggtgagccaggtggggagggcctctctccagcatggacaggcggctgagaaggggccacatcgcagccgcgacaccgccgagccatccttccctgagatacccctggatggtaccctggcccctccagagtcccagggcaatgggtccactctgcagcccaatgtggtgtacattaccctacgctccaagcgcagcaagccggccaatatccgtggcaccgtgaagcccaagcgcaggaaaaagcatgcagtggcatcggctgccccagggcaggaggctttggtcggaccatcccttcagccgcaggaagcggcaagggaagctgatgctgtagcacctgggtacgctcagggagcaaacctggttaagattggagagcgaccctggaggttggtgcggggtccgggagtgcgagccgggggcccagacttcctgcagcccagctccagggagagcaacattaggatctacagcgagagcgccccctcctggctgagcaaagatgacatccgaagaatgcgactcttggcggacagcgcagtggcagggctccggcctgtgtcctctaggagcggagcccgtttgctggtgctggaggggggcgcacctggcgctgtgctccgctgtggccctagcccctgtgggcttctcaagcagcccttggacatgagtgaggtgtttgccttccacctagacaggatcctggggctcaacaggaccctgccgtctgtgagcaggaaagcagagttcatccaaggtaacagattcacatgcttcgttatttgcagctgttggggattctggttcattttcttttttccctcactctctttttctaaatgatttttctccacccacggttcacatttggacagcagcagcagcagcgtgtctttccatgcgcttggcattctttattttcccagcctgggaggatatgagagttccagggaaatgctgtattggacatgcaagagtaagcccatactgtataatctttgctctccatttccctcgcttcacttcccagtggcttattaaatctaattaaagccaacggcaatttgcatgatgaggagaggaagctaggctggaggcaaagaacttgctgacagtcaggcatactattaaataggttactatgggaggaagtagaagtttttaaaagtaagggggaagcgggttatcgttcttgagcagatggaatcttcttaagccgcgcagagccagaccatgttaggtttaaccccccctttttttttcaatggatttaacctctttatttaacaaataaaaagaatgagcaaaaattggtgatttgttcagtatgtatactaactagctgtgtggttttatcaagcccctgactatgatctattgagtctgtctttcaagattctcccgtcttgggtgacaaacattttggcaggttctaacacatgtagccagttactgcagttgccagcaaaaggactggtctgcggtcatgcccatgccatataaaggatattctctgaatattaaagctattccagggctcgaatacaaagtacagtgagtcagtggcttatgtttgaatgcagaatgatgccagaagttacaactttgaatccagattggcccaagaggctaaaatg

SEQ ID NO: 10368 - DNA, 6000 bp, Homo sapiens
actagccaaccaaattcaacagcatatcaaaaacataatccaccatgatcaagtgggttttatgctagggatgcatgaatggtttaacatatacaagtcaatacatgtgatacatgacgtaaacagaattaaaaacaaaaatcatatgatcatctcaatagatgcaggaaaaacatttgacaaaatccagcatccctttatgattaaaacccttagcaacactggcatagaagggacatacctcaagataataaaagccatctaggacaaacccacagccaacattatattgaatgagaaaaagttgaaagcattctccctgagaactagaacaagacaaggatgtccactttcaccactttcattcaacatagtactggaagtcctagccaaatcaatcaaacaagagaaagaaataaagggcatccaaatcagtaaagaggaagtcaaactgttgttgttcaccagtaatatgattgtatgcctagaaaaccctaaagacatatcaaaaaagctcctagatcagataaatgaattcagtaaagtttcaggatacaaagtcagtgtacacaaatcagtaggactgctatgcaccaataatgggcaagctgagaaacaaatcaagaactcagtcccttttacaacagctgcaaaaacccaaaatacttaggaatatacctaaccaaggaggtgaaagatctctacaaggtaaaacacaaaacactgctgaaagaaatcatctatcacacaaacaaatggaaacacatcccatgctcatggatgggtagaatcaatattatgaaaatgaccacactgccaaaagcaatctacaaattcaatgcaattcccatcaaaataccaccatcattcttcacagaactagaaaaaaactaaaattcatatggaaccaaaaaagagaccacatagccaaagcaagactacgcaacaacaacaacaataaaaaacctggaagcatcacataacctgacttcaaactatgctaaaaagctatagttaccaaaacagcatggtattggtataaaaacaggcacatagaccaatggaacaaaaaagcaaacccagaaataaagccaaatacttatagccaactgatctttgacaaagcaaacaaaaacacaaagtgggaaaaggacaccatattcaacaaatactgctgagataattggcaagccacatgtagaagaatgaaactggatcctcatctttcaccttataaaaacaacctcaagatggattaaagacctaaatataacacctaaaaccataaaagttccagaagataacatcagaaaaactcttcttgacattggctcaggcaaagagttcatgaccaagaacccaaaagcaaatgcagcaaaaccaaaaataaatagatgggacctaattaaactaaaaagtttctgcacagtaaataaatcagcagagtaaacagatgacccacagaataggagaaaatattcacaaattatgcatctgacaaagaactaatatccagaatctacaaggaactcagacaaatcagcaagaaaaaaaaaccaataatcccatcaaaacatgggcaaaggacatgaatagacaagtctcaagatatacaaatagccaacaacatatgaaaaaaatgctcaacatcactaattatcagggaaacacaaattaaaaccactatgagataccactttactcctgcaagaatggccacaattaaaacatcaaaaaataatagatgttggtgtggatgtggtataaagggaacacatttacactgctggtgggaatgtaaactagtacaaccactgtgaaaaacaatatggagtttatttaaagaactaaaagtagaactaccatttgatccagcaatcccactcccgggtatctacccagaggaaaagaagtcattatatgaaaaagacacttgcacatgcatgtttatagcagcacaatttgcaattacaaaaatatggaaccagtctaaatgcccatcgatgaatgagtggataaagaacatttgtgtatatatatatatatatatatatataatatacacacacacacacacacacacactatggaatactactcagccataaaaaatgaatgagacctattgctcagaaaaaaatcgtttttaaaaaatagtactgctcattgacaatgcatctagttacctaagagtagttacctaagagctttgatggaaatgtacaaggaaatctatgctgttttcatgcccgccaatacaacattcattttacaacacatggatcaagaagtaattttgacatccaagtctcattatttataaaatacttttcataaggctacagctgccatagacagtgatttctctgatgtacctgagcaaagtaaattgaaaactttctggaaaggattcaccattttagataccactaagaagtgattcatggaaggaggttaaaaaaaaaacaccaacaataacaggagtgtaaaagaatttgactccaaacctcctgatgacttggaggggttcaagacctcagtggaggaaatagccggagatgtggtggaaatagaatgagaattataattagaagtagagcctgaagatgagactgaattgctgtcatcttatgatgatgtttttaagaaatgaggaagtgcttcttacagatgagcaaataatttcttcagatggaaactactcctggtaaagaagttgtgaacattgttgaaatgacaacaaaggattcagaacatttcataaacttagttaataaagtagtggcacggtttgagaggactgactccagttttgaaagttctactgggggtaaaatgctgtcagacagcatcacatgctacagagaggtcttttgtgaaaggaagagttcatcaatgcacaaaattgattgctgtcttattttaagaaattgccacagccacccaaccttcatcaaccaccagcctgatcagtcagcagccatcaacattgaagcaagaccctacaccaacaaaaagattatgactcattgaaagctcagatgatcattagcattttttggtaataaagtattttcaattaaagtatgtatatctttttttaagacatagtgctattgcacacttaatagaccacagtttagtatcaacataacttttatatgtactggaaaaccaacaaattagtgtgactggccttattgcaatattcttgtattttggtggtctagaatttaatgcacagtattatggaagtatgcttgtatttcatagctgcatgcccttacatttctgtttttctaagctgcagaatgtttcttctaagttgcaaagtttcttcttctttctactggagggaaaacaaggctcatcctcctggcatgcttgcatttggatccattctgatggcatctgctcatgaacacctcccttggtgcttccttgaagatgatcctgtctctttccttcatctcactgtagttgtgtcaggaagaacagagtgagtccaagatggcatagatggtcctattcagagaagagccataaaagaacctacagatttactctcacgactaattttttaaaatatgacttcccttccagttttctaaaaataagattaatcttaagtattctttatgacacatttagacaaagtaacacacgttcattaagacatatgcttcattatcaggtctgccaggtaccttttgattaagtgctaagttggagaagctttaattcccccagtgtttattgaattggtccccactttgtgctctggtgatgaattgtctaaagaactaacttggctgggagtggtggctcatgcctataatcctaatacctcaagaggctgaggcaggagaattgcttgaggtcgggaggttaaggctagcctgggctatgtagcaagactccatatctatgaaaaatttttaaaaagcagtcaggcatggtggtgcatatctatagtcctagctactcagaaggctgaggcaggaggattacctgagtccaggaatttgaagctgcagtgagctgtgattataccactgcactgcaacttaggtgacaaagcaagactctgtctctaaagagagagagaggacttagttttatatcacattatatatgtggctcattctgcctttagtcttgggataactggaaggtacaaactatactttatctacctttgtcccgtcatagtggttctgccactcttgaacatttggcaatgtctcgaaacattttggctgttacagcctggggagggtatctggtgggtagaggacaggcatgtggtagacattctgcatttcctagattgcacaggacagcccgtgcctaacaaagagttatgtagcccaaaatgtcaataatgtaaagactgagaaaacccacttcagcattacaggcagcacggtatacatattaagaaataccaacttaatttttcatagtgcattacagactgaaagcaacaaatttaatcatgtattattttatctttacttttctactagaacaactagctcatgtcataaaactctcataattttggaaaaataagagagaaaagattttaacccctgaattactctgcagatgctgaccagggtgaacagtgctgagtgcttgtcttcatttcattacaccttacttttctttaggcctttgacctggtgtacacatgtatgtgcaagcctaattactttgattttatacttagagatacttttattatgtatattttattctataactattttacagatagttttgaattgctcaaccattgcatattggagaactactcaggagtcctatgttgctggttgtaccatatcatcataacataagtgaaaatttcaaaaatgtatatttttaaagagtacacgataacattaagtagaatcacacctgtaggcaaaatcaattattcatagtagagatgaagaattgagtatctttggctaattactatggaggagctgttctcccagctgtctgaaggtgtctgattccattatttgcctgtgatgactttgaaagctaggtaaacctgtaaaatgcaaaagccatcaataagaagcaaattgatgctagagtatctcctccttatttgactgtctcagaactaaatagagaaagcagtgacataaacaaatgtacaccaccttcctgccccatgcctttattgttagtcttcttccccagaggagtcctgatctaattgaagagcgtgaacaacccaacctgtccaaaactttataacttcattattttttaagtaaataattttttattcctaaaatgctagagtctcacctcattatctattttcttcttgcagtgatacaatttcttcttgggattttcacaaatggcatcattgtggtggtgaatggcattgacttgatcaagcacagaaaaatggctccgctggatctccttctttcttgtctggcagtttctagaatttttctgcagttgttcatcttctacgttaatgtgattgttatcttcttcatagaattcatcatgtgttctgcgaattgtgcaattctcttatttataaatgaattggaactttggcttgccacatggctcggcgttttctattgtgccaaggttgccagcgtccgtcacccactcttcatctggttgaagatgaggatatccaagctggtcccatggatgatcctggggtctctgctatatgtatctatgatttgtgttttccatagcaaatatgcagggtttatggtcccatacttcctaaggaaatttttctcccaaaatgccacaattcaaaaagaagatacactggctatacagattttctcttttgttgctgagttctcagtgccattgcttatcttcctttttgctgttttgctcttgattttctctctggggaggcacacccggcaaatgagaaacacagtggccggcagcagggttcctggcaggggtgcacccatcagcgcgttg

SEQ ID NO: 10369 - DNA, 6000 bp, Homo sapiens
aaatttcaaatacttattttatgcttttgaacaaatgcatgaacttccagggaaagagtagggtcgttttcaatactgatcattgaactttcattggcatgttcttttattcccttcactaacttctgattatgtaaagaagtctcagaatgcagcaatcacatcttgttttctacttgtcttttactcagaatttcccagagaactggaagcttaccaaatactttaaagaatggggagaatgtaacatccacatgcaaatctctttcctaatatatcctcccatgaaagagacttttttttcagtcttcactctctaaggccatccagctctctttttccatactttagagcgattatcagtagagagagaattaatatttttactttgcatctgtattattactattattgtttaatcattattgtgtgtttattatgagccagtgaaatgtgttaaatggtttaatcttcacaagtctattattacactcgttttattactgaggaaataagagggttaattaatttgttcaagtcacacacatagtgaacacatgttatatttttcactctttatgtactgtgcttttagtatgtgtactcactgcactaagtcaaccatacaattctcaaaagcagagattgaagcttccaatgtttgtgttttatcattgaaaacccagtgcaattccaggcctgcaagtgcctgacagggataaaaagcagtgaagaaatgatattattagagaaggtaaatggtgaggattagataagaaaaaagcaaaacacaacaaaaaagtcaagaaaacaatacaaaaacaaaccgtgttgttttaaagaaaaattattttcttggcattttggttgcatttcttgaatcttttcagtgataatcagaagaccacatttcccaaattatgtaaggaaaatttcctataagttgtttctcctagtcatttccaatcaaaattcatagttctgaacaaaacacaattgccctactgctacagtatttggggattgggaagaattaaatttagaataatatttttaacctaacaaaataattgattctaatttcaattacatgaaaaaaaagtaaaaacttttttttcagtaggagcttttagaaacaacttttataatctcataagcaaatattcaactctttactgtatagattctttcttcagtaataaaaacaattcagccgtagtttggggataatggacaaacataccaattactgagaaactccaaccatcagccttcagtaatgatagggcttcaaggttcacagcaaaacttcagcttaaatctttttagtttgtgtccctggtcaaggaattacattgaaatgctgggtgtgtatcaaatttcctgtgaaaatgttaaaaatatttatctttttaaaactattttagagaaatttcacatgatggatgatatatcataccctaaattcataacctgacaagtttatgctggcatctagtaaattcaaaaaggaataaaggcagaatgactagaatttttcttttcaaatgatatcatcaataatatccgttataaagcttgcttttctttaggttaactttagaggccttgaagaataagagctcatctctttatgcaggagctttggtttgcagcatttacttaagaaatatttggtattctgtatctttaagagttaaacatagaagaattggctaagtgaaaatgaagaaacgcaatatcattctgcatatatcatttattatatatcacagtattattagttttaaaaagttaaacataaatatctattagtcacttgcagactatggaaccatagtcagtgctgcatactttcatacttctgtttccctcctagtattcataagtgtgcctttaaaaacttttaaattgtaagaaataaaatgtttgatatattatgtatattattactaagaaaaaacttgaattactttggatttttaaaaactttgataaattctacatcatagcatattgaagcagaataacaaatgctatacctcaggaatattaattccagattttacagcattttaactttcttgatgagaaaaaataaatttgtcagttattaaactatttgggatccaacagatgaaagcagaattctaactaacatatttattgatttatttgtgatttacatatttacatgtgttgtttgacacaattcttaattatgttcttgatatgcatatatttgcttcttaaattttaagtttcctttattttactttgtttatagtctcaactataatttcaaagtttaattttagataattcagcttttaaatattttcccattataatttttggacctctaactctattttaactgtaaatatagttctgtatttgtgaagagactttagaagtggaaatagataccttcacaaatcttaaaaagacttcttcagagtctgtaaacagcattaccatgtatacttatctctttcttttcaatgccatgaatcatcacaaatggcaggctcattgtggtggcatgctgaaatgattgagtgggaactgtgcccagcactgaactataaaaaaaaaaaacaaacaaaaccttatccaaacacactgtcctgtattgtaatgcattggcccaactggattctttttgatgctttggtgattgctcttttgtttgggcttggagaattcagagctatgaaattcagagctcagatttgaacacaatattaagattattgcaatctgtagtgaatctgttcatgttatccagtgtcaactgcttttgagattgcattcctttcacctcaggcatgcaatcaggatgtataagtgaaatgttgtgtggtatgtttactgtagttgcttagaagtcccattctttaccaatgctcaaatgtgattaaatttgtttttcttgttaaaggaaacagcttagaacaaacccttgtaagtatctttattttcagtgatttaacatttccaaatgttaaatcatttggaaaatgcaatactattcgtttctccaacaaaaggtaaatttatgtcagttccaaagttcaggttatgacagcacaaaaccaacacaggtgaaagtgttagcctagctttattaaaatggcattcccagttagaacttgtgaatgacagatacttcaggctttcgaaggaagctaaaacatataataggcctgatatataaggttcagagcaaaagagggcactaaaataaatttttaaagaaaataggaaggagacaaaactcaatactaccttgtcttttaataactgtcttcctctttctaaaagttgttgtatttcctcaatacttgcttcatttctgcataagggtttccagatggcactctaaaacatttgccagaaggtggcgacataaaacctcattgcttagaactgtcccaggtgctgaacccagtttctgagattaagagaggctagccggctagcgaaccgggattccaccaagtttcccccagaggtttgcaggctctggtaagaagtgcaaaaggccatgtgaaatgccaggcttcacttagaacacatatgcaaaatatttccatccctgaatttactagccacaaagctatgggaagtggcagtgtcactgaaattacaagtgtagtagtgatggaaaagtgtgtgtgtgtttagaatatatatcacactgagttttgttcttcatttcgagatgcagttgtttacctctccttgtcctttgacacgtcctttataatttcgttctctcccggttccccaacgttaaaaaaaaagtcacaggcaatattctccctgagggagtaaggctggactgttagatgataacggaggtaccgttttgttgttgttgtcgtcgttgttcgtttgtttttggagacggagtctcgctctgtcgcccaggctggagtgcaatggcgcgagaacggaggtagctttttaaaaaggaagacacactcggtcttcttccatcaattagcaataattgggagactgacccaggactgttcaccttcccattcaggctccctatgcttccttttctcatctcctattgccactctgggatgctgacacgatttaagaatttggcagataatatgaggcaaggagtagttggaattccctcccccaagtttttccaaccccagttttgctgggttggaggcggagtttatttgttacaaccttggtctgaccggcagggatctggtgtgtgtaagtgagttctgagtctctgttgacaaaaagagactcgaatgcaaagacgctgagctagagggagaggagggcggggacccagaggaaagaggcactcctcggggttggggaagtattaggaggggagggttagagtgggagggaaggagcctggctttcgaagcgactcacagagggataaataaagggaagtgaggaggaagagggagactgaaagggaaggcaggtggggagaagggggacgaaagaggcagaagagagagaagagaggaggagagagggggagagagggaaggaaggaaatagggagaggagggtcacagagtgaccgtggaggatggggcttctcggttctagatatttctgggattggagactgtttgctagtggggagactccagctccggcagccagttcgggagcggcaaagtaaaatggacagcgacagacagacgttccagccacctctccgccgccgggagatcctggagctgctttcaggccaactccagtttcccagctggagcttctgaacgcgctggactgcgagagcccagggagcgcctgaaagctgctcctcggagatacccttcgccgaagcagtaagaacttcctgcttgggtctctgcattcccttcctccgaaacttcccaggagaagggcggaagaccccaggggaaggggcgaggcgaatcttcgcgctgctttttcttccctcccccttcccgcgccgggcgcgcaggcatggatgtgctcagccctggtcagggcaacaacaccacatcaccaccggctccctttgagaccggcggcaacactactggtatctccgacgtgaccgtcagctaccaagtgatcacctctctgctgctgggcacgctcatcttctgcgcggtgctgggcaatgcgtgcgtggtggctgccatcgccttggagcgctccctgcagaacgtggccaattatcttattggctctttggcggtcaccgacctcatggtgtcggtgttggtgctgcccatggccgcgctgtatcaggtgctcaacaagtggacactgggccaggtaacctgcgacctgttcatcgccctcgacgtgctgtgctgcacctcatccatcttgcacctgtgcgccatcgcgctggacaggtactgggccatcacggaccccatcgactacgtgaacaagaggacgccccggcgcgccgctgcgctcatctcgctcacttggcttattggcttcctcatctctatcccgcccatgctgggctggcgcaccccggaagaccgctcggaccccgacgcatgcaccattagcaaggatcatggctacactatctattccacctttggagctttctacatcccgctgctgctcatgctggttctctatgggcgcatattccgagctgcgcgcttccgcatccgcaagacggtcaaaaaggtggagaagaccggagcggacacccgccatggagcatctcccgccccgcagcccaagaagagtgtgaatggagagtcggggagcaggaactggaggctgggcgtggagagcaaggctgggggtgctctgtgcgccaatggcgcggtgaggcaaggtgacgatggcgccgccctggaggtgatcgaggtgcaccgagtgggcaactccaaagagcacttgcctctgcccagcgaggctggtcctaccccttgtgcccccgcctctttcgagaggaaaaatgagcgcaacgccgaggcgaagcgcaag

SEQ ID NO: 10370 - DNA, 6000 bp, Homo sapiens
cagttcagagcaagtgtccactaattcccaaaagtctgattatgtactttctcctaagtacagtcaccctggtaaaaggccataggtccctttgggggaggggtggaagaaagactaacagtataaatttttggtagtgtagctgagtttttcctcaaggggcctggccttcccttcatttgaggggttctgggtttgtaaactggccccattctgggaactgattgagggtccatgactatttttatgattcaaggtagacttctgtttgcttgacccaaaactcatccagttgtacagattaagtaagaattgagtagactgccagtctatttcacttctagttgcaccatgatcagctagccaactccataggtctcctattggttctgtttctgtggaaaaccctggtaactataaaggccatggaaaggagaaaaaggcatttattaagtagaaatggtctagttctctaaaaatcaagagaaaaaaagaattttattcaattatacaatttgagagcttaaaaactattttttaccttctggattttgttcagcaacattgttacattttgttggagatagagtcaaatcactgacaatagggcaaccaactaatttcggtataattatgtgtccaagaactaaaacttggtaagaatccaaatctttcagaaattaaaaatcacatgacttcaggcacataaccaaatccaaaaaggcaagtttcaagagcaaaggaggtgagggcttacattgttttgctctgtccttgtccacgttggcatcatcgacggcttgctgtatctcatccagccaaagcactttggaaacactctcagagtcctggggacaatgtcacagaataaaaagaaagaagagtgaatgatgaggaaacagaattaataactgcttttgaggagccatttaatcataattcccacaaattcttaatcagcaactatccagctctgccatatactgtacacactcctaatgaagcagaccccaaacccgaccacttcctccttcttccccaccactctttagtccagccccccatcatctcccaactggacagctgcatcagccccctagcagcttctgctgcatctaagcttgccctcaccacagtggccctctacagagggcccagaggatcccttcaaaatagatagctcagtgcaccactcctctacttaaagcttccccaaaggcttcccccggcagttagaaggaaacacagggtgccttctcagggatggcggggctccaacggcatggccctgcctactgcctctctggctgcacctcacacccgtttacttcccccttcctgttctagaccttcacacgagtctctttcagaccacaatactctaccctcactgtgtggctgttggctttttcttaccattcaggtctcaactcaaatgctacctactccaaaaagtcttcccgggctaccctagtcaaacactctctccctcaatcaattattgtggttcccaaactaagtgtcaaggtgtcccagggtaccatgggatatttttaatttgagagaaacacagggatcgtcgatatttatcagacacagagacaaaaattaaaaacaaacaacaacatggtgattgtcctcaaggacctaacaatgtagtgtaagagacagatgtgtcaagacatatagctgggcatggtggcttacacctgtaatcccagcactttgagaggctgagggtggtggaccacttgaggtcaggagttcgagaccagcctggccaacatggtgaaacctcatctctactaaaaatacaaaaattagccaggagtggtggtgcatgcctgtagtcccagctacttgggaggaaggcgggaggattgcttgaacctggtgggtggaggttgcagtaagccaaggtcaggccactgaactccagccttgggacagagtgagactctgtctcacaaaaaaaaaaaaaaaaaaagaaaagaagaaaaaaaagaaaaagaattataatacaatgtgatcagggcaatatatactgcagacacatgatccagacataggtgagaaagggttaacctatggtaaaggtgtcaagttgcagggggagcaaagactaagtagttaaagatagctttagaaaggaagcaacagcagcaatgaaaatgtattgcattattcctattataggtaaatattcctatttaactttgggttgattctgatggtcctgctacaaaagcagccctgacagatattaagtggaacttccaggtagcaattgtgttttataaaatcttttctgagatggcaagtaaataattatcagcagagatattttcaggaaacatgtgacatttaacaaatgggaacattttacctatgtgtaggaataagtgtcgtgttctaaatcctaagtcaagactgtgatgaatgaaaggtaatggatctggcaccgactccgtcatttaaaacttaagatggatgggggcaggaaggagaggaaatagtcactggttcctctggcaggcttctaacactattttcctcagaggttaacgtgagataatgcatgtggaaagggctctgaaaatgagataaactatctgttatttcatcgtgcaacatctgggctaaaggagacctctggggaagtgttggtgcctgcttccacaatcacctctagctatgcggcagactacaagggaagcatcagcaagattttccatttctttcaagaatggatgggggaggctcaaacaggaagccgggtggaaaggggaagactagaggaggaaaaaaagagacagggaagcaggagctaatttttctctgtttacaagatctaagagaacccaacactccccagctataacctaaaaactaagctctatgagttcatttatgtgtctcagttcttttgaagggtatttgccttccttcataacttatcactgtagaagatacaccacacagatttctacccagatgagaaggcagtaacaatcttacttcaaagcttaaagtattagtcttataggccaaactgaagagagaaattacaaatcagatgaatttaagtcaacggtttaaattatgaaacattgaactaacgattactagagttaaatgtaaaaccaaaagtaaaagctgaatcttatcaatgtaaagtctgctttttcttatttattttatttttgagatggagtgttgctctgtcacccaggcttgctcactgcaacctccgcctctcagggtcaagctattctcctgcctcagcctcccaagtagctgggataacaggcgcccgccaccacgctcagctaatttttgcatttttagtagagatggggtttcaccatgttggtcaggctggtctcaaactcctgacctcaagtgatccccccacctcagccttacaaagtgctgggattacaggcatgagccactgtgcccagccaagtctgctttttcagttgttcaccagaagactgaaaataatagtatatttatgggacggccacacctccacttcagttaaacagccaggttcaacataagagttacaaatgaattaaatgaccagaaactaggccatgtgcaaatcaagtcataaattcctgaatttagataactcccagaaaagttctaatgaaacaaaaaaaacctttgtcaatattttaggttttatatttctgcaatataataacattctatctcagtttgtataaccatatattatgtagttgaagtattaaacactgacctttgtaaaaatcttggtctaatgtaatttaatcaagatgtgaaaggtttccgcagatcaatttcttcctagcatatccctagcctttaagtctcatgtgaaatttgtattttctgattcttgctgcattttgtaaagagcaggctgtgggatggtcaggcttcaagtttaagttttattaactacagaaaaatgtgttataatgcatttttttactgtatattaagtcatactctacagaatataacaattcataaaagcttatatgttgtacaacaatgtgaatgtatttaacattactgaactgtacacttaatactggttaagatagtaaattttatgttacgtatattttaccactattaaaaatatcttattgtagacttattcaccaacactcatggaataaagggagtcctcattttcatgatgtgctatgattttagtttaactgaacagcgttgtttgggaggttcctccagttatctgaccctaagggttattgaatggctcaaaacacatcaagataaggcaaaaaaaaaaaaaaaagcctgaacaaacgccatcctcacccggcgaagaaaaaccaccaccactcaaaagccaggttctggccaggcactgacgacaaactgaaatcaatattacattgatggaaaattttcaaagtgattcaccgctcaatttgaatttcttaaaagtttgttttccatgattaatttataattatgtaaagtgtttaaggattaagatttgaaatagctgggaagataaaggaaaggataatttattaagtagaaattacactctggaactgcatttttaaaacggataagaaatgaaatgtgggacagattcaaaacttactgctgttcaacatctgtttttggcttagttctgtaaaggcctgtgtaatttctgccattctttaaaagcaaatctactaggggagaattacagcacctattcagaatagattgttgggggtgggtaagagttaaatgcctttctccagggataacgtaacacgttcagaggcttggcctgagtcatgcttactgaagcatcgagtggattacatcctttccctgcggaggaccagggcaagtttcctgcctgcacggcacaggagagcaaacttctacagacagaccaaggcttccatttgctgctgacacatggaactgaggtgaaattgtgctccatgattttacagatttcataacgtttaagagacgggactcaggtcatcaaaatgaaagccctcatctttgcagctgctggcctcctgcttctgttgcccactttttgtcagagtggtaagcaattttctcagggggtaggatggggatgtgggtttctgttacaaattaagagtcaactgaacctaggtttctttgcatctcacacaaactgtaaaccccaaaggcagtttgatctttattattaaaaggtagaatcatggaaatgaacatctatagttcattcactctattcaaacctggtcatagactaagtgttccctcctgatgtttaaaaatgtgtggcatattcaagattttagatgtctacgattaagtcagggagcaattttgaaagtcgtttttgtgtttgtaagaatttctcttctggttaagcaaagatggcactttttctagggattaaaatatatatcctgtgtttaaacctcttggtgagacataaatgggagaaacaagaatactgccagaaagagaaagtcatctgctttcaatagctggcaatgctaataagtcagtatttccgaaatgaatgaccttttttgactttaagtggggagttctccctaccctcatatatgattttttaattttaaaaataaggtctcccaaatactattattcaactttgaatgtactttccactttacccatcacaatgttagcctgaaacctcctgctttttccaaaaataacaaatttgggataggtctgtacctgttactctttgttaggtcacacactccagtcaacattgttaggagtgggagaggcaaagactggacatagcaagggaaacaaaaacagaaatcaatgctttctaaaggaacattgcttaaattcacatttggaatccctgagcggttgcagagagctctaagagaatctgtggtgattagcagtaagcacatgtgggatttatgaatataataagtgcacgctctttctgggagtagatgggccaatatg

SEQ ID NO: 10371 - DNA, 6000 bp, Homo sapiens
ttccagaggtttccatcccaactctgtcatctactacctatatgatctacagacccacaggcaagatactgcatttctttatgcttccatgtcatcatctgtaaattggggtcgtcgtacccatctccaggagttgtcatgaaggtccaagtgcctggaatgcttagctcagtaggtggagcttatgactcactcagtaaatgactgccattgttattaccccttctctggaaataagctacagggtaaactttgcccagccccagtaagaggtcactcttagccctgttttgaccagaagccacttaaaagtctggccacaaacttgctttttctgggttcttttgaagattaagctgaatgaggtcccctgtaacttacatataaagcagaattgtgtgtgtgtgtgtgtgtgtgtgtgtgtgtgtgtacatatatatatatatatatatatatatatatatatatatatatatatatgcctacagctcagatgttcagttgtttgatgactgcttctcaatgtccagagccaacctcctggcaacatcactatgagtggtgtgtgtgtcaggaaagtgacacagctgacgcatttggggttggcagctgctctgtggctacagccttagcttaagtgtggaattagagaaggcttttctgaaagaccatttaaagccagggacactaggcatcagagggacccagcaaattttgtgtctctacgttctgagtctccctttctccctgctcccctcatatcctttctcacccagcactgtcctttcgcttggtccctctaggccacagtctctttcttcataaactatttttttaaatcagtcagaataggctgttgtggctcatgcctgtaatcccagcactttgggaggccgaggtgggtggattgcttttggtcagagtttgagaccagcctggtcaacatggcgaaaccccatctctactaaaaatacaaaaaaattagccaggcatggtggcgggcacctgtagacccagctactcaagaggctgaggttgcagtgagctgagatcgtgccactgcactccagcctgggcgacagagccctcagaaaaaataaaaataaaaataaatttaaaagtctcagaatagaatatccattctgctggaggctactcagcatttcaagagcagggaaatctgctctttaccttttctccatcccaaataactcctttcttgaaaagagcttttattgaggtataatttgcataccataaaatgcaatcatagaacattttcatcaccccaaacatatcctctgtgcctatttgcggtcactcccctttcacacctcgggacccagggaaccactattctacttcctgtttctatagatttgccttttctggacatttcctattaatggaatcttactgtaggtatttttttttttggtctggatgtttttatttagcatagtgctttttttcatccatattgttgaatttatcattcatttttattgctgaataatgttccatggcatgaaggtagccacttgtttatctattgaccagctgataaacatttgggttgtttccagcattttgtggggatgaggttgtttccagtttccatctcaaataattctcaattgtttttaattgttctgctctatccaccccatccatatcatttttccccagaatcccttctatccaacaggagaggttcatatactaggcacctccccaaaataaataaaaataaggaaacctgacaaatgttcaccacatctacaactgaattctatgttttaagtgaatatgctataaacaaagattcaaataacttccacttataatgcaaataaagacttcttttatgtttgctaattacatttatcctttatacggaaataattttaaaatgaagaaaatgtagatacaagccacatataacatccatcagatactcagatatacaagggctaatattcaaagtaaaatgtgaaacttgggtagtatggtctgaatctttatgtgccctccaaaatcacatgttgaaattttcagccgggcgcagtggctcaagccagtaattccagcactttgggaggccgaggcgggcggatcacgagatcaggagatcgagaccatcccggctaacacggtgaaaccccgtctctactaaaaatataaaaaaaaatttagccaggcatggtggcgggcacctgtagtcccagctactcaggaggctgaggcaggagaatggcatgaacccaggaggcagagcttgcagtgagccaagagtgcgctactgcactccagcctggggtgacaaagtgagactgtgtctcaataaataattaatcggtgaactcagatgaagtatatagggcaattctttgtgctcttcttgcattttttctctatacatttgcaattatttttatttttttattttttaagacagagtctctctttgtcacccaggctggaatgcagtgggaccatctcggctcactgcaacctcagcctcccagattcaagcaattctcccgcctcagcctcccgagtagctgagactacaggcatgtgccaccacacctggctaatttttgtattttttagtagcgacggggtttcactatgttggccaggcttgtcttgaactcctgacctcgggtgatccacctgccttggcctcccaaagtgctgggattacaggtgtgagctaccgtgcccagaagcaattatttttaaataaaaagttaaaataaatttcccccaaaagagcggagaaagttcattatccttcagtccaaagactttatctctagctggagcaccaggagatgcttccctgagtcagtaccaatagacttgggaagtaccacatgacagtctttagtttccctcaattgtctattaagaatcaaatttccatggtattaaaggtggcttgaacccatttagctttttatcttatacagcttcaggaggcttgaatatcataatcttgaatatataagccacagtgtgaagcagtatatttgtttcttggttctgaatgaatctcttccacatacatcaagtgaactaccttccttgtagtctacaatctgcaaaacatcactctgctccctcccccattttcttccctgtaagacgttgcgggcctcttcacacccaaaagtgatgcttgttgagactcaaggatatttcatccttaagtagttactgggagttactgtgccttgctggaataaggtgttgccccaatttactgttctataggaacaactacttcccagaggtaaaaggaaggaaagcaaaaggaaatagaaatggaaacaaaggaacccagcaccactgaccactgtcccaatagctatactgatcactacttatttattttctaggacactgaagaattttaaaacgtcagacccttctttacttgcgaaaaacgtgaaagcacagtaccagaatccagagatctgaatgcagcagcatactctcctgtatatcatgctttagcttttctgactagccacactcaatgtagcatgtatcttcatatcaaccccacaaaccccattctctgaacattttgagctcctctaatccccccagagtatccattgcttattttaaaatttcagggctagttctaccaaatcatcttatctgagaatttttttatttctagagacagaggatcactctgtcactcaggttggagtgcagcagcacagtcatagctcactgcaacctcgaactcctgggcttaagcaaccctctcacctcagtctcttaagtagctaggactacaggtgtacaccatcatggctgacttttttttttttcttttttttttttttcttgtttgtttggtagaggtgggggcaggggtctcactttgttgcccaggctggtctcgaacttctggccttaagcaatcctcccgcctccacctccccaaattctgggattacaggcatgagccagtgtgcccagcacaaaatctttaccaactttaaaatataatttaaaaaaatctcttaaatgccttccacatagatattgatttttctttcatttctcttgtcttggtaaatcctctaggaatgctctctgaaaagcagcttaattcatcatgcagttgccttcatcaccatcacttgttgaaaagtcttattagtatgtaaagcagttctaatttggagctgtaaaattgcttctaaaaactcgtaatagaataaactgagagtcatccataattagatttttttaataggacttctaacttgttttcattatccagctgtgtttgaactcagccagctgttgatggaactgaggtggttgtaagggttggggaaaagaagaggaagctcatctctgcagagtgggtaggggaagctttagttctcagtttaaaacagtggttctcaaagtgtggtctcccaacctgcagcatcagagtctcatgggaacttgttagaaatgatttcttgggccctactccagacccactggatccggccatcaggtgaagttcaaagaacttggttcagatgtagtgttcactaaattacagacagcagtcaagattttaggaagagctggttgaaaataattgccttgactggctctagtgaccccccaaggaacacatgccacttacatgtatgttctcttcattcatcatttatgggtatatttgtattactccacagggctgacgatttggtattagacttgctaatgagcagcagccatgtgctcctgctatctgacagtcggtacagtcacaagtatattgtatgcagcagagaagagcttaacagccagcctccttccacattctgctctcaggaaataagcaaggggaggatccagaagtgtcatttgacactgacgacagagtacttatttcctatgcaaaagagcccaggcagaaagacaaacctaaataagaatctaacttctgtaagaagctgtgaagagtgatgctggcagctgcctttgcagactctaactccagcagcatgaatgtgtcctttgctcacctccactttgccggagggtacctgccctctgattcccaggactggagaaccatcatcccggctctcttggtggctgtctgcctggtgggcttcgtgggaaacctgtgtgtgattggcatcctccttcacaatgcttggaaaggaaagccatccatgatccactccctgattctgaatctcagcctggctgatctctccctcctgctgttttctgcacctatccgagctacggcgtactccaaaagtgtttgggatctaggctggtttgtctgcaagtcctctgactggtttatccacacatgcatggcagccaagagcctgacaatcgttgtggtggccaaagtatgcttcatgtatgcaagtgacccagccaagcaagtgagtatccacaactacaccatctggtcagtgctggtggccatctggactgtggctagcctgttacccctgccggaatggttctttagcaccatcaggcatcatgaaggtgtggaaatgtgcctcgtggatgtaccagctgtggctgaagagtttatgtcgatgtttggtaagctctacccactcctggcatttggccttccattattttttgccagcttttatttctggagagcttatgaccaatgtaaaaaacgaggaactaagactcaaaatcttagaaaccagatacgctcaaagcaagtcacagtgatgctgctgagcattgccatcatctctgctctcttgtggctccccgaatgggtagcttggctgtgggtatggcatctgaaggctgcaggcccggccccaccacaaggtttcatagccctgtctcaagtcttgatgttttccatctcttcagcaaatcctctcatttttcttgtgatgtcggaagagttcagggaaggcttgaaaggtgtatggaaatggatgataaccaaaaaacctccaactgtctcag

SEQ ID NO: 10372 - DNA, 6000 bp, Homo sapiens
catggcaggctaggtcttgcctccaaataatattatgcaatggaggattcttactaatagaaaaggagttcagctgctgggcagcctttcaaaactgacaacacctgggctgggtgtggtggctaacccctgtaatcccatcgctttgtgaggtggaggcttgtggatcgcctgagcccaggagttcgagaccagcctgagcaacatggggtaactccatctccacaaaaaaatacaaaaattagccaggcatagtggcacctgcctgtagtcccggcttacttgggaagctgaggttcactggaccccaggaggtggaggttgcagtgagccaagatcgccccactgcactccagtctgggggacagattgggaccctgccacaaaaaaaaagaaaaaaaaaaacactcccagcattcgttaaccaaactttgatttgctcatctgtgaaatgggcatctgactgcctagtaccttcctcataggtttgctgtgagaatttgacagcgtatgcatgttgcagttagcatgatgtctcacataggctgagcattggataaatttcagctattcttactaattcttgtgactctcagcaagccacatagaatctctgtgcccacattctcactcactgaaggaagattacatcaaccatactaaattagtcagcataggctaactgctgaaacaagggacccctcaaatctcagtgcattatttctcattcacttcattgtccagtgagggttgctgggattggaatgaggtccatacaggcactcagaggccaagtcaccttctatctagtggctctgccatatacccgggacctgtattatgttggcagaggacgaacaatagcacaaaggactgggttttatagggacccagcctggaagtggcatatatcaattctacctctattccattggccagaattcagtcacatgagctgcacctaaccacaagaagtcagtttgggaaataatacgcagctatgtgttccagaggaaatggaaacaagatttggtgcaacacagcagactctgtcacacctacctaacctcctcagagggttgctaataaaagcgcatgtgaacgccaagtgtgaaactgctatggaaagtgataaactaacatgagctacaggtgatgctgctgctattgattaagccagggagtttctgtgcatcctccacattgctaaaacatacagcaatttgggtatgagaagaaaccgaaatataatcagaaggtccttcctcctgtaggggagactctttaactagtaaggctttatttctccacttgtatcttcaaaaatgggccactctgggagcggtgactcacgcctgtaatcccagcactttgggaagccgaagggggtggatcacaaggtcaggagttcgagaccagcctggccaatatggtgaaaccccatctctactaaaaatacaaaattagccaggcaaggtggcacatgcctgtaatctcagctactagggaggctgagacaggagaattgcttgaatccaggaggcggaggttgcagtgagccaagttgcaccactgcactccagcctgggcgacagagcgagaatctgtctcaaaaaaaaaaaaaaaaaaggccactgcaggtaaataatctcctttctttgcccattggtccaatccacatgggcgtgtggtgaaactggagggaaaaaaagggagcgagcagaataaaagagcagaaagctattactttgaggagtgtaattgtcagagcaggctgtcagagcagcctgaagcaatcactcagtaggggccagcctccacagcagtaatttatcaccacatgaagatgttggggagttaatcacagcactgacatgtgtcagctccaggcattgggctcagcataaacttcatgcttagaaaatgaaaataattaagagggcacacatttgaaatgtaccactaaaaagggaaggcagtcatcttagggtcaggtgaatgccatgtttgtaatccactaaaccaactggaagagcctgtggagggcaaatgtgtccaagggtactttgctatttgtacctgatagatgcctttcacactgttttgagtctctgcatggcctgtcatgaaagagaaaagcaaacacaatttgcacaggctttgctacatgaatattagtgcttcaggaatgctctaagatcctgccagctgcggctcaggaaggggtccaggccagatctgactcatcctgctgccttcctcctggaaatgatcccctttctcaccccactcctgctggctgagcccaggtcctgtctgtcccatatttcctttgatccaaggaaaactaaaagtggttactagctcccaagcggcctttgtttataaatgggttcccaccttaatatgtttactcaaaaaactcgtcaaataattagctataacagagcaatcaaactgatcaaacagttcttggagtagttcaaaccttcagagagttatttaatgacagttttaaataactgaactggggtcttccagcatagagaagtagggattgtggcagaaactgcgagggagaatttttaaagtgcttagaataaaaatcttttcattgaaaaaaaatgacaagaattgcccacataattatggcaatttttcctttccttttgcaatgcaaattcctggcagagtgtaagagaaactgagctccactgtcccagtttttcaaactaagaaaataaaataatttgctacctaaactttcaacttctacttttgaaagctaaatttaagttttaagaatcgtacaacaaaagagactacagataaacctcattacaattttttagtattgagcattaggttatttattttccttcttcctaaagctactgtagaaagaaaattcaaaggactagtaagaaaaatagctcaattgataacaagtctggtttgtcaatgacatgctaatacctgtaacagttactaattatctcagcagtgtgtctcagtttttatatttaatatattcttcatcattcttaaattaataaatagcaaccaattgttttctcttttacaagcttcatatggaaagaaaattgaaaaaaaaaatttgtattagcagaaagtgaatataagggacttcccaacctcccctccatatatttactgacaagcaactgacatgagtgatagcaaagcaatgtggttagtgaggaatggcgcagagtgtgcagtttccttttttctaatgttgatttgttttctgtgctgacacaatcctagaggttactgttcaaaggaagcatcgacaacagaagtgattagagtactgattaaaagaagatttttaagaaaatgaccaatcaccatcaatcttaatattggctaacaaatgtgtatttttctttctcatattattaagtaaatagtataaacagaataattctttattagtatatccatatagtgccttttgcaagtaaatatgattctggatattttatgacctgtaattacttgaaatcggaaagcccttttagtttctcttattacccatgtgttgctgagactaactgaagaaccagttaggaggtttgttcgttcacgaaataacatttaagaaatgggtacctgcttatcacataaaagaatccagttatttacttaccctgtgaggagacataatatgttagaatgcttgtacactgcagatgggaagaggtttttccaggaatttaaattgtgcaataaggccacacaatcttacttaaaaaaaatggtgaaggggttttaattacaccatgaagttttacaattttttaggtttttagttctggttttagaaaacagagtagaaggattacagagaaaaacttcaccattagacaagaagtcaaaatgattctaagggccgcgcaaacaggcttttccaagaattaatcatgaggtggtgcttggagaattcctttactccagtgactttgaaacccccttctcactctccactagtctttcaaaggattcatggtgaattgggtctaacgagtataacacggccggccgaaggcatgaagctcacgctaccctttcagggcggagaagttcccaggaggaagaatggagaaaaagatcgcagttaggcagtcctcccaacctcaccaaggctccacctctctccaaagccgcaaggctctgccacctgcgccgggagaggctgcaatcactgtctcctcctctttctttctcttttttttttttcttttttgcctggggtgcccgaccaagcgcagcccgcagtctgggcactgccaactgactccaactccttttatggtgagaggatggattcttcgttatttccccgcccaatctggtacccacccacccacccacctaccacgtccgctgggcgcacccaagtctaaccccggggcgcacgcgctagcgcagacaccgtatttcttctcctttctcggccaaccctaggtagaatcctaaaacaactgccctctcttccacgatctagatgttgcggcccgcggacaggaggttcaagaaatagtacactccgagcggcaggcagcgaggcggaaacggtcgccggtttcagtggtggccccactggaagccgagttcaggagcggctaagcggtcgccggggaaagcaccggggcttcccagggtcccctccgagttcccactccgcacctccgagggcgtgaaaaccacgggagccgccccaccccgcgcgcccagccccgccccagcccagacaccgccccccgccagtcttccctgcggcgcccagggaggacgcgctccgcccccttccaatccggccaatgggcgcccgggcagcgcgcggtttgcctccgcctccgccagggaaacttggaggaggagaaaagtttgtacagagggtggaaaggcgagagcggagctccaagcccggcagcccgagaggaagatgaacagccccaggccagagcctctggcagagtggaccccgagccgcccccaggtagccaggagcggcctcagcggcagccgcaaactccagtagccgcccgtgctgcccgtggctggggcggagggcagccagagctggggaccaaggctccgcgccacctgcgcgcacagcctcacacctgaacgctgtcctcccgcagacgagaccggcgggcactgcaaagctgggactcgtctttgaaggaaaaaaaatagcgagtaagaaatccagcaccattcttcactgacccatcccgctgcacctcttgtttcccaagtttttgaaagctggcaactctgacctcggtgtccaaaaatcgacagccactgagaccggctttgagaagccgaagatttggcagtttccagactgagcaggacaaggtgaaagcaggttggaggcgggtccaggacatctgagggctgaccctgggggctcgtgaggctgccaccgctgctgccgctacaggtgagatggcgttgggctgacgttggggtcaacgggtagagaacgcagggatgcggccctcgccgaagagagccaagaagggaagagcgcgctctccaaattgcttttgtaacttgttttcagtgagcattttattgattcagaatctatcgagaatagcactagcgagctacttttcccttgagatgggtcttattcatcttggcaatggagtgagttggattgtggggaggaagaggaatgggaaaatcagtttataaatattaatgtcagcaagagtgtgctgttggcaggacgtatcgcgagcctggagattttggtggccgcagttggtaagtggctacaatccagaaagtaggatcgagttgctccccttgtcttatcagtgtatcgtttctcgggcgcgggtctaacaccttacaagtggtaatttccgctcacggcagctttgtctctcttctaccatccccagacccagccttgcactccaaggctgcgcaccgccagccactatc

SEQ ID NO: 10373 - DNA, 6000 bp, Homo sapiens; identical to SEQ ID NO: 2350

SEQ ID NO: 10374 - DNA, 6000 bp, Homo sapiens
tttctttgggtctagaaggcctttgtgtagatgagcgaccactatgaccaattcactccttgcctaccatccagacaccttagcctcactgccaacaagctaagagatgctggctgagtaagggcctactctggcttataaggacccctgcagctccagtgatttataattctaagtaaactaacactttaaagagatgagtcaagagctgcttgatggaaaatcactccaggcaaaggatactgagtgcaaaggaatgacgggggcatacatggctggagcaggatgatgatatgaatcacaggcgataacatcaaggaggtggtgtgtgtgtgtggatggggaagaggggacaggatgtgtaaacctttgatagattttggttttcactcagagggaagtggaaagcactttagtatttttgttttcttttcctttttttgttcttggagcaaaaaatggagtgttgctcttgttgcccaggctggagtgcaatggtgccatctcggctcaccacaacctccgcctcccaggttcaagtgattgaacagcctcccgagtagctgggattccaggtgcccgacaccacacatggctaaattcttttgtatttttagtagagacagggtttggccatgttggccaggctggtctcaaactcctgatctcaggtgatctgcctgcctcggcctcccaaagtgctaggattacaggcatgagccactgtacccagcctaattttcattttataattttttttttttttgagacagagtcttgctctgttgcccaggctggagtgcagtggcacaatctctggtcactgcaacctccgcctccaggactcaagcgattgtcctgcctcagcctccggagtagctgggattataagcctgtgccaccacgtctggctaatttttagtagagatggggtttcaccatgttggccaggctggtctcgaactcctgacctcaagtgatctgcctgccttggcttcccaaagtgctgggattacaggtgtgagccagtgtgcctggccaaataattttaattttttagagacagggtctcacttggttgctcaggctagagtgcagtggcacaatcacagctcactgcagcctggagctcctgggcttaagtgatccctctgcccagccacctgcatagctgggactataggtgcatacaaccacccctgggcaatttttttgtagaaatagggtctcaatatattgcccaggctgatctcaaactcctaggctcaaccaatccttctgccttggcctcccaaatttctgggattataagcatgagccactgcacctagcctgactccaagacttgatttgagcaattggaaggatggagttgtaatttaaggagagggggaagactgtgaaaagggcagtggaggtgtaatgaatcaggaagttagttttggacttatgcttgatatgcctgtagaaacatccaaggggggattttgaatagctagatgaatatgctatatgtctggattggggaaatcaggagtagaaatagaaatttgggagctgtcaacatatagatcgtatttaaaaccatgggagtgaatgaggtcaccaaaggaatgagtgtatactttgagaagaaaagaagtctgctgggcgcagtggctcatgcctgtaatcccaacagtttgggaatccaaggtgggaggattgcttgagcccaggtgttcaagaccagcctgggcaacatagtgagaacctgtctctacaagaaataaaaaagtattagccaggcctggtggtgtgtgcctgtagtcccagctactcagggcctgaggtgagaggattgcttaagcctgggaggttgaggctgcagtgagccatgatcgtgccactgcactccagcctgggcagcagagtaaaatcctgtctcaaaaaaaaaaaaaagaaaagaagtccaaagactaagctaggggcactcactccagaatatagtggtcaggagggtaggtgggaactagcaaagaacccacttctgagttgctaatgcgacagatggagaatcaagagaagagtgggcctggaagccaagtgaatagagcattccagaaagagggagaaatcaatcgtgtccaattctacagctaggctgagtaactgagaaaggactgaaagaggaccataggacttaccatgtggatttcattactaaccttgtccagagtgagtgctcaatgaatcagtgaataaatgagtgtaactttctccaactatatttgattaggacccagtaacttgggactttgtttctccaggaagagtttgacaaattatttgaatgaaataccttttccctcaatgtctaaactcctctttggaattgtaggtggtggaagattgcagaaggttcctaatctctggaagccaggcagtctagttgcctgtggtcatttctttgtactgttccacacagccatacaatactccaatcccttcagggcgaaggagtcatcaacacctgaaaaacaaatactatactcccaaaattacagaaaaacacctgcaaactgactcaagtgagtttagttcatttagtcaggctgggggaagaaaccacatttttgagataattaactcatagcattgttcaataaagtcttttattggaaattgtgatgattcaaggcatattcccataaaatacagtgaaaatttaaatcgaaagcagctggaccctgatgtattgttctctgaaagaggaagattccaccttaaaggcagtcattctatagcagttcccatttcttaggtgcttactatataccagaaacggtactaagaagtgctttatggacatttagcaaagtgaatcctcacaaccaccctacgagagaggtactagtatcattcccagatgatagatgtaatattaataagctacagatgaggaaatggatgcttgaaaagtttgaagggacatcttaggaatcagttatctcccctggggagggaccttcaggaatggcctgatccctatcaggagagctgtccgctgttcaggatgtcaaaggttcctgttctgcttctagaagtcagcttttcctgggaggaaaagtgggcatgggctgaggtgagagctggggtgcaggtggagtatgaagactcctcagagaaaggaaataaacaaaaaatatttattgagcttctaccatgtatcaaacccagtcactagtcactattttatcctcagacagacacctataaacctttaaaccacgtgtgtgtgtatatatatatatattataagaaagcttagagaggataagtaaacttgggatcacacagatgtcaacaaggggagaagcctgtccgggtgtggtggctcattcctgtaatcccagcactttgggaggctgagtggggaggatcacatgaagccaggagttccagaccagactggacaagatagggagaccccacttctattttctaatagaaattaaaataaaaaataaagaaaatttctttatacattgagctgaaattaaaccccactgtggcttccaccaatttttgctctctggagcaactcaaaacacatctaaatcctcttctacaagcgaatcctttaaatatttgaaaatacctatgtctctcttctgtgctcttctggtaccaatagtttaaatgggtaacagtagactttgttttattcaatcttttaaaaagcaaataaaaagtaagacatgctgggtgcggtggctcacgcctgtaatcgcagcactttgggaggcggaggtgggctgatcacgaggtcaggagttcgagactagccagaccaacatggtgaaaccccgcctctactaaaaatacaaaaattagccagatgtggtgcacgcctgtaactccagctactcgggaggctgcggccagagaattgcttgaacccaggagacaaagtttgcagtgagccgagatcacgccactgcactccagcctgggagacagagcgagactccgtctcaaaaacaaaaagtaagacattaccaatatgatgccaaccctcatgcactcatccccaaccccacacttctcttctcccaccccttctatctgcttttgtatttatttagcctatgggatcccaatgcagaggagccctggtggacgcatttatagtgcagcgatgaatagaagacagtgatagtcttatactggagttgaaatgtgataaacatttatacactgtgtttataagtcgtgtaactctggccaatttatctggtctttctaagctcactttcctcgtctgtaaaatgggaagaataatcatacttattgcgctggttgttatggggattaagcaagataattctctaaagctttggcacttggcgctgaaagtagccattccatgtcttctttcccgccccgcctcttgtgctccccaccgctttcgtgatgtccgcagttgcccacctgcctctacaataaaaaacgcatccctcctcctgcagggtccaccgcaccgggaagccctgtctgtatcagttaccaaccacaattgcagtgagtacgaatcgtggctttcccacagtcaggaaaggcaagggagaccgacgacccgcttctctaggagtaagtaaagattaaaggtagttcgcggtatagcctaggcagggattaacccgtggtcccagcgctcctgctatttgcattccaaagcagacacctcatgcgctcaaccccgcccgcaggcggctcccgcagtctaagggacctggcgcgagtccgggaagcggagggcgcagctgcgcagggaagggggccgggggcgggaccagggcgcgcgttccggtcccggggcgtggcctcccgcaggtgagtacgctgctccttcggtttccctgaaacctaacccgccctggggaggcgcgcagcagaggctccgattcggggcaggtgagaggctgactttctctcggtgcgtccagtggagctctgagtttcgaatcggcggcggcggattccccgcgcgcccggcgtcggggcttccaggaggatgcggagccccagcgcggcgtggctgctgggggccgccatcctgctagcagcctctctctcctgcagtggcaccatccaaggtgagaaacctggccaaggagggctcttatctctgaggagctggggtcctgggcacgctgggcagacggtgggatccgggcaggtgtgcgaaggctgttctgctgccggcacccatctctacgaatcccttagcctccccttggtggctttgatgtgaggtctctgcgccaaggaggcacccaggtgggacatgcgggagcagctgaagtcagcggagccgggcagaggcagagatttccccaaagaccccacttcccgtagaggctgtcatgctgggcacctccaggccccagcgtgggttcggggaaagggagggaaggaaggagtagctgtgtctaaagggtacgcagaggacctagtcccctccccgggcttggttgctttgtaaacactaagtcattaagagctttttgccaactccggagacttcctccgctggccccgcggggccggtggggttagcgagctgattgcgcagggcagggcggagtgggtgggaacccgcggcccgggagccttctaggttgttttttgcgtccctctccaactgctggaagcctttcttcgggttctggcccctgcgttcgagacccacccgggtcccgctgctcctggcacccacagtggaaggcccggggtatgaaagtcagggccggtccctgatgggttctggtggtaatgagcgctcaggcccgttgggcgccacgaggatttacgagcggaactttttggaccctgccttatatttgaccagttgaccctctgggcctggggttccgggactttcctagtgtgccacccggagcggccactggctgccacccaggtctgcaggccagaggctggctggcctgggaacag

SEQ ID NO: 10375 - DNA, 6000 bp, Homo sapiens
aacaggcattcgcagaaaaacttgtacacaaatattcataacagaattgttcactataatgaaaacaaccaaaatggaaacagcctaaaatagaaacaacccaaatatccatcagctgatgaatggataaacaaaatttggtgtatccacataatgaaatattatttagccataaataatgaaatactgttacatactacaatgtggatgaaacttaaaaacattattcaaagcaaaagaaaccaaaaacaaaaggctacattatgtgattgcatttctatgaaatgtcaagaataaccaaatccatagagtcaaaggagactagtggtttctaggtgctggaagaggaaaataatgtgtacgggtttattttgggaatgatttaaaagttctggaattagatagtggcagtggttgcacaaacttgtaaatatactaaaaagcactgaattgtatactttaaaattctagattttatgatatataaagtatatctcaatttttaaaatgaagaaataatgaagtgttttcatctatgagaatgacaaacgctgatgatgctcatattgttggggctatggggaaaaagacacatacattgcttgcatcccttgttgagaataactcagtactatatgttaaaatgcattaaaaatgcacgtgctcagcctcagcaattccaatgacaggattttatcataagggaataattgaatgcatgtgctaggatgtaggtgaagagatgttcttcacagaattatttataaagtgaaaatgagaaaaacttttgtctaaaaatagggggctatttaaataattgtaatccattcaacattaaacagataattatatcatattatcactgacatgggaagtgatccaaatacaatcttaggtgaaatgaaagcaggatataaaatgttgtatgcagtgtaatctatttctgtaatatacagatctagtcattatagcctgaaatatatatcactgagtattaacaacaggtttttttgagcagtatgttaagtgttttttgtatgtgaatatgcattgtctaatttttctgcaattaatatgtactgcttatttaattaaaaactactgagttttcaaaacatatatgccaaacttaatatcatctatattgagacaacatttatattgagacaaagtggcattatgcaccccagaaatgatacacttttgacagtattacctatgtaatgttcctgccagaaaagtcaaatccaaatttaattatgtggaaacaaatacaattttaaggatattccgctaaacatgtgtcatggactcttcaaatgtcagcatcccaaaaagaaaaagacaggctgggaggctatttaggtaaaggccactaaataagtattacaatcaaatataattcattatctttgattatgcccagcacattagataaaaataaacctatagaaaaacatttttgtaaaattggttagaaaaaagagaataataacaagcttctagaaagaaaaaaacaatgatcatatctaagcaaaacatgaatcagatggcttcagtcttctcaacacaaacactcagaagccagaaagggaatggagtaatgccttcaaaattcagaaggaaaagattttcaaaaataggattccaaacccagccaaataatcagttaggcaatagggtagaataaagaaattttcagacatgtgggatcccaaatagttaccttctctcaagaagtcactgaaaggtgctttcttcccaagcaagaaaataaaccaggaaagaaaaaaatccattaaatcagaaaacaagagaaccagcatgagataagtgaaaggaatccctaggacgatgctgacgtgagatgccaggatgaccgctggcccagagggcaacatgtccagacagaatctgcatgactcaaataaggagtacaatgaggtctcttaccacttagttctcaggctttgtacaaccttgtaaaccttatgaaatattagatgatgtgttctaccaaaaaggaagaaatcaaggagaaagaccagagatccaagaaacaggaactgcaacccaagagaaaggcagaaagtttcaatgacgacaacaaatggaggtccgcagatggtagttatgcagtaggccttgggagaaattagcccaaataagagaaaaatgaaagtctctggtaaagaggtttccgtgaaaaaaaattggagctgctatattacgttttgaaactgaccttgtggaaattgcttggggggactatttgagggtacaggaagaattagctatgataacaatgaaaagtaagaaaaggcaattattaactttaaaaataacaaaaaataatattcacaatatacaactcaactgtgaatatttttgtttcataataatataaacaccaaatataagtctaacccaaaattacagtattgttctaatggtatgggaaatggaaatagtgacagaggtgcgagagataagtctttaataagaagttaacagataatatatcaatttgttaaatcaatgaatagcattacatatatattatttactattatgaattaagtcaatgccagaagaaagagcaaatagagtctaaattggttccctctagaaagaggggataaagaagtggagatgtataggacagggaactctttatgttatcagccttctagttccatttgactttcaaaactatgtgcattgtataattttaataagaattagtttaggccaggcccagtggctcatgcctgtaatcccaacactttgggaggccaaggtgggcagattcttgagcccaggagtttaaaactagcctgggcaacatggcgaaacttagcctctacaaaaaatacaaaacttagctgggtgtggtggtgtctgcctacagtcccagctagttgggaggctgaggtgagagaatcacctgagcccaggaagtcgaggctgcagtgagctatgatcatgccacttcactccagcctgggcaacagagtgagaccctgtctcaaaaagggaaaaaaaaaaaaaaaaaagaatttgttgaaaatcaatgttttatcagatcttactaaagttctgtgaaatttcactatagtcattttgaaatgctaatatataagagcatttcaacaaatttgagacaaatgatagactatcttgagaaacactgaaatgatactggctaggaaaatcactgaatgatgaacattgctcagagaaggctccctggaagaagtgcattataaactgggatgatgtgtgtgcatagaaaaaggccttggataaaaagttctaaagggagagtatgaaaatcaaaccaggattttagattttccaaggctatcactctagctttcttaaatgtcccaccaggaacacttattcctatgtctccacagagcttccttgggctcctctggacaatactggcatagtataaaaggaattttttcttaggtgatggatttatagtcaaggcaggcatttatgctcgaaggtatctgaaaagcatcgtatatccactaattcatcaactcaacacatacccactgataactacaacctgtcagaccagagcgaggcaccacagagatgatgatgaaaataaccaaggtttctggccaaaggacaacagcttgggaaatgggattcctacagcagctggcaggactatcatggaacccaccaaatcttcctaggccatgaatcttaaagttccaaatgtttcctcagattgggaatgtgaaccctagacaacactcatacctccctggcccccaggccaggaagtacaggaaattctactttcaccatgattaacgtggagggtgcataaaaagacaaatggatgcttccaacagggaaactaaaatgtgtttgtgaggagacaaggctaaaatgaaagcagcaacatttaatctaaaccatttcctgtgacttggatttcttttttaaaaaaattggccgccttatcactttcttagtcaccttttctctaggcttattggaggcgtagcccctcctagcaacttcccatctgctggaaaacagaatcaagagaatgaggagtgtgatgacgcatccttcactggatgaaaatattaggagaaaagcaataaatgcactaccatttgcataaaacctattaatgccctcttcagactaatgaaatgaattttacatcaccaagaaagcagctgtgacccactgctcctagtatttggaacgatctgcaacactgccactcctaaaagcaacatcattgactttagtaccctctaattaaaatactttcattcttggacagagaagacacatcttgatcaaaattcagctaataggtctcctctttgctcaaaacgctgttaggtttcttgtgttcctgtttttctcatgctcgtgcagatccatggcatttcaaacctttaaaataaaaactaatgtcttttctatttttttcctactggcaatcacattggggtggtgggggcgtgtggtacaatctcagtcaagaggtcctctcttgtgtgggtgctggcataacactggccgtatacaatggccaagcaaagcgacattctgtcctgctgtgctttacacgtaaatagagaatggatgaggttctcagcgcccaggggtccgcggcttccgcgagggtagcgtcgggggccgctgcagagattggaagagtacccgccgggaatgggagggaagacgcggggaaggtggagaataggaatcatgtgtgttcctcgagtgtacaacccacatttgagtgacaaatcacgaggacaatcgacaaaaacaactaagcgcaaagccgcccgaatccatctccctctctgtgcgtgtgccttttcaactaactttgggaactcgtatagacccagcgtcgctccccgcgccgcctcgcctccactttggtttcccgcgtcctgcccgccctcttcggtgcctcctcttcctccgggacaaggatggaggatctctttagcccctcaattctgccgccggcgcccaacatttccgtgcccatcttgctgggctggggtctcaacctgaccttggggcaaggagcccctgcctctgggccgcccagccgccgcgtccgcctggtgttcctgggggtcatcctggtggtggcggtggcaggcaacaccacagtgctgtgccgcctgtgcggcggcggcgggccctgggcgggccccaagcgtcgcaagatggacttcctgctggtgcagctggccctggcggacctgtacgcgtgcgggggcacggcgctgtcacagctggcctgggaactgctgggcgagccccgcgcggccacgggggacctggcgtgccgcttcctgcagctgctgcaggcatccgggcggggcgcctcggcccacctcgtggtgctcatcgccctcgagcgccggcgcgcggtgcgtcttccgcacggccggccgctgcccgcgcgtgccctcgccgccctgggctggctgctggcactgctgctggcgctgcccccggccttcgtggtgcgcggggactccccctcgccgctgccgccgccgccgccgccaacgtccctgcagccaggcgcgcccccggccgcccgcgcctggccgggggagcgtcgctgccacgggatcttcgcgcccctgccgcgctggcacctgcaggtctacgcgttctacgaggccgtcgcgggcttcgtcgcgcctgttacggtcctgggcgtcgcttgcggccacctactctccgtctggtggcggcaccggccgcaggcccccgcggctgcagcgccctggtcggcgagcccaggtcgagcccctgcgcccagcgcgctgccccgcgccaaggtgcagagcctgaagatgagcctgctgctggcgctgctgttcgtgggctgcgagctgccctactttgccgcccggctggcggccgcgtggtcgtccgggcccgcgggagactgggagggagagggcctgt

SEQ ID NO: 10376 - DNA, 6000 bp, Homo sapiens
caccatggaagcttactcctattcagacattcattaggtaaatccagatatgaggttttattcctgtttgacaggctgggaacgacaaatcagtgtcttaagggattgacaaaatatgtaattagatgctatcaatcaccataaaagagcctgctttttcttacatcagataaaggtgcgtttagtctactaagaactttccagttcaaatgaagcattaactctctaaggtcatgtgaacagtaagcagtgctactcgaactcctctgctgggaaataaaataacagcattaggcagggaaaacttgtgaggccatgagcagacctggactcctaattttccttaacactttggcctggacacttcttgttttttcacttcagtaacctcatttgcaaacttgggggaaataaattaactgatatattaagctctttcccagtctaactttctctaaacctaaaatcacaaaaggaggtcaggagaaaagactcttagttagctgactacatcttgacatttctaccagcttggtgaagcagcagggaaagagcgtgcatccattcgtcaaggctggagggcaaaggcccagaacttcctaattgatataagcagattctcctttttttattattattatgctttaagttctaggatacatgtgcagaacgtgcaggtctgttacataggtatacatgtgccatggtggtttgctgcacccatcaacctgtcatctactttaagtatttctcctaatgctatccctcccctaggcccccacccccaaacaggccctggtgtatgatgttcctctccctgtgtccatgtgttctcattgttcaactcccacttatgagtgagaacatgaggtgtttggttttctgttcctgtgttagtttgctgagaatgatggtttccagcttcatccatgcccctgcaaaagacatgaagtcatccttttttatggctgcacagtattccatggtgtatatgtgccacattttctttatcaagtctattcttgatgggcatttgggttggttccaagtctttgctattgtgaacagtgctgcaataaacatacatgtccatgtgtctttatagtagaatgatttataatccttagggtatataccaggtaatgggattgctgggtcaaatggtatttcttgttctagatccttgagggattgccacactgtcttccacaatgtttgaactaatttacattcctaccaacagtgtaaaagtgttcctatttctccacatcctttccagcatctgttgtttcctgacttcctgttttttttttgagacggagtctcactgtgtcaccccggatggagtgcagtggcacaatctcggctcactgcaacctccacctcccaggttcaagcgattctcctgtttcagcccccagagtaggtcagactacaggcatgccacaacttctggctaatttttgtatttttattagagacgaagtttcaccatgttggtcaggctgctctcgaagtcctgacctcaggtgatccacccacctcagcctcccaaagtgctaggattacaggcatgagccactgcgcccggtctgtttcctgatgtgttaatgatcgccattgtatctggtgtgagatggtatttcattgtggttttgatttgcatttcactaataaccagtgctgatgatcttttcttcatatgtttgttggctgcattaatgtcttcttttgagaagtgtctgttcatatcctttgcccactttttcatggggctgtttgttttttcttgtaaatttgtttaagttctttgtagattctggatattagccctttgtcagatggatagattgcaaaatttttccccctttctgtaggttgcctgttcaccctgatgatagtttattttgctgtgcagaaactctttagtttaattagatcccatttgtcaattttggcttttgttgccattgcttttgatgttttagtcatgaagtctttgcccatgcctatgtcctggatgttattgcctagattttcttctagggtttttatggttttaggtcttacgtttaagtctttaattcatcttgagttaattcttgtataaggtgtaaggaaggggtccagtttcagttttctgcatatggctagccagtccttcttgatttagtatttgtgggttttaaaaaaggagtttcccaaaatattcagttaaacttttaagtgacttacgtgtatatctaaatacatgatcagttaatatttgtcttaaaggggttttctttgttcttttcttattataggaaggttaaacaatatgcttatttatgccatagcttcacaaacaggaaggaggttttaaatggtttagttccacaatttgagtagatgcatatttaaagaaacgttgttgcataataaatactgcctcttcctaaaatgcatcatgccacagccaattttggaaaacacaaatatgaggtgagtgtattttgaaaactatgtgaatataatagatctttaattcatatttgtggattttatgggaaatacttgttttctaaggcatctgtcttgcaaaaagtcagtttctgctatgaaggatgttaaaggggatatgtaggttaaattctgtttctgagctttgcttccagagtaaacacccaacttacttttgccctaaagtattttattgttctagtagagaagactaacaacatattctaaaccactaagtaatttatgtaaacttcgcttacaaactacacttgtgtgacacttatatgagcaaaagcattttcatatttcttactatatcattcaattcttgcttaccccaatggaagtgactttatgcccctttagagacaatggaaatcaggtacttcgtgatttctcttaaaaaaaaaaaaaatgaactagaaagctccaagtttggtgaatctggaacctgggtattccagttccagttgtagcccttcctccctatccatcactcctgtctgcatgtaattatgcaatacattgaaaagattaaaagatgggtcttggactcaggcagacctgggtcaaatccagattctggcactgcccagccattgcccctgggcaagccattttcctctttgaacctcatttgtgaattaagctaaaaatagtccccacccccatgggactgtgggaaggattaaatagaataatgcatgaaaagcaaatagcagaatggtccataaatgttaaccattgttatgttattatgtaatctacaaagtacgtttagttacacttcatgaaatactttcagtttttcaaagacaccactaatacatgggaaatcaaaccctgaaaattaatttcactttagcagtaaagtcacatgccagatggaaaggatagtatttcatgaacaaagatcttacttttgagatttggtcttacttttttctttttcttaagggagaattatcttgtgttttttgttttgttttgttttgagatggagtcttgttctgtcacccaggctggagcgcagtgacgtgatctcggctcactgcaaccttcacctcccgggttcaagagattctcctgtctcagcctcccgagtagctgggactacaggtacgtgccaccacacctggctaatttttgtatttttagtagagacaagagttacaccatattggccaggatcttttgctttctatagcttcaaaatgttcttaatgttaagacattcttaatactctgaaccatatgaatttgccattttggtaagtcacagacgccagatggtggcaatttcacatggcacaacccgaaagattaacaaactatccagcagatgaaaggattttttttagtttcattgggtttactgaagaaattgtttgaattctcattgcatctccagttcaacagataatgagtgagtgatgccacactctcaagagttaaaaacaaaacaacaaaaaaattaaaacaaaagcacacaactttctctctctgtcccaaaatacatacttgcatacccccgctccagataaaatccaaagggtaaaactgtcttcatgcctgcaaattcctaaggagggcacctaaagtacttgacagcgagtgtgctgaggaaatcagcagctgttgaagtcacctcctgtgctcttgccaaatgtttgaaagggaatacactgggttaccgggtgtatgttgggaggggagcattatcagtgctcgggtgaggcaagttcggagtacccagatggagacatccgtgtctgtgtcgctctggatgcctccaagccagcgtgtgtttactttctgtgtgtgtcaccatgtctttgtgcttctgggtgcttctgtgtttgtttctggccgcgtttctgtgttggacaggggtgactttgtgccggatggcttctgtgtgagagcgcgcgcgagtgtgcatgtcggtgagctgggagggtgtgtctcagtgtctatggctgtggttcggtataagtctgagcatgtctgccagggtgtatttgtgcctgtatgtgcgtgcctcggtgggcactctcgtttccttccgaatgtggggcagtgccggtgtgctgccctctgccttgagacctcaagccgcgcaggcgcccagggcaggcaggtagcggccacagaagagccaaaagctcccgggttggctggtaaggacaccacctccagctttagccctctggggccagccagggtagccgggaagcagtggtggcccgccctccagggagcagttgggccccgcccgggccagccccaggagaaggagggcgaggggaggggagggaaaggggaggagtgcctcgccccttcgcggctgccggcgtgccattggccgaaagttcccgtacgtcacggcgagggcagttcccctaaagtcctgtgcacataacgggcagaacgcactgcgaagcggcttcttcagagcacgggctggaactggcaggcaccgcgagcccctagcacccgacaagctgagtgtgcaggacgagtccccaccacacccacaccacagccgctgaatgaggcttccaggcgtccgctcgcggcccgcagagccccgccgtgggtccgcccgctgaggcgcccccagccagtgcgctcacctgccagactgcgcgccatggggcaacccgggaacggcagcgccttcttgctggcacccaatggaagccatgcgccggaccacgacgtcacgcaggaaagggacgaggtgtgggtggtgggcatgggcatcgtcatgtctctcatcgtcctggccatcgtgtttggcaatgtgctggtcatcacagccattgccaagttcgagcgtctgcagacggtcaccaactacttcatcacttcactggcctgtgctgatctggtcatgggcctggcagtggtgccctttggggccgcccatattcttatgaaaatgtggacttttggcaacttctggtgcgagttttggacttccattgatgtgctgtgcgtcacggccagcattgagaccctgtgcgtgatcgcagtggatcgctactttgccattacttcacctttcaagtaccagagcctgctgaccaagaataaggcccgggtgatcattctgatggtgtggattgtgtcaggccttacctccttcttgcccattcagatgcactggtaccgggccacccaccaggaagccatcaactgctatgccaatgagacctgctgtgacttcttcacgaaccaagcctatgccattgcctcttccatcgtgtccttctacgttcccctggtgatcatggtcttcgtctactccagggtctttcaggaggccaaaaggcagctccagaagattgacaaatctgagggccgcttccatgtccagaaccttagccaggtggagcaggatgggcggacggggcatggactccgcagatcttccaagttctgcttgaaggagcacaaagccctcaagacgttaggcatcatcatgggcacttt

SEQ ID NO: 10377 - DNA, 6000 bp, Homo sapiens
gtgttgtgtatttcagctgtgccacttgttagtcctgtggcctcaggcaaatcgtttaaccactctgggcctcagattcctcatctatcaaatgtcaataataatagtacctacctcataatgttatcattaggattaaatgagataatgtacagaaggcactttgggcccaacgcctggcacctagtaagtgctaactcctaacagatagtattactattactctgtgctgagcactttacacacattttcacatgtcatcctcaccatagccctgtagagctaggaactattctgatcttcatttcacaggtgaggaaactgggcccagagtggttaagtgacttgcccaagaacacacagctaataaattagtggaactgggacataaacccaggtgtgtctgatccaggctcttcatcacttcactctcctgaccagggtcatagtaaacattaaatgacagaagtgcaattagaatccaagttagctctcaactccctcagcagatcaagtgctggcctggaaggcaaggaagactaacctaaggtgctccgctggggaacctttactcccagacagctctccctttccctcccctccctgacctctgccttactaaggagcctggtcacattctgttctctgctgttatttccttcaggctaacattgaaccttctgctgcctttttctttttttaatctcagtctggtgcagagagaaggatgcaagctttggagccagacaacaatgctttgaataccaatgctacttactcactgaatggccttggccatgtcacagaacctctctgaacgtcagtttcctcatttgtaaaatggagagaattcctccgttgcattgttgtgaatttgagtaaatgcacatagattgcctaacacagtgcctggcacatagtaggtactctctgaaaggtgctttagcattatcatcatctcccacagcacctagctcagtgttaggttattgtttgcttggtttcattcatctttggttcacccacggtacttagcatggtgcttacacagagtacatgcatctctatatgcctggtcgaattgaaagctagagagagcaccatgaaaaattgcatgatcacaggtgacagatctcctcccatagatgtcttaagcagatccttgaatctcccatagcttcagtttctctacaggtcaacttcagtggcagcttcccctggagggttcgcagaaatgggagttctgcaacatcagaggtttctaatgcaataagatggataatgaaaagattcttcttccacaagcgtcgagtgagtcagagctctgtgcttgactttgccccagggagtaccgagaaaatgaaatatcgtctgtgttctcatgacacctaaacaaatggtcaagtccatgggtcaaaaatcagccagaggggttaagaggcatctctagcaaaggaaggggaggagcagcaaggaaagcaccattagcaaaggttgctgtgtggggtcctgctacacggctgttattaaggctaatacctgttccccttacagtgagatctttgttttgccttcacgaaacacactggtaaatgacaacaagtctgaaatctgcaaggattttgaacttgtcaatctggctcaataatttcttccacatcctgacacctgaatcaagacataagttctcatctaggtaacaaactattttctttcacaatgaggataaaccatctctgaatctcagatttgctctttttttttcatcctggccttttgccaccacagaaaaatgtctgataggctgagttttcacattgcagctggttactgtgattatgtagacacagcctcagtaaattcaatggtgtgttgctggctgttcaatagctggtgaaattaatgcccagggaagtgggaaatgggccaccacaatcaaaatgtggatttggaacttgctctttattttatcccacccttaccctcccctacacccctgtctttgtgctaatgccagctacgtgccaggttactggtattctcttcctcctccctctccccttataagtaaaccagctcaagagaagccccattatcttagacttaatgatacattgggaatggtgggaactgagttcatgatacctcactctcacccctaccctggaagatgcatgagagaaaggatagcaggtgccttcgggggccactttatccagcaagagaagctgaccacctggagctacgggatctcaaagatcatctaagccaggtcctatctgcagacagactagtctgagccacccaggaccaatgacagcctctccttttaataaagacccctgacagagggctgccaagttcttccagtctcacaccccactgtgtaggtcatgagtggctgcaggagcagaaggagcactgtcctgtaggccagggaaacagagtttcctaaccagctctgctcctgaccatcttgccaagtctctttccctagtgcaccacctccaacacaggaagataagcaaaccaaggttctgagagcttctgaagatctaaatcactataaacttgtgaatctcttattatcaaatcttcaaatacagcttagggcaatttaattataatagaaaataatccattttcaggactgtctctaccacagatttcttaacccgagggaaaccccctgaaattgtgtattttgcacatgtgtggagtctgtgcactttgctgggagtaaattaaaaccttcgatacgtgtatgataaccacctgcctcccttctcaaaaaataaaaataaaaagaggttaagagcttacctctaggttgagaagcttagatgtaagtcatcctgagtgacttctgttttccccacccgtgaatatcaagttataacaagtatcaagagcagaaggtgagaaacccaagatgcaggcttgtgaactggagtaaaagaaggtatcaggctttacttttcaatctccagctgccactgcccattgctctgccatatatttgctagcctatgacctcaggaatcaactgactctctctgaaccactgtttctcatctctcaatgaacaatggttatgcttctctcaaagaattgtaaagtctcaaagaaactgagtaaatgcatggctatcagtaagcgctcaattcatgggagtccctgcccagcaccagtggctcaggccccaaaattaactactcaaaaggcagctccatctataacagtggttccatcccctaccttgccccgggggaaaagtatgacacagtagctgagtacccaactttgggagagaccccacagttgagttcagttcccagcagctctcctccatgcctttgtgaacttgggcgaacagctaaacttccccataatttggtgtctcatccatgaaatagaaatggtgaagagtgtattctttctctcatgagagtcatgagaaaatgcaaaaagaactcagcacactgtctaggacaaaataaatgttggataaatgtgaactaacataaagttctttggctttttctttctttctttcttggcccatactttctcttctaagtaccattcacccacctttgggagtgcgtccctgtgactgaatgtccaacatggatatcagacagaaaggaaaaaactcaacaaataaccaagatcctctacgtcccttccccaggtctctgacctccctcacccccactcccagatagccagctagcttcctccctcaattcccttcatgtttcctcaaatatcacttcagtgacatcccaagcacccacttaacatttcaaatccaccccacaaacaccccactgcatttccccctccttactttattttcagcctaacacctgtcatcacattacacacctcatcatttgcttatttagtatactgtctgtcttctgtcgggagaagctacgctcctatagggcaggagtccgtctattttgttcagttgctatgttcacagcgcccagagccagggcagagagtggagactccgtaagaatcggctgaataaatgagtgaatgcctgagcgaatgaaaggatgaagagaagccagattttactggggccaaagagtttgcacggggcgaggggagccagatgaaggatgagggctggcctcagatccgactcaagtccctcccacctgcccaatcctagaattctctttccctcttttaggtgctggacaagttgcatatcccgttaaatccggggcccactccgggagccccctattaaaggtaagcagcccccaacccacctttgacacggaagagtgactagcggggaaaataaccccagcgggccgcctaggggtgggtgacccgcgatctccacgcccaggtcccgccctcgcggcccctgcccccgccccgccccccgcagagggcgcgccctgggagcggcgggggacgcggctggcttcccggcttgcggggtggcggcgtcggggctgcgggcgccttggctggacccgcattgccccctagtgccgcgcggagtcagggcgccgggctcccccgcctgatgtcaccgccgtgcagtcagcccagaagcggctcattgaaagcagaccctcttcggcgctcgctgggcggaggacgcgccgcggtccgcagacccgagcgagctgggcaccgccgggcgcccccggccctgccgccccctcctccccgccgctcccccgcgagcccggccaggcgcgcctgacgtggaccattaaacttggagctgccgcctcgtcccctctcctcctcctcctccctctgacaggcgagcgagcgactcggtgcaggcaggagacgtgctgccgggctgggctgcccgggggagatgactcctcgccaggagggcgcctctgggaagaagaccacgggggaagcaaagtttcagggcagctgaggagccttcgccgcagcccttccgagcccaatcatccccctggctatggagggcggactctaagatgaatcccgacctggacaccggccacaacacatcagcacctgcccactggggagagttgaaaaatgccaacttcactggccccaaccagacctcgagcaactccacactgccccagctggacatcaccagggccatctctgtgggcctggtgctgggcgccttcatcctctttgccatcgtgggcaacatcctagtcatcttgtctgtggcctgcaaccggcacctgcggacgcccaccaactacttcattgtcaacctggccatggccgacctgctgttgagcttcaccgtcctgcccttctcagcggccctagaggtgctcggctactgggtgctggggcggatcttctgtgacatctgggcagccgtggatgtcctgtgctgcacagcgtccattctgagcctgtgcgccatctccatcgatcgctacatcggggtgcgctactctctgcagtatcccacgctggtcacccggaggaaggccatcttggcgctgctcagtgtctgggtcttgtccaccgtcatctccatcgggcctctccttgggtggaaggagccggcacccaacgatgacaaggagtgcggggtcaccgaagaacccttctatgccctcttctcctctctgggctccttctacatccctctggcggtcattctagtcatgtactgccgtgtctatatagtggccaagagaaccaccaagaacctagaggcaggagtcatgaaggagatgtccaactccaaggagctgaccctgaggatccattccaagaactttcacgaggacacccttagcagtaccaaggccaagggccacaaccccaggagttccatagctgtcaaactttttaagttctccagggaaaagaaagcagctaagacgttgggcattgtggtcggtatgttcatcttgtgctggctacccttcttcatcgctctaccgcttggtaagttggggactagcagcagggggactgggcatttttggaccttgggtt

SEQ ID NO: 10378 - DNA, 6000 bp, Homo sapiens
actttgggaggcagaggcgagcagattacctgagctcaggagtttcagaccagcctgggcaacacggtgaaaccccgtctctactaaaatacaaaagaaattaacggcgtggtggcggacacctgtagtcccagctactcgggaggctgaggcaggagaattgcttgaacccaggaggcagaggttgcagtgagcagagatcacgccattgcattccagccggggcgacagagcaagactctgtctctacaaaaaaaaaaaaaaagaagaagaagaagaagaaaagaaatccagacttccgtttttttacccaaaaaaaaaaaaaaagaagcagcagcaaaagatctaggcacacattcccacaacagaacaataggctggagctgaatgggactgcccctccaccaatgccttcctcttctaagctggtccccacctggtcactcgtttacagcacttgcctggctcctccagacatttgaatcaatgactcctgttgtagatcacagggagggatgttggttgcttgctccttttagaaactgccctcttgaatgaatggacttattcaggattgagtgctgaatcttttcttggtcatatatttttcgttcgcttttttattattaaagtcacacattctggtcaggcacggtggctcacacctgtaatcccagtagtttgggaggccgaggtgggtggatcacttgaggctaggagttcgagaccagcctggccaacatagcgaaaccctgtctctacaaaaaattagctgggtgtggtggtgcacacttgtaatcccagctactcaggaggctgaggcacgagcatcacttgcacctgggaggtggaggttgcagtgagccaagatcttgccactgcactccagcctgagtgacagagtgagactctgtctcaaaaaagtcacacattcttgtggtgtgtatggaaacagagagagaacagacatacaagacacaacaagccaggcatggtggctcacacctgtaatcccagcactttgggaggccaaggcaggtggatcacttgaggtcaggagttcgagactaccctggccaacattgtgaaaccctgtttctactaaaaatacaaaaaattagccggccatggtggcgggtacctataatcccagctactcaggaggctgaggcaggagaatcactcgaacccaggaagcggaggttgcagtgagccaaaattgtgccattgcactccagcctgggcaacaagagtgaaactccatctcaaaaaaagaaaagaaaagaaaagaaaagacacaacaaaagtcttctgccactcccctcgcaaggagtgtccccttccagagatttatctgcacccatacaaacaaaaacatgcacattccatgggaccttcatggggctgggatttttgtcagctatggtcactactgaatccctggcatctagaatagtgcttgtcacataggaggtgattaataagtaactggtgaaagaatgaatatttgttctagaacctggaattgggtcatgaagaatgagtaggagttttccgggaaaggtaaaggcattctcagcagagagaagaggagctgcaatctagggagggatgtgtgagagcagatgaaatacaagtagtttggaatggctgagaagttggagttgggggctgcgggggagctgaagccaaaactcaaagggccttcaattcccaagtaaggaacatggccttttcccagaactcaatgggatatttctaagcatgggagtgaccaatgtggattcctctagctatggtgaggagaagagattggagcggggataatagggagactggattcatcatgatcgggggagagagggtgaggcctaagccaaggaggtcttcacagagaagaaggatctgaagtcccagccagagactaaatcaggaactgatgccctgtgggcagccaggaagggagaagtcgaggatggtgctttgtgggtggaggtactccaccactctcatggcatggagaagactagataagggctaagagatgggaacagccagggctagctgtggtgaagatgtggtcagagctagaactggcatccatggtggagagaagggaagaggtgtctctgcaggagagtatgaacttcaaagggagtcccaggcagagactgtgactgtcctttggcaggaagaagatgagctgtgggcatctgtggtggccaaagcccagttccaggcaccccaagcacactcacagcttagcagatctctaagaggatgtatagccttgggcaactcacttctctctgagcctcagtttcctgatctgtgaaatggtaataataagcaccattcacaaagtggttgtgaggactaggactgtaaagccacctaggaaatggcccagatccatggcacagcagacaggaagtcttcacccatatcacacaccctacaacccccacaggcacattgaaacagtcacacaccttattaagaccaccattggcaatggtccaggcccaaaagcaacctccaccgtaacccctttcacacatcaagtctgactgaatctctctgtctgtgtggcctgaagcaaggtgtctggagagaggtgaggcagtgctgggagaagaagtgtgttaactagggcagtgctagctgctataacaaataggccctaatgtatataatgacctgaaaatttttttgatgtttcttttttttttaactatttttacaaggtttgtgcatctgtcaggaggctcaaaaaattttacttcccacttacataatggtctgaagctggtttccaggttgatgggtggcttgccttcaggcactgatacacagaccctgctttttccttcttgtggttccacaatcccctgggcctcctcatcttctctatccatccagctgaaggagaaagagggagggtgcagggcacacacttacttcttcaaagccttggctcaaaaatgacacatgtcatcccacacattttcaattggcaagaagtggtcacatgtccacatctgactgcaagggaacctgggaaagtaaagttagccacgtgcccaggaaaaaaggacatgaatttgtggtgaagagctattcagtttctgccactgaagagttcaggtcacagccctagaaggggcagtggggcagagggtagaatatggagaagtggctatcaccttgtccctgcagaaagactagctgaggctggacacgatggctcacacttgtaatcccagcactttgggaggctaaggtgggtggattgcttgagcccaggagtttgagaccagtctgggcaacataggagacatctctacaaaaaaaaaaattacacagtcacgttgacatgcacctgtggtcccagctacttggaaggctgaggtgggaggattgcttgagcccaggaggtcagggctgcagtgagcctagatcctgccactacactccagcctgggtgagtaacagagcaggactctgtctcaaaaaaaaaaaaaaaaaagtaaagaaaagaaaagaaagaaaaagagagaaagaggagctcaaatcagaatggtgggcaagttgaggggtcttagtgagcccacgcttagaagaaaatataagtccttgcagtggggacacgcatgtgtgagaaagaggcaaaccaaggaccctagctaaaatttttaaaactggagttcatctggggccaggtcagggccgagggcaggatgcccacccttcagccaacactacatgctatcaaattaagtttatatcccccaaaattcatacgttgaaacactaacctgcaaggtgttatttggagacagggcctttgagaggtaattgggtcatgaaagagaaccccttagggtgggattaggaattagtgcccttataaaaagagacaggagggagctggcttcctttatctccacttgctatcgtgagggcatggcaaaaagacagctgtctgcaaaccaggaagagggccctctctagataccagatgtgccagcggcttgcccttggacatctcagcctccagaagtgtgagaaatacttatttgttgtttaacccacctggtctatggtatttttgctatagcagcctgagttgactaaggcaggatttctgagtgagtatgaatgcgctcaagtctttggccacagatataggtgatccagtcccctacctaggtaggtgagcgtgtgcatcatatctgcttacacatatgtcactggagtgtcggaatacatatgtcctatgttcaggtgtgcctgtcacatgcacctcttcaggggactgtgcatgcacatgactatacacccaagtcccccttgtaagggagagcccatgtgtttatgacacgcatacctgaatgtctgtgtgtgcacagccatgcgggcaagttatccatctgtctgcacacctggccacatgcatggaaggagcctgtaggtgtctggggctagaggtaccctgcatatgtgcagctgccggggagaggggtactgagcacatgtttgtctggcacacagtaggtatgaggtaagtgtgtgccgagtaaagtacacgtgtggatacacaggtcccagtgcacgtgtgtgcatgtccacaggaacgcccccagggtggacaaaggtgcctaggtatgtttactcgtgtgctgtgagcccaggcatgaacttagagctccctggtcctggccagaccaggctgggctccttgctgggcacacggaagcctctgccttgtgttggtgcccgtgcgggatgctgccaggagtgtgttggtggcgtgtgtgtgcgtgaacgtgtgtgtgtgtgcgcgtgtgtgtgtaggaagaggcgttcgctctcttagaccttgcttctttctgtggtttggtttctatagagacacttcctgtggcagagaaaagaggtagtgagcggtgtttcaggatgtgagggcccgcaggagccgagtcaggctctctccactgcctgcccgccaccgtgcaagctctggccggcgctgcccacagtccccatggtgggcagcccccgcggcggggacccctgatcggcagcggcatgccagggaagcccaagcacctgggcgtccccaacgggcgcatggtgagtgtgggctccgggccagggccacgaggagggggtgggcacacccagggtggagcccaggaggcacacccggcagggccaggcaagagcccacgggctgccagcaggcgagagaagttgggtacagacagcagcaggtggtaggacctggtgctctcacccctagacccttccagatggcccagccgggagcctggtacaaccctggcagtgaggccagagcgggcacaggcttctggtccagcccccaccactccctcacctgctgcatctggggctgcatcccagggtctcagggacactcgatgtgctccttgccccctgcccatccccacagtggctcaagcccctacatcccgctcagcctgagtcctcccctcctcaccccctgctccaggtgcccaaggtcatgttagtggcagctcttgctgggtcggtgtcctccagccggagctactccagaggcttcctgccagaactagcattgtttgggcagcccgggatggggcagcagggtcagactaggttgatgcagcttctgcctgttctattcctgagcttccaggaagggctgagcactaagatccccctggctgcagctgccccaccccttaaccctctccctggctgcttagccccagatcagagctgccctcagaggatctggctcttctcattcattcagcagatggggcaagctgtgctgggcctcccttctctccctagggttcccccctcacttggaagagtccctcttaacaacctcaggaaggccagtgtcctggcccaccaccaggccccagcctagtatcacgggccaaagccagtggctctatagagacctgggttccagtcctggtt

SEQ ID NO: 10379 - DNA, 6000 bp, Homo sapiens
cccaccccagcctcccaagtagctgggactacaggtgcacaacaccacgcctggctaatttttgtatttttagtagagacaggttttcaccatgttggccggtctggtctcaaactcctgacctcaggtgatccaccagccttggcctcccaaagtgcagggattacaggcatgagccaccatgccagcccttctccccaccccttgaaagctacttgtggccatgtggtttgctttgaccaatgaaatgtgagcagaagtgacttgtgtcacttttgggtgcgagctttaaggactattgtatgatttaccaaatttcccatttcctttcaccacctgccattgtagaagcacaaactgcaatgaagcccctactacgctggggccctgagtgactactatgtgtagtgccaccccaccacccaacaagctgtgttagacatgtggtgtatgcaggaaatgaacttttgttgctttaggtcacttaaacttgggattgtttgttactgcagcagaacctaatctatccagacccttccttttttttgagacagagtctcactctgtcacccaggctggagtgcaacatctctgcttactgcaacctctacctcctgggttcaaccaattctcctgcctcagcctcctgagtagctaggattaccattcccagctaatctttgtgttttttagtagagatgggctttccccatgttggccaggctggtcttgaactcttgacctcaggtgatccgcccgcctcggcctcccaaagtgctgggattacaggctgagccactgtgcccagcccagacacttcttatgcaagccttacacactgttctgcaccctgattttttccacttaacaatatatcttggagattgtttatatcagtatacaagcacttccacgctttttttttaaatagctacatcgtattcctgggtaggaaaggacattttacttaatcagtctctattaaggacaattagtatgatccatctttttggacaatgctgcaatgaatagccttaaacatttctttttttttttttttttttgagacagagtctcactctgtcatccacgctggagtgcagtggcacaatctccgctcactgcaacctctgcacctggctaagttttggacttttagtagacatggggttttgccatgttggccaggctggtcttgaactcctggtctcaagtgatcctcccgcctctgcctcccaaagtattgggattacaggtgtgagccaccaggccccaccagccttaagcatttcttattttgcttgagtgcaacgatatttgtttcttttgagacagagtcttactctgtcccccaggctagagtgcaatggcacgatctcagttcactgcaacctccgtctcccaggttcaagcgattctcctgcctcagcctctcaagtagctgggattacaggcacccgccaccacacctggtgaatttttttaaattttagtagagataggttttgccatgttggccaggctgttctcagactccttccctcgtgatccacccacctcggcctcccaaggtgctaggattacaggcgtgagccacagcacccgactaagtgcaatgatatttgtaagatagattcctagatgtgcacatctcagatggttggtggcagattttccctcttatttatttatttatttttgagatggagtctcgctctgttgcccaagctggaatgcactggcatgatcttggctcactgcaacctccacctccagggcttaagcgattctcatgcctcagcctcctgagtagctgggactacaggcccgcaccaccatgcccggctaattttttatattttagtagagatggggtttcaccatgttggccagggtggtctcgaactcctgagctcaggtgatcagcctgccttggcctcccaaagttctgggattacaggcatgagccaccatgcttagccaattttcccttttaaaaatatcactttggctgtaggtggaaaatggcttaaagagctggaacgaaatttcctgagtgacatctcctcttcacctcttatctattgccatgtcctgttcatgccagctacatgccaggtctccatctgtccacctgtctgcatgtcctggccactgccccagcatagggcaccatcattcctctctctaaaagttccttctaaaaggtctctcacctgtcttaggatacttggcttgcagacaaggaagccaattctgagtaactaagcagatgaggaatggatggggcagcctggggggcttgctgaatccccctcccccaggaagggcctagcttgactgccttccttgcctcccccaacctccacggcctccacagtgaattctaaatgatccccctgatgtcttgtgccggtcacatgctctagattcaaagacctggttggaaacattggaattgtgctccagctaccagagacctgggagaaaaaattctacctcccttctttgatttcctgagttgaaggcagggtctgcctccacatctcataggattcttctcaaacgggaagggcttcagatgttgggaactaaaacaacaacaagccagccccctcccctcagcttatccttcacagtgcagcccagagctctctatgaaagcaaatctgatcaccctactcaaaacctccgtgagagctccctaccaccttcaagacgaagtccaaaattccttaggtggctctcaaggccctccctgatccaggcccctcctgagacttcagcctcatttcttgcccccatgtcgaccccattgtgtaccactgtgtacctttaaaccccagctggatgcttaggtgctgaacgcaggagcccttcctgacttcctctacggaacttcgaacatgtgatacccctctgtccagaaggctctttccctccctactccagtaacctgcacattttcactgaatcttcagatttcacttggacacaacagccttcactaagtgaggtacctgccctatgttccactgggccctgggtttcccttttttttttttttttttgagacggagtctcactctgttgcccaggctggagtgtattggcacgatctcggcccactgcaagctccacctcccaggttcacaccattctcctgcctcagcctcccaagtagctgggactacaggtgcccgccaccatgcccggctaattttttgtatttttagtagagacggggtttcaccgcattagccaggagggtttccctcttttaaggtacttaactccctagatcctagatccatccacttttctccgtctctattgccaccttgtaggtccaggccaccaccatctctttactggaattctgtaaactcctgactgctctgcttccactcttggccccctaggaatccaccagagtgatatttttaaaatataaatcattctttcaaatgtttcacatttcacttagcaaaaacacttcagcctcctggacgtgttcacagtcctccatgacctagctagtgcctttgctccttctgtctcatctcagaccactgggcccagaagctgcggacgccttctcctattccctgaacacaccacttagtctggcttagagcctctgcgtttgctgttgcttctactggatccgctcaaatgtcacaccctgagagtgtcacacactctcttaacgtccgaagagcagttgtcactctctgaaaccatctatttgtttatttacagaataattacctttatctcaccctgccctcacttgctccctccacttctagcaagtaagcagggagcctggctatcttgctgccatcactgtgttctccagcacctggcttggtgcctggcacagaggtgttgctctgtattttcggatgaatgaatgcataggaactagagaagcctagatggatccggctctgccttactcgcggagtttgggcaagcctgtttcctgctgcgtgaagtagggggtggaggaagcggggtgttaagctacaaggtgttgattagctgtaagatttcagccttgttttctccgtagtcttcgggctggagccagccacttgacgtccggcgcctcagctccccacctgtataatgggtgtgaactcatcccgaggtctaggggtggtagcgctgccttataaggcggcagaggccgagggaaggcgaggccgagtgggtggagagaaatcacaacatccggctgcgggggctgggcggggcgcctgcggcgaccgggcaagaggtcggggaacggctgcgaggccgcagcctcctccctgtctctccctctttcgatgtgcgccctcctgattggggccgacccaagggaatacggccacacaagtggaccaaacaaactcgctgccagcccgcaggaggcccaggatacggagcgcgtccccgacaaaaccctagaaaagccgtctgcgagccaaaggccgccgggccacaccttcaggcgacgacccaatcaaaatgcagtacttgagatgacggacgtcttcttcacccaatcacatattcggcctcctgggcgtgccccagagtacccacctccattgtcccggctgagggctcggccctaattggcagtttggtatcctacgaaagcctagaaattcgaacctaggggctgaaccccgccctcagaccaaccaggaagaggtgacgtgattggtcccgcccccgtacttctttgagcgagtccccagctgggggggcgggggaaaaaatgaagaggaagactaatgggaagacggcgcggggagcttctgcccggtgattggtcaaatgaggtaaacagagggcggggcagggcgggccagcgccggggtggcccccgggagggggcggagagtgcgcggctggctgcggcggccggggaggccggggaggccgcggcgcggtcactgcgagccgagccgagccgcgccgagccgcgccgatcgccatccggcctcggcactcgcgcgcgatcccggccggcggcgcggcccggcgggccaggcggcgccacagcccatggagctcgagaacatcgtagcgaacacggtgctactcaaggcccgggaaggtgaggcggccgggtgggcggccgggcccgggtgcgtggagcgcgagtgcgctgcgtctgagctccgcagggctacccagccgtcggatcccctaggcccgcgggccctgcgccttacaccccgcccagacacgagcctttccggcccgtcgtcttcctcctccgcacctgcccccgggattcggggcccaggaaggggcgggggtcaggccgccgccctcgcggcgggtgggggtgaaggagtgaaagaaggtgagacgaagagggaagggtgggaccggagccccaggagagcctgtctgagaggcaagcctcctccaggggagaggtgtaaagatgccccacgtgccaggggcccagaccccagcaccctagcctaatcccgcgcaaagttggcgataggtaaagctggagaatgaataaacggaccctctgcgtagcacagcccacctgacttggggaaactcctggccacaaatgctacttataggactgccacttgctccgtgcctcaggacactgagggcagaggtgaatggatatttgccctcagggagcccatggtctagtggggctagcggacacagaaagaagtgggagcagagcatgctgctctgtcagtattgtaagctcagaggtctggctggggaaaccagtctggtggaccgagtgtgtgtgtagctcctcgtggctcccaccccagatgttatcaggcacttgctctgtgcaggtcctgggagacacagaaggaccagatcgggtcctcactgccttgtggtcagtctgcccccacctgccacactccacctcagtaacatgatcactgaccacccactctgccccaccttttccagggtgctggggaagcagcagtaaacaagacc

SEQ ID NO: 10380 - DNA, 6000 bp, Homo sapiens
ttctcctgtctacaagtttaccttcctcccatttctcattcctaatgacaagggaaatatccagtgttatctgaagtggtcataaaagacatttttttttctttttatgtgaggaattgaaacttatggctttagattatggggcttaccatcaaggaaagggcgtagcgtggtcagaggacaaaacttcttcctgcatttctcaggaagtctttgattagtgtgtccacctaggagcaatttttttttggggggggtgctgggaaatatacttaagtgattaaatccaagtgtagacatgagaggtttacctaaagccaggtctaattaccatacctgagaatcagggagtatttaaaatttgagaaataattttctatacttgaaagtcacttatgtaggtaggcctcagattataataaataacgtttattgtgctatactatgtggtaggtatgaggttaagtatttttacctatattatatcacttatttcttacaaatggagcaagggagcaagcaagcaagggaggtattattatccctattttatgtatttatgtatttatttttgatttctattcttttggtttttttgttgttttttattgatgtatcatagttgtacatgttttggggtacatgtgatatttttgatacatgtatacaatgtgtaatgatcaaatcagagtaatttggatattcatcacctcgaatatttatcttttctttgtgttgggaacattataatttttctctgctagctattttagaatatataataaattattgttccctatgatttctccattgtacaattgaatactaaaatttattatgtctatctacatatccccagttcaataactataatttctctgctgtgcaatcaaatactagaacttcttccttcgaacgctatatccctaattcaataacaagtaaactgaagctcagcatggtctaggaactttgttacgttaacacagcaagtgagtgttgcagcctggatccaaaaatcaggcctggtagacctcaaagtccagattattgacctttctaccataatgtatggaggtaagtttgtgaatttattcaaaaatcaggcctggtcaacctcaaagtccaaattattaacctttctaccataatgtatggagctaagtttgtgaattttcatagttttaggatttgaagataaaagaggtgaaaatttggaaatggtttctggactttgaattttggcaaacagctatgtgataagtccaccctgcagacccacaacttttggaaataactctactgtgaccttcagtagcagaagctgctcctggggtggtagaacacaaggaaaacacacactagtaaaaatttcatgtgccttctttgttctgtacatgtgtttctcttgattagtatatggtagtatcctcaaatcatagtaacaagtatactttttccagtgaattgcatgtgtatattattgtatagtataaaaggcaatatttccatttattatcatctgtgcttttcaaagaaactctgtgagtccaaaagggcgataatagaagcaactgccctttctctcccccgttaaatgcaacccaatgtcaaagtccgtagcatccccaaatgagtgtgttaaaggtgagaaattcccagagtcaaactcagtagcatccttgaatgagtgtattaaaggtgataaatttattttatttatgttctttttaacctgtgttctcagaaacagagactactgtatttcatcctaccttagtcttgcttagcagtttctcttctcctttgaggctcttttatttttaaatcattgttcatatcttctaatttcccctttctcccattctttccatatttttaatctttttttaactttatctctgttctgctttttctgtatttcaaattgatccatagactttagaaaaatgagttgaatgctggctgtaggctgtcttatccccagcaagaaacatgttgtaaagtcttagtaccttcccactggaagatcattagtcatggctactatgtttttaaatgagaattgttttaattatgcattttaaaattattggaaaacatgagggagaggaatgaaccataagtaataaagattattgacttgaagttaagaccttactatgatctgggattattagtcttacttgtcaatcaagaactatccactttctatttgtttgtgggtatctaatatggttatatacacagaagtaatgataattgatatgaaaaggtctcctcctgttatatcaatttaggtatttttcacacattgtgtacctcattcttctcctattcaattttcactaattcctaaagggtcaggtcaatgtccttggcataacctcctccacctgttcttaatggcaattgtatcttctgccctccaatatctataacacttttttctttaaaactctttgaatgtttatcttaatactcatttgatatatattgtataccacatatgattgtttgttatatgtacaatacatgttttttcaactttttttggttctttccatttacaggaattagagaaagaactaatcagtgtgaaggagaattgtcagtaaaattacaagaaaagattgagatcataattgacctttgaggataataaaatttaaagaccaaaaggatggacttcacagaaacatgaccttaggttgtttttgcagttgtagtaactggttatatgaccaacaaaatatgaagaatgggtaaacaaattctgatagtaatgatcagtcactttgcaaatataaagttactatttactactgtattgtacaggttcaataatctttgtgtacacattttatgtatttattgtcaggctgctatataattcagtatttataatagatactatgtatagcaatctatggttagttttggtcttaaccaggaaaaatcactcttttgagttttgctgtttttaccagattatttttactggatgattgctcatattatttgattattattgcaatttgtctttctggaataggaagcaagaggcctgaattctggttcctattctatcaattgtgtgaattctggaaactcagtttacttttctgggcctcatggttttcatctgaatgatgaccaacttggataaaatggtctttatataattccataggcatttcccttcccaagggcttgagtctttttcaacaattatagagttttccggtccctcttcccagtgcctcagcaccttgctattcatgttcatctgatcagttgtttgcatgctgacttacattaccctgatgggcagtacctgtggctgtttctgctccctcacccagtccataggcttctggttgtaaaaagtgtgcatcttgagactgtggacagttagctccagaggtgacagtataatcacttcacgtagaagaggatagagagagactcatgccagtggtggtgagcaagtattagagatatgatgtgtgcctctgtgagttttggggtctaagataaattatggcactaggaagatggtcctttgtgtcagaagaactggagttgttggtgcaaaaaagtatgatgtcagcatagcagttttatttgtacctcagcaacttctaaaataatctctattaagtgttttcaggaactactttctactataggaaaatgattgaggtgagtatccatctggacacagagaaatataacactgttttctgctcaccctccacttcacatataaatacaatatgtgttaaaggactaaatttctagtgtcacagtttgtactttatagtttgaagtcaataagaaagctcatataccttcctaaaagtcacttgttaatgtttgatattaatctaattttatcataaattaaaagtataaaactacaaatttcttaaagataaaatatccgaatggattcagtcaaattaagcatgataatatcaaatatcagaataggttaccatgcaggaggtactgagtacttaaaagggtggggaatgcaatgaacataaaagctggtaccaaggggaggaggagacagtgatgaattaaaacattatcttaactaatccaagtgctggtcttcaatactttcatgtgtatagacaaagagaaactgcagagatttctcacaacctctgtgtccattttatgcatgtatcttagcagaaacactggtgaaatccctccaaaacatatttattaggcatggaaaaagccttacatgacaggtggcataggctccttatgaaatcattgcaggatgggaagccatttagggcttcataattgtgaaagattgtatagaaactgaggcacttaaatagcagtaagcatgagaaaatgtggtagataatggtggtgattctatttcttgtgaaagtccacttactctagtctgctacagttgtgggctttccgatttcacataccccagtctctatattctctcaatccacagcctacctcaactaagtccgtcccaggcacctcttactgcagtgataatccatctgttaatcatgttttcctcttatgtctactttctgtcagagaattgtgggtgcaaactgggaagggaaggaaattataagaatatgtataagtacaaatggaatatgttggaaatgaggaatagttaatatcacaggtcatttaaacacctgatgaatttcatggatagtcaggaatcttgttcttacctaatctgttaattttagatcagacattacactgaaagtattgatgatgggtttaaatcaggttgcagctcacatgttgtgataatattatgttgattttttgtttttaatatgtgaggaacagaataactgtatactatttattcatagtgacattgcaatattgattttagtacatattattatcttcataatcacaatttcctccccattttcttagttctcataattttagccacagcccagttggctggaccaatggatggagagaatcactcagtggtatctgagtttttgtttctgggactcactcattcatgggagatccagctcctcctcctagtgttttcctctgtgctctatgtggcaagcattactggaaacatcctcattgtgttttctgtgaccactgaccctcacttacactcccccatgtactttctactggccagtctctccttcattgacttaggagcctgctctgtcacttctcccaagatgatttatgacctgttcagaaagcgcaaagtcatctcctttggaggctgcatcgctcaaatcttcttcatccacgtcgttggtggtgtggagatggtgctgctcatagccatggcctttgacagatatgtggccctatgtaagcccctccactatctgaccattatgagcccaagaatgtgcctttcatttctggctgttgcctggacccttggtgtcagtcactccctgttccaactggcatttcttgttaatttagccttctgtggccctaatgtgttggacagcttctactgtgaccttcctcggcttctcagactagcctgtaccgacacctacagattgcagttcatggtcactgttaacagtgggtttatctgtgtgggtactttcttcatacttctaatctcctacgtcttcatcctgtttactgtttggaaacattcctcaggtggttcatccaaggccctttccactctttcagctcacagcacagtggtccttttgttctttggtccacccatgtttgtgtatacacggccacaccctaattcacagatggacaagtttctggctatttttgatgcagttctcactccttttctgaatccagttgtctatacattcaggaataaggagatgaaggcagcaataaagagagtatgcaaacagctagtgatttacaagaggatctcataaatgatataataagcccttctcattaaacatgatatggctttatgtttctttctttgatatt

SEQ ID NO: 10381 - DNA, 6000 bp, Homo sapiens
gtgcttttagtatgtgtactcactgcactaagtcaaccatacaattctcaaaagcagagattgaagcttccaatgtttgtgttttatcattgaaaacccagtgcaattccaggcctgcaagtgcctgacagggataaaaagcagtgaagaaatgatattattagagaaggtaaatggtgaggattagataagaaaaaagcaaaacacaacaaaaaagtcaagaaaacaatacaaaaacaaaccgtgttgttttaaagaaaaattattttcttggcattttggttgcatttcttgaatcttttcagtgataatcagaagaccacatttcccaaattatgtaaggaaaatttcctataagttgtttctcctagtcatttccaatcaaaattcatagttctgaacaaaacacaattgccctactgctacagtatttggggattgggaagaattaaatttagaataatatttttaacctaacaaaataattgattctaatttcaattacatgaaaaaaaagtaaaaacttttttttcagtaggagcttttagaaacaacttttataatctcataagcaaatattcaactctttactgtatagattctttcttcagtaataaaaacaattcagccgtagtttggggataatggacaaacataccaattactgagaaactccaaccatcagccttcagtaatgatagggcttcaaggttcacagcaaaacttcagcttaaatctttttagtttgtgtccctggtcaaggaattacattgaaatgctgggtgtgtatcaaatttcctgtgaaaatgttaaaaatatttatctttttaaaactattttagagaaatttcacatgatggatgatatatcataccctaaattcataacctgacaagtttatgctggcatctagtaaattcaaaaaggaataaaggcagaatgactagaatttttcttttcaaatgatatcatcaataatatccgttataaagcttgcttttctttaggttaactttagaggccttgaagaataagagctcatctctttatgcaggagctttggtttgcagcatttacttaagaaatatttggtattctgtatctttaagagttaaacatagaagaattggctaagtgaaaatgaagaaacgcaatatcattctgcatatatcatttattatatatcacagtattattagttttaaaaagttaaacataaatatctattagtcacttgcagactatggaaccatagtcagtgctgcatactttcatacttctgtttccctcctagtattcataagtgtgcctttaaaaacttttaaattgtaagaaataaaatgtttgatatattatgtatattattactaagaaaaaacttgaattactttggatttttaaaaactttgataaattctacatcatagcatattgaagcagaataacaaatgctatacctcaggaatattaattccagattttacagcattttaactttcttgatgagaaaaaataaatttgtcagttattaaactatttgggatccaacagatgaaagcagaattctaactaacatatttattgatttatttgtgatttacatatttacatgtgttgtttgacacaattcttaattatgttcttgatatgcatatatttgcttcttaaattttaagtttcctttattttactttgtttatagtctcaactataatttcaaagtttaattttagataattcagcttttaaatattttcccattataatttttggacctctaactctattttaactgtaaatatagttctgtatttgtgaagagactttagaagtggaaatagataccttcacaaatcttaaaaagacttcttcagagtctgtaaacagcattaccatgtatacttatctctttcttttcaatgccatgaatcatcacaaatggcaggctcattgtggtggcatgctgaaatgattgagtgggaactgtgcccagcactgaactataaaaaaaaaaaacaaacaaaaccttatccaaacacactgtcctgtattgtaatgcattggcccaactggattctttttgatgctttggtgattgctcttttgtttgggcttggagaattcagagctatgaaattcagagctcagatttgaacacaatattaagattattgcaatctgtagtgaatctgttcatgttatccagtgtcaactgcttttgagattgcattcctttcacctcaggcatgcaatcaggatgtataagtgaaatgttgtgtggtatgtttactgtagttgcttagaagtcccattctttaccaatgctcaaatgtgattaaatttgtttttcttgttaaaggaaacagcttagaacaaacccttgtaagtatctttattttcagtgatttaacatttccaaatgttaaatcatttggaaaatgcaatactattcgtttctccaacaaaaggtaaatttatgtcagttccaaagttcaggttatgacagcacaaaaccaacacaggtgaaagtgttagcctagctttattaaaatggcattcccagttagaacttgtgaatgacagatacttcaggctttcgaaggaagctaaaacatataataggcctgatatataaggttcagagcaaaagagggcactaaaataaatttttaaagaaaataggaaggagacaaaactcaatactaccttgtcttttaataactgtcttcctctttctaaaagttgttgtatttcctcaatacttgcttcatttctgcataagggtttccagatggcactctaaaacatttgccagaaggtggcgacataaaacctcattgcttagaactgtcccaggtgctgaacccagtttctgagattaagagaggctagccggctagcgaaccgggattccaccaagtttcccccagaggtttgcaggctctggtaagaagtgcaaaaggccatgtgaaatgccaggcttcacttagaacacatatgcaaaatatttccatccctgaatttactagccacaaagctatgggaagtggcagtgtcactgaaattacaagtgtagtagtgatggaaaagtgtgtgtgtgtttagaatatatatcacactgagttttgttcttcatttcgagatgcagttgtttacctctccttgtcctttgacacgtcctttataatttcgttctctcccggttccccaacgttaaaaaaaaagtcacaggcaatattctccctgagggagtaaggctggactgttagatgataacggaggtaccgttttgttgttgttgtcgtcgttgttcgtttgtttttggagacggagtctcgctctgtcgcccaggctggagtgcaatggcgcgagaacggaggtagctttttaaaaaggaagacacactcggtcttcttccatcaattagcaataattgggagactgacccaggactgttcaccttcccattcaggctccctatgcttccttttctcatctcctattgccactctgggatgctgacacgatttaagaatttggcagataatatgaggcaaggagtagttggaattccctcccccaagtttttccaaccccagttttgctgggttggaggcggagtttatttgttacaaccttggtctgaccggcagggatctggtgtgtgtaagtgagttctgagtctctgttgacaaaaagagactcgaatgcaaagacgctgagctagagggagaggagggcggggacccagaggaaagaggcactcctcggggttggggaagtattaggaggggagggttagagtgggagggaaggagcctggctttcgaagcgactcacagagggataaataaagggaagtgaggaggaagagggagactgaaagggaaggcaggtggggagaagggggacgaaagaggcagaagagagagaagagaggaggagagagggggagagagggaaggaaggaaatagggagaggagggtcacagagtgaccgtggaggatggggcttctcggttctagatatttctgggattggagactgtttgctagtggggagactccagctccggcagccagttcgggagcggcaaagtaaaatggacagcgacagacagacgttccagccacctctccgccgccgggagatcctggagctgctttcaggccaactccagtttcccagctggagcttctgaacgcgctggactgcgagagcccagggagcgcctgaaagctgctcctcggagatacccttcgccgaagcagtaagaacttcctgcttgggtctctgcattcccttcctccgaaacttcccaggagaagggcggaagaccccaggggaaggggcgaggcgaatcttcgcgctgctttttcttccctcccccttcccgcgccgggcgcgcaggcatggatgtgctcagccctggtcagggcaacaacaccacatcaccaccggctccctttgagaccggcggcaacactactggtatctccgacgtgaccgtcagctaccaagtgatcacctctctgctgctgggcacgctcatcttctgcgcggtgctgggcaatgcgtgcgtggtggctgccatcgccttggagcgctccctgcagaacgtggccaattatcttattggctctttggcggtcaccgacctcatggtgtcggtgttggtgctgcccatggccgcgctgtatcaggtgctcaacaagtggacactgggccaggtaacctgcgacctgttcatcgccctcgacgtgctgtgctgcacctcatccatcttgcacctgtgcgccatcgcgctggacaggtactgggccatcacggaccccatcgactacgtgaacaagaggacgccccggcgcgccgctgcgctcatctcgctcacttggcttattggcttcctcatctctatcccgcccatgctgggctggcgcaccccggaagaccgctcggaccccgacgcatgcaccattagcaaggatcatggctacactatctattccacctttggagctttctacatcccgctgctgctcatgctggttctctatgggcgcatattccgagctgcgcgcttccgcatccgcaagacggtcaaaaaggtggagaagaccggagcggacacccgccatggagcatctcccgccccgcagcccaagaagagtgtgaatggagagtcggggagcaggaactggaggctgggcgtggagagcaaggctgggggtgctctgtgcgccaatggcgcggtgaggcaaggtgacgatggcgccgccctggaggtgatcgaggtgcaccgagtgggcaactccaaagagcacttgcctctgcccagcgaggctggtcctaccccttgtgcccccgcctctttcgagaggaaaaatgagcgcaacgccgaggcgaagcgcaagatggccctggcccgagagaggaagacagtgaagacgctgggcatcatcatgggcaccttcatcctctgctggctgcccttcttcatcgtggctcttgttctgcccttctgcgagagcagctgccacatgcccaccctgttgggcgccataatcaattggctgggctactccaactctctgcttaaccccgtcatttacgcatacttcaacaaggactttcaaaacgcgtttaagaagatcattaagtgtaagttctgccgccagtgatgacggaggagtagccggccagtcgaggctacaggatccgtcccattcactatgcttcccccaaccctagggaatcaacacttaagataattcgccacttctcctctttctctctgctccgctcacggcttgcagacctggtcccctccccacttcctgctccacggcagggccctttgtgcaaaggagacccagcggaggagcgttgagagcccaggaaattcagagagtttgtgagaagcgacattggctcagacttcgcctgtatcatcagttttgatcccagtaattgcctcttctctcttctatctcctaaat

SEQ ID NO: 10382 - DNA, 6000 bp, Homo sapiens; identical to SEQ ID NO: 2352

SEQ ID NO: 10383 - DNA, 6000 bp, Homo sapiens
tcctgatggctgcttgggagcacgaggcaaagacggtgcttcttgaggagggagttcagatctgacccctcccaccaaccaggccagcactccaggggtgaccagactggcagggagagaggccgggacatgggtggataagcacgtggtgggaaggggcattcaaggggcctggtgtttggggacgactaatgtcaacgggcagagatcggggagcaattccaagcgaagagcaggagcagatacccaggcactggcaatggcaaagccggaagcaggggtgtggggaaaatagaaaagttcggtgaagtgtagggtggaggtgagggggaggaaaatgggtgaggctgaagggggttcattagtcaggcccaggtagggttttagccgtaacctggcaaccgcaacgtgcctccgggggcagggaaagggcccgggttggcaccgtggggaggggtggggcctggggaggatctagcaggcagccccacttaacgacattcagttaagcagaacgtggaaaataaacctgtgagggccaaacaaaattgaagtgctggctggcgccagctccagcgcctatcacccctgactcggggttagagggcaggacagaggctcagggtgtgcgcgaggagggcagggccaagcagcccagcggaggggggcgagtccgggtgattctcggggatctgggggagggcgatgactgcgtctccgaggctgggaacaccgtggcggtgcagccgggggaggaggagcccgggcgcgggcaggtaggtgcaggctgcagaggaaccttgcggccgcgcagggaaaggcttcgtcccgtccctcctcgcagccctctgccgccctcggagtggggactttctcctgtcgccgtgggaagcaccgactttcgttgggggatttgactctgcggggaggacagagcggggagcacgagagcagggccaggaggggcggggccggagacgggggcggggcgcgctgggcccgacgccccgcccagcgcgctctgcactaactcgctgccctccactgcaacttcttattcccgggctccagatgggaagcgaagctcagggaggagcccgaagttgtaaaactggaaaaagtcagggctggggtttgaatctggatctgagagacgccccccgcccccaacacctgtgctctttccttctatggcgggagtggcaaactcgaatgtgtagcggggtcaggcatcaacactgacacaagaacgacattaatagtaacgttccttgaacatttactacacgcccgatagtgttctgagttctttatatatatttcactcatttaatcgcaccaatccttcgaagtcaggaccattatttgctccatttttagagaggaaaaaactgaggcacagagaggttaagtacctcgtccaaagtcacacagcacaaatttgacctcccaaatttgagcctgcctcccactgcctccacaagtaacataaatgcattaaactggccccagaggcctctgagaggagtgtaagcccttttggggaaggtggtggctgctcaatcccggacaaggttgtcctgctgggaaggagctggagcattacagtctcacggagcaagtggaatttaaaatctcttgctttttaaatgtggaaaatacctttaaataaaaataataatcatcataataaaacctgagagggccaaggtaatagtaatttcccacatatctgcagaccggatctggcccacagatggccgccctgtgacctgaatactctcagggtgggagtaggaaacagagaggaaggttccattcaggagggtgggggttggggggctttccggggtggagatgtttgcaggcctgtttccagttgggatgggaataaggggctggtggtaggaacttctgtgacagggcatggtgaaagtgtaggaggtaagcgggaagtaggaactggggatgactcaagccctgatgttggaagcccgggtgatgggaagaaagatgggggcagggaagctggtttggtactgtgttttggtggaggcagagggagcttccatttgggacttccatttgggagcttgagggcttgtgggacatttgaggggggactcgcccccctccgctgggctgcctggccctgccctcctcgcgcacaccctgagcctctgtcctgccctctaaccccaagtcaggggtgataggcgctggagccgttaccaggaagttggttatgtgtgtctggagctgtggatctgtggatgggacaaagtgcccaggacagagccagagaggggttgaggccacattgcatgagtgggagatagtggggaagctggaggagctgctaggaaggtaaaaagagaaacaagagaaaccaccgcaagagtcattttgagaggagagtttttctgtttcactaatgattgggattcccagagaaaccagagttgtgcactgggggcaaggatggagttagttactgcagcagtactactcacagagtagtccctgaaccagcagcatcagcatcgcctgggagcttggtagaaatggacagcctcaggccccatcttggacctactgaacctgaatctccagaggtggggtcctcccactctgcactgaagtttgagaaccactgctctgtactatagaccagcatcttgtgccctcccacggtggtaatgggaccctgggcccaataggcaacacgtgcgatagtaagatcactggctgcagagacacctctccttcctcaaagacagcacatgtttatacagcccatatcacatgctggcccatgttctagatgctgtggatatatttttatttgattttcttttattgagacggagctttgctcttgtcacccgggctggagggcaatgccacaatctcagctcactgcaacctctgcctcctgggttcaagcgattctcctgcctcagcctcccgagtagctgggattacaggcatccacaaccacatccagctaatttttttttttttttgtatttttagtagagactgggtttcaccatgttggccaggctggtctcgaactcctgacctcaggtgatccacccatctcggcctcccaaagtgctgggattacaggcgtgagccaccgtgtccagccaatgctgtgaatatattaaactgacttgatctttacatcaagatggaagcaaatggtttgcctccatttgtaaataggcattatctcctatttacagattacagatggaggcaaacaagttaactaacttgcccaaagttacacagctagtaagtggcagagactaaagtctgttcctacccaccatgctatgcacacctggctcacccagcaggggctgggggaggagggaaccaggggctgctggaaggtacctgccataagtcccagtacttagtggttggcacaggatggaaggggagccaggggcagactgaggaaaaccctgaccaagtagaacctggccggggatgcccaggtggaggagaacgcagttccagctcctgggagtcgggcccagaactgtcccctgggaatcctcactgggctcttctgactttctctgttgggtctcttataggttctggctgtgtcagatggaggtaagtgacagaatgtgtggagaactggctgagtgggagggaggagggaggtggagatgggtggggacacccctgccacctgctatctttccagggaacatggctgcagagtggatgcatgggggagggtgggttgtgccaggggctggggaaggcagcaaggctcaccccaacttgtccatccccctgcagagctgagcagcacgacggggccccagggccagggcgagggccgcggcagctctctcagcatccacagcctccccagtggtcccagcagccccttcccaaccgaggagcagcctgtggccagctgggccctgtccttcgagcggctgttgcaggacccgctgggcctggcttacttcactgtaagcctggggtagggaaagggaaggggggacacgggagagggcagggcgtggatggagcttcaggctggccagagtggggtcctctgtcagcttcctcatctagccttcctgcagcaccctcttcctcttctcccagctgggaacttttcttccttctccctgtccttgtctctgcctctcattttctctccctgtcttcagatcggtctggctccgtctgtctgtctggccctgtctgtctggcttggtctcttggccctgtctctgtcccaatctttttgatcacatcccccagtttggtctctgtgtctctgagtctctgcctgcctccccctccttcccctcccaggagttcctgaagaaggagttcagcgcggaaaacgtgactttctggaaggcctgcgagcgcttccagcagatcccggccagcgatacccagcaggtgggggaagggggagctggggccgagggctggggagaggggaactgggccacgctccctgaccaactcctcctgtccctcctccttcagctagctcaggaggcccgcaacatctaccaggagttcctgtccagccaggcgctgagcccagtgaacatcgaccgtcaggcctggcttggcgaggaggtgctggccgagccccggccggacatgtttcgggcacagcagcttcaggtgggcgatcctggggggattggccttgaaagggagacaaaaggagcaggggcggggtcggaccctggcggggagtctgaactacaaagcggagggggcaaatttggaggcggagacagagccaaatgccggggcaggcagggcggagctcagagggcggtatcagaggcacggggaaggacagttagaggcggagcctagctgagctcggggcgggcttggaccccgggggtgggtataggaactgaggtcggggcggggcttgggaaatccagccctaggtttggggcggggccagccccaaggacccggcctgggtgcaggcagcccagcgcccccaccccagccccggctcacctgttccggggtcgccccgcagatcttcaacttgatgaagttcgacagctatgcgcgcttcgtcaagtccccgctgtaccgcgagtgcctgctagccgaagccgagggacgccctctgcgggaacctggctcctcgcgcctcggcagccctgacgccacgaggaaggtgcgtgggactgggcgagggactgggcgaggcagggggtcctgcggaccgcgtgcaagaggggacgcctccgggtgcagatctgcgagtctgtgcccacggtctgcatgcgggctggggcccagcccggtgccagcgcctcccctgtacccacagaagccgaagctgaagcccgggaagtcgctgccgctgggtgtggaggagttggggcagctgccacccgttgagggtcctgggggccgccctctccgcaagtccttccgccggggtgagggcaggagcgagcaacagagatgtggggaaggcgggagtttggttaaatttggggagtgcccccttcctcctacgtggcccacagtctgtaagtctgtgaaaattgaaacccaggtcccagtgaccaccacactcccctgggtggttcgggtcttgggctagacctcagacgtttggaaatctccaacggtggtgtcgctcccagggatttacacctgggcccctgcaggatggctccaaacaaggcccaccagtggggaacaggcttccgcagaggatgggtgagggcggggggctgttcgcgttcatcgctccctcttcactagagctgggcgggactgcaaacgccgccttgcgccgagagtctcagggctccctcaactcctccgccagcctggaccttggcttcctagccttcgtcagcagcaaatctgaggtgagccgactgttggggaagacaagatgctctatgggctagagtcactactcaggcccatttacgtggtggccctcattcc

SEQ ID NO: 10384 - DNA, 6000 bp, Homo sapiens
tgtataatgggtgtgaactcatcccgaggtctaggggtggtagcgctgccttataaggcggcagaggccgagggaaggcgaggccgagtgggtggagagaaatcacaacatccggctgcgggggctgggcggggcgcctgcggcgaccgggcaagaggtcggggaacggctgcgaggccgcagcctcctccctgtctctccctctttcgatgtgcgccctcctgattggggccgacccaagggaatacggccacacaagtggaccaaacaaactcgctgccagcccgcaggaggcccaggatacggagcgcgtccccgacaaaaccctagaaaagccgtctgcgagccaaaggccgccgggccacaccttcaggcgacgacccaatcaaaatgcagtacttgagatgacggacgtcttcttcacccaatcacatattcggcctcctgggcgtgccccagagtacccacctccattgtcccggctgagggctcggccctaattggcagtttggtatcctacgaaagcctagaaattcgaacctaggggctgaaccccgccctcagaccaaccaggaagaggtgacgtgattggtcccgcccccgtacttctttgagcgagtccccagctgggggggcgggggaaaaaatgaagaggaagactaatgggaagacggcgcggggagcttctgcccggtgattggtcaaatgaggtaaacagagggcggggcagggcgggccagcgccggggtggcccccgggagggggcggagagtgcgcggctggctgcggcggccggggaggccggggaggccgcggcgcggtcactgcgagccgagccgagccgcgccgagccgcgccgatcgccatccggcctcggcactcgcgcgcgatcccggccggcggcgcggcccggcgggccaggcggcgccacagcccatggagctcgagaacatcgtagcgaacacggtgctactcaaggcccgggaaggtgaggcggccgggtgggcggccgggcccgggtgcgtggagcgcgagtgcgctgcgtctgagctccgcagggctacccagccgtcggatcccctaggcccgcgggccctgcgccttacaccccgcccagacacgagcctttccggcccgtcgtcttcctcctccgcacctgcccccgggattcggggcccaggaaggggcgggggtcaggccgccgccctcgcggcgggtgggggtgaaggagtgaaagaaggtgagacgaagagggaagggtgggaccggagccccaggagagcctgtctgagaggcaagcctcctccaggggagaggtgtaaagatgccccacgtgccaggggcccagaccccagcaccctagcctaatcccgcgcaaagttggcgataggtaaagctggagaatgaataaacggaccctctgcgtagcacagcccacctgacttggggaaactcctggccacaaatgctacttataggactgccacttgctccgtgcctcaggacactgagggcagaggtgaatggatatttgccctcagggagcccatggtctagtggggctagcggacacagaaagaagtgggagcagagcatgctgctctgtcagtattgtaagctcagaggtctggctggggaaaccagtctggtggaccgagtgtgtgtgtagctcctcgtggctcccaccccagatgttatcaggcacttgctctgtgcaggtcctgggagacacagaaggaccagatcgggtcctcactgccttgtggtcagtctgcccccacctgccacactccacctcagtaacatgatcactgaccacccactctgccccaccttttccagggtgctggggaagcagcagtaaacaagacccatctttttggaactccagggcaaggagggagattgtgacagtttttccaccctttgctgggcttccaggcttaaaaagtcatctgcttcacctttctaccatattttacatgtgggaagctgaggctcaaaccagggattagcatcagtcacacagcaagattgtgattgactcgggcctaagacacaggatgaccggcacagtctataggaagcccagaggaactttcagctgggtgctacacctggcaccccgtgcccaccaagtgctctggcgaggtgcagcccagaaatggcatggcaggctgggtcctcattgcctggggagcctgtcttatcccctgtcccttatcgagcccatgggctaggccttcctcccagcctctgggggcatctgccgattctgttctgcctcgtcatccaaccagccagggaggaggggtggggagggccgaaacaggccttcttccctagggctgtagccagttaaggcctcaggcctgctgatggcactgcctggccggagagtgtgggtacctttggacaagctttgtcaggccatgggcaaggcacagggtggtatggccagactggggactggtacctccactagagaacccttacgacaacctggctctgcccctcccacctgcatggcttttttttgagacagagtctcactgtgtcacccaggctggagtgcagggctcactgcaacctccgcctcctgggttcaagtgactctcctccctcagcctcccaagtagctgggactacaggtgcatgccaccacacccagctaatttttgtatttatagcacagatgggtttcaccatgttggcctggctggtcttgaactcctgacctcaagtgatccgcctgcctctggcctccctaattgctgggattataggcatgagccaccgcgcctggccgacctgcatgactttaaacatgtctcttctttctcaacttcagtacccctttttgtggaacggttgggggtgggacataaagactaaaggaaaccctgattgtcactgagtcctgagcccaggcgcctggacgggctgcatcagaaccacctcatgaactggcttttcatgagcttgaggctggggcccctgacggcttctcaagtgatctgaggccccaggtggggtttgggaacccttggtgtgtgtatacagttggcacctaatagatgccagccatgtttggggtgggaaaggagcttgggttgtggccatagggagctgggtacgaatcctgtacccaggattggtctctgggcttggtcatcttgggtatactctgggcttggtcatcttgggtgaattgattcctcacttcagaatctcagttttcatataaaattgggcctgctctggcagagttgctgtgaggatggagtgggacaacgctggggcttgagacctccctcagtaccccttctcttcccaggcactcagaggcatggggagggggcccagggacactgaaaggggacagggagggtggggaagagctccactgactgggcagcccaggacaggatatttgcatgtgactctttgctgctgccttgatgtggctgggaggggggaggaggaagtaactgagggtgggaggctggcggatggagggttgggtgagggacctgtgggtgtgggggaggagttccccttctgggaaggccttgccctgggttgaggggtgggtgtctgttgctcactcacagtgaagcaatgactgcagggcatgttcgcaggaggcctctagcaagtttctcaatgggcccctgcagtacttccttctccaggcagcttaggtcggggagtcatctagggacctagccttgccccctccctagaaggcaacttctgcccttgtaccacctgccctcacccaggccagatggatacaggactagaaagccagaggggaaactgaggcccagcatgagaaagtggttgtctaaggttgccatggcgttgttggagttggggttcacctcttgactcagccctacttgatgtggacagtgtctcccattcactacgtaacacacatggagaagctgaggttcacagatagcgagtgatgggccacagtgtgaatcagagattcagacccagctctgggaggctcaggccccttccaccctcctcaacctggtggcccacaggccacacacatttggctagctccctgacacattttatttggctgcagtgagtttttttttttttttaaacaaaatgggggccaatattttatgttagagtctgcaattccggctgcttttgaaaaaatcagaagagctggccacattgagccagaaaccctcctagcagcaatcaagcaatcagctggcgttctcctgcagctggccctgtcagagaggccttcgctgttcctggtcatctcacatctggcccacgtttcccacacctgttgggctctgcaggcaatcgaactgctgctgtgacctcagctgctgcagatggggtgtctgcgaggtcaagcaagacaggcaggggaccggggaagccccagtgtgcaggggacggggagtcctgggtgccagcccccttgcccctgcctcatttgagcgtctgatatctctgatgtggggcctggtgatagaggcctgggagcctccttgtccccatgctgccctgtgcgtctctcaggcctgccccactggcctagaatctctccctcccgggccttctgcacttctcagcactgtgacgtccttctcccctttcttcaccgggggaactcctacctggcgggaagcaactggggctggacccattgttggagctacttggaacactgtcctcccgcagcgacctcactgcctctcttggctctcccagtgcaggagcctgaagcaggagaagcacgtgtgtcctggaacgcagcaagggcgtgctggagcgtgcagagggaaggcctgaggtgctgttctgcctcagctctgccttggctgggccctagaggccgtggaccgcactgaggacccagaggcagttctgaggcagtgggactcgagacccagtgtcctattgctcccacaggtggcggtggaaatcgcaaaggcaaaagcaagaaatggcggcagatgctccagttccctcacatcagccagtgcgaagagctgcggctcagcctcggtgaggcctgggcagagactgggggtgctgaggcgaggggccctgctggggccgggggagcctcccctgagaccttgccccggagcagaggggcagacttgggggctccagtgagcaggaggatgaggactgcaccattcagcccagtttcagttcctgggcttgggacgggtggagagcagacagcaaacagggtcacaccgagggtggttgaagcgggtgtcgggaatagggcaggggcagattggggcagttgattccactttgaaaaggagagccagctagggtgagcagggcccacaggacagagggagcagcagctgggccagcccacagactgactgccttgggacccccaggctggggcgtagcctcccaggcccagccctgaggggtgcccagcaaatccttgaccagaagccctcagcctgggcagtgtgacagggttactcctgggaggggacagaagggcccaggaccccagttcctgccaatcttggccaaggccccaggtctgagcagcacccaaggttgctgaggcccccggtggcctgcacgtgcgcagagcacacccgggctgcttccacctcctgggaaggaggcccagctgagagcctgccggaagccacagcttcctctcgcactttcgccaggcaggcagcaggtgtgggcctggccccggctgggctgggccggaacctcacggaccgcacccaaccccagtaccgtgacatacgcaagtcgtgtaaatcaggagacaatgcagggaggtggatggaggcctgggctctggagccagactcccggctgtgtgacactgagctagtcagttagcctctctgggcctcacagccccaaaacagctgtgcccacctgagggttgtggtgagggttctgaagaagattgtggctaccacactgcagagctggaagctgttgtgg

SEQ ID NO: 10385 - DNA, 6000 bp, Homo sapiens; identical to SEQ ID NO: 2351

SEQ ID NO: 10386 - DNA, 6000 bp, Homo sapiens
cctgacatctgccaacaggaacctgtaaaccactaaaaaccctatgccatgtcatttttttttactaagtttttgtactaagacatgaataagaggaacgctgggcacatcagttttgtttggagtgagagaaaaactgaaccatgggatttttgtctgcagagaacacaggacagtttatgattatggggcatgtgtgtctgtgtttgagagggatgctaactaggcagaaatggaccaccgataaactaggaaggagccccaaaggggtggattcagatgaataactttgattacctaagtatttttctctgtgcacagggactctgcaaaagaaaatgaggagacagaaatgtgtgccgttagggcccagaggatagttgagccatagaatgaaacagttgaggacctaaaactatgtctggttttgtgttttccatttatgaaatggtcctggctaagaatatctagatgtaaccttccaggaaaaaaacaaaaaaaattaccaggaagaaccacatagtttttactttaaaaagaagtaaattgtaaatctcaaatgatcataaaaatacctgctgccatctctgcactgggcaaaatgacctgcttggattagaaggatgatttccaaacagtaactttcgcaaaataaaattaagccactgaagctttcttgaatatttgtcttggaaaattagtatatggatggaatatatatatatatgtgtgtatctatatatataaaaattttttttgagatggaatttcactcttgtcacccaggctggagtgcagtggcacgatcttggctcactgcagcttctgcctcccaggttcaagagattctccagcctcagcctcccaaggagctaggactacaggcatgtgccaccacaccctgctaatttttgtatttgaaggagagacagggtgtcaccatgttggccaggctggtcttgaactcctgacctcaagcgatccacccgccttggtctcccagagtgctgggattacaggcacgagccaccgtgcccggtctggatggaatattttgaaaatcatatcaacatttaaatatcctaggataatttataatgtaatggaccttttgataaatcctttggcattgagaataatcaccttttaacttgcataatacttgagttctgatttgtagttaatagatctgctaaagtagggcagagccaaacagaagtctcatattaaaaattgggctccagatactttatgacaggctgctgagttacaaattttaaaaatagtatgttctcttttgattacaaaattatactagggccattgtagaaaatttggaacatgtaaaaaagtataaaggagtaaacattttaaatataaaaaaatagctttcttaatctattggcatatattcttccagtcttctttttgtatgtatctagtaattcattcattgactaaaccttgataaaggaactgcttactatatgtgagacactgtgctagacattgaggacaaatggtgaacaaaagggacatggtctctgtctgcagggaggacacacaattcagtaagccacagcaataaagtctgcctagtgcaaacacaggagaagcacagtgcttagggtgttgttgcagaggcacttcacctagtctgggaattaatcagctctaaaacatgattttttatttttttagatggagtctcgctctgtcagccaggctggagtgcagtggcacaatcttggctcactgcaacctctgcctcctgggttccagcgattctcctgcctcagcctcccgagtagctcccaggcaagtgccaccatgcccagctaatttttgtacttttagtagagatgaagtttcaccatgttggccaagctggtcttgatctcttgacctcaggtgatccgccaccttggcctcccaaagtgctggtattacagacgtgagctaccatgcctggcctaaaacatgatttttaactgctgcctagtttagtatttcctaatacagaggtattgtactttattgaaccaaccaactgttcttaatgctgaacattaagactgtggtttgttttttgagacagggtcttgctctgtcacccagtctggagtgcagtggcacaatcttggtttactgcagccttgacctcctgggctcaggtgatcctcccacctcagcttcccgagtagtggggactgtgggtgcatgccaccacacctggctaatgtttgtatttttttatatagatgggtttttgccatgttgcccaggctggtctcaaactcctgggctcaaataatccacctgcctcagcctcccaaaatgttgggattaaaggtgtgagccagggcatccaaccaagattgtgaattttttcgactattataaataacttctgcaatgaatcacattcaaacctttatacttattctttagaatgcattaaaaaaaattttttgaaaagcagaattgcaaagtaaaaaggaatccttatttgaaaggcttttgatacacattcatgctgttaagctgaaacatttacccaattttaattttttctcggcaacactttccacatcttcccagcatcttgcaatgatggctcttattatataaagcctatcacatgcattacaatggctctggagagcatatgacagggctctttcatcctcaggaagacattgtcaggtatggtttttcccaagtcaggatttaaggacttttttggacagaggtttcaaagccctcagtgcaccttctgtaaataggaaaaggtatccctctctgggtggacaaagcctccagacccacagcttcacaagcagaaggtgcttgcagaaacaaaagtcccctttcctctatcaaaaaaaaaaaaaagatggggagtggatacttctttgggtggttgcaaatgggacgtataacttggcaagcaaagcccatcctgcatatccgccccactcctccttcctcagcaggtagctttctgcagtgcaaactgcacaaccaactgcagccctgacctttctgttttttcttgagactctgatcttgttgcctttgcctggacaaccttcacagcctttcccatactatctaggaaactcttcctcattctttaaggcacagctccagtgacactctgtgcatctctctgctgcccatccatgtttccccatgctccggtgggtgaccctctgctctcacaaccttctaggctgggccttgagagcaggaaacccctcccattagctttggctcctctagtgcggctcaggcccaacacacagaaggtgctatattcccgttactgaaaggaatgcctgttgactcactgttactgtattacgccttaggtttagaaacttttgttctgactaaaaatatacatgttctttgtaaaatatatatatgaatatataattaggttttacactatattattttttgaaaatacaaaaatcgtctataaccagatacccaattcatattataaaccatcatataatcatttacatataataatttataaccaacaatccaatcaaatgttaaataactcttttttaacattaggatgtacatcgtttcatattttaaaaatttgtttgtaagtgtattttatttttacaaaaatagagtcaggtaacacttcctgttttgtgacttttttcagttaataaatcaggaatcatcacccatagctatatctatatatttgtatagtttttttctttcagtggtttgacagtattcaatcacatggttttgtcatagtttatttacttgattctcccagttgctggatatttaggtagtttgattttgtctctttcctgacgattatcattattgtggaaatgctatgatactcgttcatataccttttgttcatccatttcaatattttcttaaataaataaatttacttatttatttatttttccgagacagagtcttgctctattgcccaggctggagtgcagtgctacaatctcggctcactgcaacctctgcctcccaggttcaagtgattctcttgcctcagcctcccgagtagctgggattacaggtgtgtgccaccacgcccagctaatttttgtatttttagtagagacagggttttaccatgttggtcaggctggtcttgaactcctgaccttgtggtccgcccttcttggcctcccaaagtgctgggattacaggcgtgagccgctgcacctagctgttcttaaataaattcttagggccaggcatggtgggtcttgcctgtattcccagcactttggaaagcgaggtgggcagatcacttgagcccaggagtttaccaccagcctgggcaacatggggaaacactgtctctacaaaaaataaaaataaatagcttggcatggtagcgtgtgcctgtagtcccagctactcgggaggctaaggtgggaggattgcttgagtccaggaggttgaggctgcagtgagcagaaattgcgacattacacccagcttgggtgacagagtgagactctgccttgaaaaaaataaaataaattcttagaagtgaaaattgtcaaagggtacgcccatttaaatcactttttcatatatagtgccaaattatctcacagtatggaaaatatctctgtacacgcctctctcctccaatagtgtgggctcagtgaaggcaggatctccagtgcctcgctcagtgcttggcaaatggtagatgactagtgttcactgaatgaataatgagttggataacttaaatgagaaggccttcattacataagcaaaaccttgccagtgtggtcacagaagtctacaattggtactcttggccttttctgaatatctatagcctaattggcaataatattttaaattttcatttctcagaagagattgttttatataccacagtgaaaataataaattactctgggaggataattagttgtaaaaatatatcaccagaagatttatagttttgaaacaaggaccaagggcagtgagagagagagagagagaatttcagaaatctgtatttagaaacaagatggaacattttccagctgagatagcttttaggacagccaggtttgattcctttcagtgctgtggtttcatagctttcactctgtaattaaatgtgtgatgaggtatgccaaagtaaacagagaggaaagaatgcaggactagtcattaggaacaaagtttgaacctggggccaacggagggaatttcccttgcactgactttcttattcctggttaacgctatagtttcctttctggcttaaatttataactttttcttttttttttagctttatgctttccagatatatgaatacaaattcattcccatatcaccatcatcagctttattatatgctaaagcatagaagttaggtgacttgcctaaggtcagtcaataatttgggaaccatagagcagaatggcacctcgtgctaataggaataaaaacaccctcagggagatcagaaaaaggagagcagtgagggatgattaatgtttctagatgttaaaatatattataaatttactgtaattaagttagtgtatcactgatgcataaatccagaagacaaaaggctcgtgccaatttaatatattgcaaagttagtattttacatcatggaaaaccatggattattcaatgaatggttttgaaacaactggttaactgtgtagaaaaaagataaagttaaacctttaaattccacgtatattaaatatataaagtgaagaattaaaatgtaaaaccacccaaagaaaatatggaagaggtttttttttttttaagttttacagcagagaaggtctttctaggcataagacaagactcagaaccattaacaaaaaaaacttgaccttataaaaaagtgaaatttcatcatggataaataaaattcaataaaagacaaacggtgaaaaaagtataccaggggattatatttgtaag

SEQ ID NO: 10387 - DNA, 6000 bp, Homo sapiens
ttgcccacctccatcgatgcggggcttactatcttacaaagtgtttgccaatgagtcacagccatttaaggacatttacagagctctacaccctctttcttttggaggtcatacctcactgcataataaatacattgcaatttatgcactttccaaagaaaatataatttgtatatggctatttgacttaggcagctgactttgaccagctggcataatgttacatttgcggatgttcaattgaacatttaatacttgcaattttgtgggtttctttttgtattttatacctggcactttgtatgtatgtatgtgtgtttgcaaagttttttgtgtgtctctgaaaagctctgaggttcagagaagaagtccaaattcctttttctaggctggctgtgaccaccatcatcaccatcacctccaccatcagtagcagctgtggccacatgaactggataccagcactgccactgacaacactgtctcttcctccctctctattctctcccccagcctcattccttggaggttttgcccttctgccaaggtacaactttctcttacaggcagaagtcctgcaaccagctgggtcaccttaaagatatcagcagcaaacagataacacttgccaggaacatttatacccgttgattatcttatgcaacctctgctcttctgagaaaaaccaagcccatgcggtgccccacaaacccttgggcaatccacctggctcctgggaactttctaatatgagttcccaacttctcttttcctcactcagaggcttctgtgcacagaactgtcctccagttccccaaagcactgccccatccccacgcagcactctcaacagacattagacgtctggttatacattcttggcatcctgtacttccaacatggcacttagcataccttgttattaaccccatgtgcgccattctttctttctctgttggcccctgccgggtgagtataagcgccacagggcagggcccatgtctgtgtgcccactactgcattcagatgaggcttgttaagcattgttacaggcccaaatctggatatggcctggcaaagcaaatcaagaaccagcccaggcagctgtctgcctggaagggattttcatcatcctgatgtggccagtctttggccagcaatgagggtagggattaggattaatcatgtagactctccaagggtctctggtgggctcaagagtcttgagggttctgccccaggcaggtggttgcatttgcagcctggctgtggcggtgctctcaggcacactgctggtccgaggggaggctgtgggatttctgaatcatctattagtaggaccgaggacaggaaatagcctagtggtcactgtgagtggaagagtccctgtccagcatttcagatggatggccaggctacctctccttgattacctccaaagatggggaggtcatttccttcaaacaacatgtgtctcccctagtttcaaaatttttggacagcaaagatggaatcaatggccacaggctgaattcagtctactgaggagtgctgttgggttcaaacaatgtttatcaattttttttaagaagcaacatttaacaatcaggagatttcatgtaaaaagtctagatttccagttactttaaaaaaaaaattttctttgaggcagggtctcactatgttgcccaggctggtcttggactgctgggctcaagagatccttctgctttggctccctgagtagctgggattacaggcctggctccaattactcttgaaaaacagccctggccctcgttcccacctgtcccctttggattggagcctggtgctagaagcctgaccagacacaggcccaccagggagtgacaccgagcagtgatgccccctgcctggcctcagaagcatcagagtttgtcaccccgagggggctgctcctgggttagtaaaatttgggctccttggaaaagcagcatcaagtcacagaagtgtccagtcttcctgttctcttcagtccatgaacggtaaaggcaggattcctttagtggagctctagtgctctttgaaagcattaaaagggaccttgcttggatcctgatgtgaacataatcgtgggacaaaggcatcttgaagcaatcagggaaacttgaatgcgaatcgggtgttaggttatgttaaggaattgtgttccttctgtcattctgttagctgcagcaatgggagggtgccatgtgctcgtcagttagaaataaacacaaacactgaagctaggcaccgtggcccacgtctgtaatcccagcacttcgggaggccgaggtgggtggatcgcttgaggtcaggagtttgaaaccagcctggccaacatagtgaaaccccatctctactaaaaatacaagaactagccgggtgtgctggtgtgtgcctgtaatgccagctactcaggaggctgaggcaggagaatcacttgaacctggcaggcggaggttgcagtgagccgagattgcaccactgcactccagcctgggcgacagagtgaggctctgtctcaaaaaaaaaaaaaaaaagaaagaaagaaattcttacaagcacagttccaggatgccttggattttctttaaaatattcacatgaacgaacaaaaaatattatacggtggcagggatgaaagacgattggcaaaatgctgaaaatagtgaggctgggaaaaggggatgtggggttcatcattctctcctctctgtgtctctttggaacctcaaaaacaaatgcatttaacaaagcaggggccaggtgctgtggctcaggcctgtaatcccagcactttggaaggccgaggcaggaggatcgcttgggcccaggaggtggaggctacactcagtcatgactgtgccactgcactccagcctgagctggaggagaccccatctcacaaaacaaaacaaaaaccaaagcagggacctcctgaggaactgcacgattgattctttgtggacattgtcacactttgttccgtgattctgcactgagtgagtcctgccctcaacatcccttccatgctggggagctcccctctcccctgcttctcccaccctctttctggatttggacaactctgccatgaccttgctgcccttccctaagagtctttgagtgcctgtcaccctcgctctgcttctgggagcacgcgattgttcctggacagcctgcagaatggctggactcctcctcactgaccagcctgggcccttcctcctagccggcccctcaccgcgactctcatctcagtctccaggacctgatgaagaaaggcatccttcacagcagctgcagtgagttctagttcagctctgctgctaccagttagtcaattttggccagatgactttgctttgagcctcaatttcccttacttgtaaaatggggctaataacccagcctcacaatggagttgacacgtgtatggggtcaagatcaagacccttctagagccaacttcctgagtaatattcccctgcacccccaccctgcgagcaacagctgggggggtctctgcctcagaattctcaactggaggaaggaaatccctgcagtcccccgctgtctgactgctgtgcggagtcagtgggtaaatgtgtgccaagccccagcactcactactttgttcacacaccgtgagcataaatagcgcacatgtgtgatgcacaagcccacaccacagtgcttggcccacactggcacctgccttcctccagctccccaggtgcctgtgccctgccctggtccttccccttccagaacctcatccccacacagtcccagccctggagcaccaaaccatggcttttcagcacctggcccctgctttgttaaatgcatttgtttttgaggtttcaaagagacacagcagtagagaggagagaatgatgaaccccacatcccctttttccagcctattttcagcattgtgccaatcgtcttgcatccccgccaccacttaatattttttgtttgttcatgtgaatattttaaagaaaatccaagtaggtggcccactttctagggatgctcactctgcccaattagaaatatacagaacaactgtaggtataactgtattctcgacaataggcaatattgggaatgacctatatgttcaaaactagaagaatggttaaattatgtcacaacaaaattactacagctgttactatcacttcttggaaactatgaaataatgaggggaaatgcttatatttaagtcaaaaaatagcaggattcaaattgtaaggagacaatgattataactatgaactcctaatctgttaacttacaggggatgtggggggacagccaaaaccaaatgtatgcctggtaggacagactggatggtattagtggttttctttgggtggtcgtactggttattttgtcttctttgcacatttctttggcttttccttttctttttttggggggtggggggagggacggagttttgctcttgtcacccaggctggagtgcaatggtgcaatcttggctcactgcaaccttcacctcccaggttcaagcgattctcctggcttagcctcctgagtagctgcgattacaggcacctgccaccacgcccagctaatttttgtatttttagtagagatgagttttcaccacgttggccagactggtcgcgaactcctgacctcaggtgatctgcctgcctcagcctcccaaaatgctggaattacagacatgagccaccgcacccagccagcacatttctttattcaaagttttctacattgagagttaagtctacagtgactaaaaaacaacacgtaaggtacaaaatagtatgtataatatattcccctttgggccaaaaataagactatacattacatatatatatatatgcctttatttgcaaaaagaaaacctgggagaataaaccacaacaaatgaacaaaagaaaccccttctattttttgagcagggattggacagacggtggccagggtgcagtgaggcctttcattgtgtaccctgtagattgtacttttgaaccacatgaaggtcttatctactcaaaaagggaaaagaaaaaacaaccatttaatcagtctttagaagaaggcagtatggtcccaaatgagctctgtggatatttgttaaaggtgctacttcaaaaaaaggaatctggaggccgggcgcagtggctcatgtctgtaatcccagtgctttgggaggcaaggcgggtggatcgcttgagcccaggagttcaagcccagcctgggcaatatggtgaaaccttgtctctacaaaaaaaatacaaaaacttagcagggtgtggtgctgcatgtatgtagtcccagctacttgggaggctgaggtgaggaggatcccctgagctggggaggtcgaggctgctgtgagctgagattgcaccactgcactccagcctcagtgacggagtgagactctatctcaaaaaccaaaaaaggaatctgcgcctgagttcaagggtgagtcacatcaactggggtctctgttgcagacttaactgaactcgtcatcctgtgctgtgactgagaggggctgggggtggcagggcttccagagagcccaatgacgccccagatcccacctccacagagccttctctgagactgtcgcttccaggaacacagtctggggactgcagggcaagaaactcccacactggctcagcctctaggtagcagggcagagacagggatgaggctggtcctggggtctcagatcccagggcctcagggctcaggcaggcaggtgaaatgtggcaggctgcacccacagtgggggtgcagtgcccagctggatggggagccactacacagctgtggccactatgggctcagtgccatcagagctccacattctccagaagctggaaatctggatgttcagtaaaatcttctgggtttgaaataaaatgtcctaacttttcaatgaaatctcat

SEQ ID NO: 10388 - DNA, 6000 bp, Homo sapiens
gccaggaaagtccatttcctcttctgctgacctactcccccttacctcccctgagttctgagcacgttgcccaaagaacaggggctctgagtgagtttgggattggaggggaggggtgtgtatggggggggcagctgatggtcacgggtattctagggggaagatgtggggagggccgtgagcacctcctgcctggagttctgggcagtggctcaggaagaggggagggggacagagagagacacagagacagagacagagagacagggagacagagacagccagacagagacagcgagagacagagacacagagacagaaaaacagacagagacagatggacagagacagaaagagagacagagagagagacacacacagagaagcagagaacagggaagagaggggagaggggagagaggggagtggggaggggaaaggggagggggaggggaggggggagtggagggcagagaggggaggggacagcgaagatgagagagtgaggaggggagaggggaaaggggagaagggagaggggagacaggagagggtggaggggagaggggagagggaagaggggagaggggagaggagagaggggagaggggagacgggaggggcgaggggggaggggagaggggagagaggggacaggagacgggggaggttttcttcctcctgattatgggggcaccagggcttatagggctgggctgcccctgccctgtggagcgtctgggctctgtatggaggggccctgtctggggcccagagatgctgccaggggtggccgggtgaactgactgcggcccagtgcagctctggggaggggagtggccaccctgacgccacctgccccgcctctagcaccagaagcaaaggtggaggccaggaagccccgggaagtcctgcagggctgcagggaagaggggtatctctaagcaacagccacagttggtggctgggagcacttcagactccacatgaccaggtctgatcctgccagcagcacccatgataatggtgacttgggcaaaatgaaagttcacttctccctcactaagcattttgttctgaatttgttcatctgttgatctgtcccggcgaaccctcttgtctctgcctgagtgtccagtggcctctctgcaccaacggagttattccttgtccacgctgtcctatgcagcagccaccggccacatgtggctatcggcacttgagctgtagctgctgtggctgaggacctggattcttcattttttaaaaaaaattttaacttaaatataaacttcagtgaccacacaagcttagtggctgctgtcccagtgaggtctgggtgctgaggacacagtggggaagacagtccccagggagcctccatcccaggagatacagaaaacaagccaggggagagcacagagagggaggcagggacagctgtggtgcccgtggcggctctggtgcccatggcggctgtggtgcccgtggcagcagggacggctgggacagccaagttacaggctcagtgacatctctccattaggactgggagaggactgggggtcctactgcctagcacttgagaatgtgatggtattgggagggagctgtttgcagaggtcatcaagtgacagctcacaggggtgcatcctaattcaatataacgggtgtccttattaaaagggggaatttggacacagaaatagacactcacagagcagggacgatacagagacacagggagaagctggggcctgcaagccaagaagaggccggaaccggtgcccgcctacagctcaggggagcagcccagccacacactgacctgggacttcaggcccgaggcttcgagacgtgtctgtggtgtgcacagcctggctgcactcatttccacagcggcccgagcgtattggtataaacgtcccgtgtccaccctccccctcagcctggctgctctgaactggcccaggcccagcttgcccaccttggctgcagcccccaacggctctgcctcatgctgagcctcccaaggggttcccctcagaacattctcccatggcgtggtcacctagaagctactccgagctgtcatgccggtgcagtgaccacatccctccccagccagtgcttgtcaatggccctcctgggtgaatctcccttccctgcaccccctccgccagccacctgagccctccccggggccctgggctccgcccttgcgcctctcgttgcctggtgagcagagctttcttgtcccactggagtagagagcgtggagccagcggtgcgagttcctgagcacggggaactccgggattgctgggcatgctggcaccgtcctgaaccccatctccctgtttacagaatgacgcctccctccagggacagctgtggggaggggaagccagcagggagcaccccccctcaccagcagggggcacccactcaccagcagggagcaccgcctcgctggagctgcacctgtttcctcctcccctgcttaccagtgtcttccagacccggtgggggggaacagaaccgagggagatggagacgcaggtgtggctgtgtgtgcagattggcggtcaggattcacccgaggggccatggggatcacatgcctcatcgcctgggatgtgctggctggggcagggccacctttctcaggagggggatctgcctgggttcccatggggccctgctccctgcatgcaggtgggccggggctgcagcggctggtacgagacagccagccagcgatgggaaacagcgtttctggggggccttctgagggcaggacggcgcctctggggtgctggttgaggccaaggcggtggtgcctggtcaccgacctcggagcgtttgatgccctgagacctgggatgctctgggagacagaggtgcaggccgggcgtgtcctgacaccttccagcatgtcccggcctggtccgcatctgtgaccacagaggtcttcttggcacttcttgggatcagagccctgaggcccatgcatccggaaacgccgtttggagatgtggaaagtcccttttgactcacaaaatctgcctttgtctcagcaagtgtcccagaaccgtggggacgtagtggccctagactgggaagtggggctcgggaaccagattcagaattactcaccttccccaaagacacggggcctgccgggaggagggacgtgggtcacaaaagtgggccgtggccaccccagggtcaagcaagctcgccgtgtgcactcggggaaggcaggctgtgcggacgcctacagaggaacatgggggccactctgcctcctgtttcccggcacccacacccgctagggccactgcccaaacagttctcgaggcaacctcggttccaggttccggcatgtggcaccattgctgctgtgtggacaccacccctcagagaaggccaagccggcaaggcccaggcagtgtcaaccgccccagctcccagaaccgcatctgtcaggctgagccgcctcttggtttggggcccagggccctcgtgaggatgtagctgagcaccagctgcatttgcctggagtggttcctgccttccaggggctgctccccaccagggctgggcttgggtgcaggcactggggccgcacgtcctggggagatgctgttaccagcgagggtcccccgccaggatcccagccggctgccgtggaggccaagggctcacactttcccccttcctcttgcctacggaccatgaggactcagcagccacctggtgggctacgcccatggggatgaggagggagcccagctgtggggaccatcggaggctcccaaagtgcacctgctgccgcccagagccccccccccaccccaagcttgggtgaggggcgacccctgcagctgtttcaaagtcaagacttcagcttgctctcctttcagaggcctgggtggtgggtgcaggtccaaggcttctggccagtgccctggagtcgagtatccccggctcacctcagggcacatgttaggacccagcatgtgttaaggacctggtagaaagctgtgtgttgcagttgaacagacaccctggggctcccactgtgcacacagggctgtgtcgggcagtggggcttagcttcctgggcctctctctggagcccaagtccttctaagtttggaccttgatcctgttttggtttcaaggtttgtagtaaactaaacggtggcctccaaagagctacatctatgtcctgattcctggaacccgagaatatgaccttatttggaaaagaatctttgcatgtggggtaaagatctccagctgaagtcgccccagtttatgtgagcgggctctaagcccactggcaaatcagaaacagacgaggagagaggcacacagaggaggaggccctatgaggttgagaggtgaagcccgctgggcctctgggtagggtggggacttgtagaacttttctgtctagctaaaggattgtaaacacaccaatgagcagctctgtgtgtagctaaaggtttgtaaatgcaccaatcagcactctgtaaaaatggagcaatcagcactctgtaaaatgaaccaatcagtgttctgtaaaatggaccaatcagcaggatgtgggtggggtcaaataagggaataaaagccgccctgccctgccccaccccgccggcagtgggtggtgccctggggttcatttcaatgatgtggaaggtttgtgtttttttccgcttttccccttttgcaataaatcttgctgctgctcactctttgggtccgtgccacgtttaagagctgtaacactgcaaagatctgggacttcattcttgaagtcagcataaaccaagaacccactggaaggaaccaactctggacacagcgtgaccacttctgagaagaggaggggcgggtgccggcggctatccctgctccagggtcactcaggaaccaggagcccaggaaccagcccggcaagagagactgctccttctgccacagctcactggacccccttagggtgtcttccacagcgctggcgccgacatccatgattctcctcacagtgcgccaggccccggggagctggtgccgggggaggggcagatccaggcgcttgtgctgtcttctccgccagccagaccaagggttctgatgacgcacctgggcgagcagggagggcctgacctgcagaggccatgtccaggaagaggagccccggccccgaatcgcccagatgtgtggcccaaggacagccgtgcgaagtcctggggcgggccctgtttgccaagtccaggatgaggccatggacatgagtggggaccacccggaggggaacggggtcattcagtgcctgctcggggggtctggacgtccaggcaggttgaggaggagggggaaggtgtggacaacgggaagggaaggtgtagctggagctgaaggtggtcttctagcagtggggaccccctggggctgggtgcggtgtatttgacgtccctggcaggtgctgagctgtaaggaaacaaggtggggaggcaggcagtcagggatggagtcctggctctctgggccaaggttctttgtcattcgtggtctgatccttgtccttcggagtccttggtttctcggggcacagatggagggggctacgcaggaagtggctccggatcgtgcctggcctcgagtgctctgggaagagggcacaggtggccccgcctgtgatgggggcatgaatccttggagtaggggcagggtgagcttgagggggtgaaaacccgggactgcagcggcctcactgtggctgggtgtggctctgtgcagccagctctgggctgggaaacactggctgtagacacacgtgtgtctgcatgtgtgtcctggtgttggagtgtgtgagcacgtgtgtgtgtcctgctgttggtgtgtgtgcacatgtgtgtcctggtggtgtgtgagtacatgtgtgtgtgtcctggtggtatgtgtgcacgtctgtgtgtcctg

SEQ ID NO: 10389 - DNA, 6000 bp, Homo sapiens
gggcctgaaggcatcaccgagcttcaaggacccggagtccaggttcatggagccttggggttgcgtctcgggcagccatccgacctcgtgatcttcaaacttagccagcgccggatgctggaactccaagggctcgggcccagggaggccagagctggagcaggcctcacccaggcattcccgcgccggcccaccgccccgacccacacgatccagctttcctggctctgagaagcaccacttccgctgctggttggcgaggggaccccggccggcagttcctggcgcgggagcccgggagcgcgccggctccccctccccgcccgggtggctgagcgaggcggagcgcgggtgagtcgccgggggccgcgctgggacagtgggccgcagacgggcgggcaggctcatgcggagctccttgcgctggaacgacgtctcccggagcactcgccgctgcgcgccctgaagccgctggcggtaggcggccctcgaggccggcgggctgggcggctcggcagcctgcgccgcggcctccgcctcggccgccagcgcgtacagcagcggggtggcctgcctgttcagtggtcccggggtccccgggacctctgttggctgcggcccactgcgggctgcaaccgcgggccggggccgcggggatgtgcaaagggcagcgtcgggcggggcggggcccgggccgccccaaaccacacgcacgtagtcccagtctaggtaaggaaggaggtctgtccccggcgactgcgtgcgcggctcggggccgccggaggctgcggagaaagagctgtaggccgagtccgcgcgcatggacagatgccacaggtccaggctgctagtggacgaggccggggaggcgcggtcgcccccaggtcccagggcctccatggctgcgcagatgagtgctgaggctgggtggctgcgtgggtcctgggaaaacacagatgtggtgccgggtgaggagctccgggtgagggctgggacagcctgctggccccgccaccacggacggccagacacttacacttcccctccctggtcacaccgtcacaagcgctggcatcccccagattttggcagagtcaccttgggatcagaggtggcagaggaagtaggaccagtcccagggagcacctctgaaggttgagggcccagctcaggggaaggaattgggaccagctcattccctgccaggctccccttgcccacacaagcagcctttaccctgagacctcctggaacgctgagaatgtacccatgttcctttcctccccaaccctgttccacccaggctgcttcctggccgttctgttggcttctccatgtgatctttccctgataaacaatggtcaagaacactcttgtgacctcaggggagctaagaaaggaggggtgggggaagacccagggcaaggggcagaggcagcttcacagccttcctccctccctctgtgcctgttatgttccaggtgctttatataaatatttattttgatcgttgcaactgctgtctgcattttacagacaaggacaatgaggttctgagagggaaatgatttgtccagggccacacagctgggacgtggcagaagcctgcctggaatccaggcctgcctccacgctcactgcagccagaatcaatttcctagaagcaagccctgctgaaaggcagtttaccatccctcctgttccccaacagcctgaatcctccaaggaagcccacactccactatgggaaagtcacccctacctccccatacactattggcagattccaaaataatctggcccccacttctcaaactctgcctttcgtctaggaatgatgggccgacccccatctttgccctgcttctattcttgcttctcctgtaggactcagcttagaggtctcctcactttttgggactcctacagtgtgctgagctgacccccaccccacactgtccctgttggcttgcttctgattccctcctcccattcccacccctgagcttcctgagaatgggccctgctcttcctcattgctgcactctcagtgcccagcagagtccctggcatacagtcaatgttaaatatttgggccgggtgcagtggctcacgcctgtaatcccagcactttgggaggccgaggtgggcggatcactaggtaaagagatcaagagcatcctggccaacatcgtgaaaccccatctctactaaaaataccaaaaattagctgggcgtggtggcacacgcctgtagtcccagctactcgggaggctgaggcagaagaatcgcttgaacccgggaggcggaagttgtagtgagccgagatcgcgccactgcactccagcctggcgacaaagtgaggctctgtctcaaaacaaaacaaaacaaaacaaaacaaaacaaaaccccaaatatttgctgaatgtcaagggaaataacagatttgcagggagtagatgtaggggtggccttggtagagaaggaagagagttccttagcttctgcgcacgcttcttccctccctattagtcttttctggggaagaggacagaatgggtgaagcacttgccaccatagacactggccaggttcctcatgcaatattaggtacgaacagagcaggcaagcacagcttggggcaggactcaccagaaatcaatcccttctggtcctgggagggggatcaagggtaagagttgagtgggtgtgcctgggtcagggtaagagaaattttgaggcttgggaaagggcagtgttgaggtttggggctccctatgaactatggagacttttgggcgctggcctccattctctgagctgcttggtagggagtgcagagtagggtggcccacggctagggtgaggaccaaaaagcaggcttatttgagcctcctagacactatctggagctcagagtcaccctccacccacgtccctgaggcccaggatgttacagattgctggttagggcaaggatgggggttagtggtaggaggatatggtgtttcctaaaagggaaaggcagtacctacaacattcccaggagaggctctcagcagacctaggaccagaacatcttgatgtcacccacctgggggcatttgtatatgcctactaagcccaggagcttagccctcacacttagggttggggacctcttttgcaaagtatttccactctaaactttaggaggacaagaaactactctgagtagcagctcctgggaggacagtcccctcatctaggaagcccacccgactgctcagacattagccctttctcttcctactctttctgagtccagcttgggagcactagctcatgtcacccatcctgcccattttggcttgctgcagctacagatggggatcaccaaacacaagatgtttcctcaaaagaggtcttgaaaatctatgaaaatctatcttatttgtgagttactatgttaaaggattctgaattcagcaaataaaaacagcttgaatgggcaataaaaatgtgtctacacatgtgtttccttattgactgtaacttgttgaagatgcttttgcactggtggccctatcaggttgatgttcacgcaggctcctcacagtgggtgctttgcagaacctaccatgccaagagggcccagctgctttggtgtgttttggggggcctcagcacaaaacaacaaggcattttcatacttgtctggctgcagggagcctcttgcagtccagccagcccctgtggctgggggtagccctaccttaggggtccctgcctcagtggcagtggtacctgtgggctgggctgttatgcctgtgccggctgctgaaagggagttcagaggtggagctcaaggagctctgcaggcattttgccaagcctctccagagcagagggagcaacctagactccccgctagaaagacaccagattggagtcctgggagggggagttggggtgggcatttgatgtatacttgtcacctgaatgaaggagccagagaggaaggagacgaagatgagattggccttcaaagctaggggtctggcaggtggaggcaccagtctgaaaggaggagctggggctgaggaattgtcaagggggccagtgctccttcagtctgggcttcatggtgtctgtgacaagtcaggcagcagttgggatgtggctctggagttcagcaggggagggtagaccaggcaagacccaggtttttagttagaggttactggggaaatagctgaagacagtttccggtggataaaatcacaccaaggcaatgggaacagatccaagtaaggcgaccgaggaggcacaggagaacggacagcctcaaatacaacgaatgatcaggatttacatcatacctccctcaaggccacctcacatctgacctctctgtggaggggctatccaggccgcccctcccagcgggtcttccctcagtactgggctcactgtgtaggcgctgtctccctgtcagactgagttcctgggtactggaccacgtctcaaaacccagtacccgcagctgggtctggctaggcggacgttctgggaagttcaccggctctccctgtccccagcgtcccccgttctcccagcctgtccgcgctgacagcgcaccccacgcagcatccacgctccgagtgtgcgactggtttacgggctcatcggtcgctgcaccccagatgcagagtctctggagacccgagctccgtgccatgcacaggaaatgcaggaagctggcgacacccggggagaggcggccgcgggcgtggacagacccggttacctggggttcaatctctgggagccgaggcacgggagggagagaggcgcaggccccggcggccgcagggggcggcagagacacgcggagcggctcgacagcagatggccgcagccccgcgcagttctgggcctttcccgttgggttcaccgtcggggaaggatcgcgcgcaggggacagcgcgagcccgggagggaaggacccggcttctccagatgcttggcgacaaagggcaggagcggagggtggcggagtgagaccgcgctgcccgccggcgccacacgcggcgcgcccagccgcgcccctgagccgcgccgccagcttagagtgggccgcctctccgccctgcagctctgcagctgggagaggcgcgctggggtccgactccactggcgcaacctgacgcggcgccgagccagacacgtcccggccgaacgatgcccgggctgccccgcgaccaccgcctcgccgcccgctcttcacccccgtccgcccgcagccccgccggcctcccgggggaagcggacccagccgcccgcttcccgctcccccgcccccgccgcgtacctgaggctcccgccgagacgcgctcctgggccgtcgcagccgcgcggtgacatcagagccccgggctctgactccgaccccacctccaggctccggccgcggcctcaggggaggcgccacgtccggccgcgggggcgggagccgcagcctcttggtagcgtccgcgcgccggcccagtcccaggtctgagggtggacagtgcgttcccgcgcgggccacaggcctcttgccccaggccggagaaacctgagcgaggtggtgggagggcgactacggcgaccgcccaccggcctccagcgcgtccgtgatgctcgggggccgggtccctcggggcctgacacctccctcggtggggaggtccagggcgggcccttaggcgcctgacggctacccgctttcccccccaagcccggccaagaaaacagagctgccagggcctcgtgcctcccacctgtcccgctgagtaactcggcccttgatcaactctacccccagacccccatttccaaaactcttccagctctttgactcccaccatgggctcttgtctcctgttccctgtcccatttctttccatttctcccactacccagcatggtctgggccctccagcctgctaccggggtgggggagaggggggcggagca

SEQ ID NO: 10390 - DNA, 6000 bp, Homo sapiens
accttggcccccgcccagcagtgtgaacagaaccctgagcgaggccacgcagcctccccaggcagggagagctccacacaggccgagacggctgtgacaaaccagcccttcccccacccgatggctctgggcctccagggtgaccggggccaattctggctgctccgagccctgccagtctaggcggctccacgttcaaagcaaaacaggtggaggttccacagacgtgagaggagctgagtgccccgcacatccggaggcagcaaccggccctcctcctgccgccacaggtgcccacctctcaggctctttgaggctgcgtcaggagggggccaggctgtgatccaacccagctgaaggcatgggcctgcccctgcagtgggtccccagcaccactgggctctgcttcacccctgggctcagcgtggcccccaattccccaaatgtctggagggacagcaagcccagcctttgctcacactcaagaatgtggctataacggcaaatgcatgagaacatgaatgaccagttttcagagcacaccagtaggagttctgaacttattcccatgaacaaagctgctgttctttggagaaatctcttggattcttttgagaagaaatgctgtcggcagtgagtgcgccaacagagctgtgttcgcccccacggatgggggcaaattcgccaacccccgagccctttgctcagcccatgaatgggggcctccgggagcacgatgcactttgagctgtgccaggaggggccctggctctgaactcgagagcctccctaagtccccgagcgtcagctcagacaaagcccagcacggcagcccgttgtcacggctttcaggccgtgtttgctctgagcctggcctgataccactgaactccaggcaaggcggggctcccggccagctgagatggcggctgttttcaggccgaaggggacctggcccccagtccggcagcctgagccattccacagctccagaggcttctcgtcagactgccctgtgagctgagtgtcctctccatccaggaggtctgaggtgcaagggctgggcggtcaccgcctgacacaggtcactcaggtcactctgacagtttcagggacgcactgaggtacatggcatgggaaaggccctggtccagctcagagccactcacagcgtgtgccaaagccacgtggggaaactgaggccctggtccagctcagagctgctcacaacatgtgccccaatcacataggggaaactgaggccctggtcgagctcagagctgctcacaacatgtgccccaaccacataggggaaactgaggccctggtccagctcagagctgctcacaacatgtgccccaatcacataggggaaactgaggccctggtccagctcagagctgctcacaacatgtgccccaaccacataggggaaactgaggccctggtcaagctcagagctgctcacaacatgtgccccaaccacataggggaaactgagaccctggtccagctcagagcctttcacagcgtgcatcaccacagccgaatggggaaagtgaggcccgtcgatgtccaggagaccttgcccaagcctggtgaggacctgggcctagccagctccagagttttcttcttctccccacggcaggcatctgaccagaaataccagggatctcccggcctgtctgagtcaaagccgaagctgcaggatggggcagagtggagagctgagcgctcctggggagggacagatctgggatccagcgtgagctaagattgactgaacagctgcctgagagagcaattccgtccatctccagctgtttctatggaggcagagtggaagggctgtggggcaggcacagaggtgaccccagccagagccacccccactggcaggtgggaatgcccgccggtgaatagcggcaagtgtgatggtgcctgcccactgcacacctggtgcacacacgtgtcaaccacctagagcgtgcccagccctgtagccaagggactcaccacccttgctctgcggggggtgctccaaggcacagtaagactggtccatgccaagtgagggcagtgccggctcggccagccacctgctccaggtctcagctcccgcagctccacctgacttcccggtgtttctaggggtctgaggccccacaccagcaccagcctccagctagtggcgagggctgtcgctgtgtctccaggcagtgaacgagcctctggagggtccctggaggggaggagagggaggacaagagcgcatctcgtggaggaggggcaaacacaccctgggggtagatgcaaggctgagccaggcaggccaggcagtgtctgctggggacacacgccggagcccctggggggccagggcctcaaaggaagccggaggaggagacctggatgattactcaagtgtgagagactcaaggacacccgctgcagccaaattctgtgtgaacaatgatttggaacgcggccgcgcagaggtgagccggcctgggtggtggaatgtggcatccagtccggccgcatctctccttcctggcgactccacgctcacaaattgcctgcgcatctcctctgacattcgtccccctcgagggtctgcttcccgtgtgctgcctgcattcagagggtacgtctgtgcctcatgcagaaactaacaccgctcaagcaaacatttgctgaagggacgcaaattataaagacgccatggggaaatgaaccgagtccaggaggcagaagaaaacacatccaaggacccagagcagagtgagctcgttttcctctgagcaggtctgaagccgtgacggggcgcacaggccgcatccctgagcatggcgggcacgggggcgatgagagggagaaaccttgctgcccacacaggtggagaggctcagctgcagcgtgaggatcctggggggctgccgtcagccgtctgcatgttattaactaagaaaaggtcttggaagataaagattttcagacccaactggaacaaaccagcacacctagagctctgcgtccctgcatcctacgagtcccgttgagtctgagcagagcacagaacacagaactgcgtcaatgactgaggcagattcacccacacagaccaggttcctcctacaaagcgccttttgccaaacataagaggactgaggtccaggttcctcccgcaaagcgcctttcgccaaacataagaggactgaggtccaggttcctcccgcaaagcgcctttcgccaaacataagaggactgaggtcacacagcctgtgttctctgggctgagtggaattacagtagattcagtaagagaaagataagaggagaatctccaaatgtttagaaattaagcaattgtggattaagcaacacacttctaaataacccatatgtcaaaggagccacagtagaaatcagaaaatgtcttgagctgaatgaggaacacacagcatataaaagcgtccaggatacaatgtcttgagctgaatgaggaacacacagcatatgaaaaagcctccaggatatgcaaaactagccaccaaagggaaatccacagcttattgaaaaagttccacatttaaaaaggggaaatgctgaaaccaatgacctatgctttcagctcaagaaactagaaaaaggacatcaaaataaaggcaaagcagaaggaaggaaatcatagtaaaatgtatgaaagagaagacagatataaatcagagaaaatcaacaagaccaaaatctggttctgtgagaagatgaataaagttgataaacctcccagcaatgttgatcattaaaaaagagaaaacaaaaatcatcgccaggaggtacaaaagggagacatcactgcagagtcttatggacacaggggagattacaatcacattatgtgctttacatcaataaacatgaatttttgatgcaatgaacacatttcttgaaaagtacaatttatcagaattaagacaaaaagtcaaaaaatatgatttatcaaaatggacacaaaaagaaaagtccaaacagcctaatatttattaattaaatccatcatttaaaacctttccacaaagaaagctccatgtccatttggtttcactgttgaattatcctataaatttccgccacaccccttgctagatttttttttcctaggtatttcatatttttgatgctgcatgaatagtactgttaaattagctttcattttctaaaaagtgtgttgttcgtgcatagaaacccagttcacggtggcttgttggctttgtagccagcagccttgctgagctaactcttgccggttctgagagtgtgcgaggaagacctctgtgctgcctacaggcgggagctgtcttgcatcctgaagatggggctgagggtgggggccggtggccgaggttcctgcctcagaggagccttcctgagtgccagcacctgctccaaagatgaggctgagggtgggggcaggtggcaaacgttcctgcttcagaggaggcttcctgagtgccagcacctgctcctgccggccttacagatgctacctatcagcttaaaggaatctgcttctattctacgtttcccaagggtttcccctcccgaaatgcgggggccacaggcgagcgccaccactcggctactgttttttattatgttttttagagacagggtctcactatgtggcccaggctggtctcgagctcccagcctcaagtgatccttctgcctgggcctcccagagcgctgggctggtctctgcacacggttggattcggttttagtgcttccagttgtgttgggcaacggggtgggcgggtttgcccggggcggcgcggtccctccgggtctgttggtgcccggatcccggagccccgggcggggggaggccactggcttcgcgcgtgaccgccaggtccgcagcgcctttcgtggccggagacggggcgaggcgaccggaggtctcggcccaggggcgcgggggagcggggcgcggggcggggcggcggccgggagaggggcgtccacgggggaggtcgcctgtccgcggaccgctaagacaccgcagcagaggcgtccggggcgggcggggcgggcggggcgggagggacaggagcgagagggttcgtgcgctcagcgggacggaagcggttgcggatgcacatgcggatgcggagagaggcccatggcgagttcggcggcgtggccggccgggctgtccccgagggcggaagggaggacgcgcgaccccgacgggcactgacgggccggccggggacggtgctgggagggcctgccgggccttgccaggtcccccgcgccattgccctggggtggactgcggggcacagagactctcctgcggcgccgtccccagcccttcgcccctcccggcgcagcccccggcccctgagctccccacccaaccccggggcccctgagctccccacccaaccccggggcccctgaactccccacccaacccacggggggagctgccgcttcagacacaggccctgagctacccccgcaggggtgtcacagtgggggggtctgactccaacccgggctggtgccctcagggagccaggaaaggtgagtctccgcgggtgaggagaccccaggcccaacacggacaggacggaccagagcgcgggcctcaagtcctgcaggccctccagctccaggctggtcaagagtctgtccatctctgaagaagaggaaaggtcccacctgaggcctcagaggccacccgggaagggaagggctgagctctaatctgcttttgagaaagacatttgtatcccccggatccaacaaccaataagagtggcattgacgggaggtggcatgacgggggggcgcggtggtctctttcctggaagggcatctcccagaggggcctcttgcctgaagctgagatgtgcctggcacacagcaggtgtggaccaagggaaggccagcaggtgtggctcccagtggaataaaaccttc

SEQ ID NO: 10391 - DNA, 6000 bp, Homo sapiens
tgcatcagaatgacctggaagtgctgattaaaacacagattccgggcgggcggcggtggctcacgcctgtaattccagcactttgggaggccgaggcgggcagatgacgaggtcaggaaatcaagaccatcctggctaacacggtgaaaccccgtatctactaaaaatacaaaaaattagctgggcgtggtggcgggtgcctgcagtcccagctactcgggaggctgaggcaggagaatggcgtgaacccgggaggcagagcttgagtgagccgagatcgcgtgactgcactccagcctggtgacagagcgagactccgtctcaaaaaaaaaaaacaaaaaacaaaaaacaaaaaacagattccctggtacccccaccacagacctttccagagaagtctctgaggctgagcccaggaatttactctagtagccaacttccgggatgactgtcgtaaatactacaatttgagaactattgctctggaggctgaattaagcaatgagcatactgatgaatactcacttttgaaaagcctaaaggtagacctccatgaaaactattcgtaggatttcctttcttcctttccttatcttaaaatgatataatctttttgaaaaaaaacccacaaacctgcgtgtatatcatttcacttcaatgcataaatgtgacctatacctgcataaagactattttcagttttttcctttttgcatggctcccaccccttttctctgcccttgtctccaccaggcccctagtaatctgtactgcaacctccttgataatccttcatatatacccacaaacatatatacccaaatatatataaataggtgttgctttttatattactaaaatagaaacatcttttccatgcttttctgtaccttgcttttctcactcaaaaaaacctaaaggaatattcccatgtcacaaaatttgactctaatttattcctttgaatggttacatatgacttcacagtatggataagtcataacatactcagtcattctccattgacaggcatattttgtcctagcttcctgctgctataaatgatacaattaacaaccttgggggcagggagtggtggctcatgcctgtaatcccggcaatttgggaggccgaggcgggtggatcatgagaccagcctggctaagatggtgaaaccccgtctctactaaaaatacaaatacaaaaattaactgggcatggtggtgggcacctgtaatcccagctactcgggaggctgaggcagagaattgcttgaacccgggaggcggaggttgcactgagccgagatcttgccactgcactctagcctgggccacagagcaagactccatctcagaaaaataaaaaaaaaaaaatccttgcatattatacatgtgctttatttctagtggatagattcttactcctaggatagagaagtgtatgtgtttgctacaataacaattaatattagtaattcctgcagggttttatgtattttcatttttgataactcctgctaggtttctttccaagtaagacagtatttatttgaatggtaatttttatgggtatttacttgcctttcacaatttctcattataaaaatttatattgataagtgaggtgtaattagttatatacatttatattattgaattttaaatgttcttcattttacaagtaccaatttttccaagtaccctagtagtctaccacctgagtttcattaaaattgcacaaaacagaaaaatacatattagttctgagatgctataggggtataagcaagaaaacaaaacacaaacaggctgccttctatgaaactatcttccaaatattttagatcagaagatggacaggtagatggatagacagagatatgaaaaaaaacctccagtatttgttttgacttgccagccaccaaatctggtagggtcagtttttctgtaatgttaaatatgcaggactggtcaaggtcaaagaacattttctgggaacaatagccattctcttcattgtttttttaatgacatggagaaggaaaaaaaaaaaaggagagagagagagatgtgaccttactaggtccacttcaacaaatccttgtttgattttaacatctctaagtgtccagcaaggcatcaaaggcacacaggcagtttaccttacagccagttccaaagtgccatttacaattcaggagaaatgacaggcttcaaaaggggcagtttaaggaagacaagagcagtagagagggggatagaagaagtgatggagaaggaggagagaaaggataaaggattaggtctgtgagctaacagaggaaaacagcttaattatggaagaaaagacacatgcataggataggtcgaacaggcagagttgctgtggaagcacattccaggaaaatcttaagagattactttaataataaaccatgcattcttcagcaagccatcacgggattaactacccctttcctaggctgggagcacagtcatttgttttattttattttttccttctctctcacaggcaggttttctgcaacggacaattgccattcaaagactattgtttttcaaacattgaactgacttttcctccccttaattttctaaacataaatttcagtggtgataagaaaagaccattatttaggcagggtaaatatctgggtgggctttggcgtgattctccagagggaaagatgttcattttagacttgttgaaaagtgaacaacttagatgagacagagacaatgtttcacgagggataaaaagagttaaatttcttttctttttttttcttaatgtgagcaggacattgaattactgccagaagcaatatcggtgccctagagatataaaaatacagttcaaaccagaattctccactgtcgactcttcagatttctgtgcaaaataagaggtgtctattttaagttgtaagtgtgagcccactgctcttaaatgaactgttttcatcaaagtcttctcttgaaactacaactcatagcagatgaaatcattttcttcctctggcttcttagacaaatcccttccatttggtggggtagagcaaacataagttagtatttcttggtaagagtctttcaaaaaaaaaaaaaatagaattgagtgagcacttcttagtctagaaaatattacatattgaggttaaaagagacacccatgtctttctaattatcaaagtctctatttgcctgaagtcagcagccctttttccagctacctagccaatagaaatgaaactggacttctagattttagaaacaaagccttgtgttctaaaatgtactagaattacatttctctgcataaatgttataaatagaatactatcctaggactaaaatttgtatacttcctgtcattcacacaaagtcattttttaaaatagcaaattacctctgaggaatattgaaaactgccagcatggccctccctgcctccacacccctaggtgtgtcaggggatgagaaatagtagaggctggggaagtagaattctgggccagctgtgctgctctgcacccctcagtctccccgaacaacggttgtttcaagcctgacctacttgagagcagacattgccactcacattgagctaccccaaattacacagtggctttgcagtcgaggctaggcacggaccacaaaatatatccttgatgtcccacgagccctatttgaaccctcagtttccagaggtaaaatgcaaatccactgtgttgcttactcgataaaatcaataaccccctcccatccgagatacaatttagcattttcacatttactacgtgctgcctctgactttaaacaattaaatttttttcttaaaaaaagggaaaagagacacgtctttcacaagagtaatttcagaattctccaaaaagcaacagagcttctgtggatgttttacaataattcttgattttaaaatatggagaaaatgaattctcagcttgttaacactcattaggatttgctgcggagtaccttctaccgctcagcactctacgttaacatttttaaatattttatttcttgcagttcatgtttttcctagagttataggaagtgctatggaaattcatgcagataaagtcatgttatgtgtctacatataggtgtatatacactgtaagggaagcctgtatagaatctctgattgtatcagaattataacttatttgataggctacatagacgtgaacatgttttgctcatatcgatttcagagagaatattatttttatatccatatatatgattatatttcataggtaaatacagtatgtttcacatatgcacacatagatttcccactaacttaagcgcatttgcatctgcaatgagggagacactaatttcttctaaggggagcaaatccaatcgcgcgatcaactttagaaactgcagatctgcgcaggaaccgttgtcccttgtcagaaaagtcaggagtaaaggcagtcctttgttcaaagggccccaacgggttggttaggatgactccgtgtgccacatcactcgcagtggcaatccagggaacggatctgtgaaacgaagctcggtggatcccacccctttcctccagagcttccctttcctgtccttatttgcacccgccccccgcccgcgtcggtctggggcttttgacttctccccgaacacatttcccctcccgtcgctgggtccctgcgatcgcccccagctggtggggctcgcggagctcaggggagcggggtcctctgcgccgctgcagcgcgagttaataaacagttaagtttggaagactctgcagacacgttgagggggagttaccaagcccaggcagcaaaaacatcctggcacattcctggggagtcctcagctgccagcatctgattagaaccatatctctcgccgggagtggccgcgcggctccgaagctcccggccggcggctatttaagcgaggcccgccgcatccgctgcgctgtagcctggaggctccgggcgcggggaagtcatgctcgcttcacggaggcaatagctagccggtgagtagcttcgaaacccttcttccctctggctccattttttttttaaagatctccttctctcctttgctccccctctctcacccccccgccccccgctacccttctttgagtacagaccttgggctgtggggaatcttagaaatgagaccctgtgcttggggaaaccagcagttttgtggcctgacatctgaggaatgcttccgcggaatgtatttacctttcgaatccgactccagatgcccagcttgtgacatttaacaaacgcctccttttgtgtcgtgtgtgtgtgtgtgtgtgtgtgtgtgtgtgtgtgtgtgtgtgtgtgtgtgtaaaaggtctgcgggcagccctcctaggacactgaggtggctgctgaccgcctaattaactcctcgaagggtgtttatttttgctgtgtgacaaaggctggggacctggcttgtgcccataaggagctttttcctggtgactgacaacatatggcattaaaatgtgaacttttgtcttacaccggcattcctaaggaagtatctacccaagggacttaagaaacttgttttatatcccccggcgcagggagcatggtttatatggtgcttgcctgcctgttgtaagctggttaaaaagattaagtaagaattctaaaaaaggggggaaaaatgaatgggttaaaaccgtggagcctcagtcaacatagcggttttcatagcatagagctgactctgttatttgtttctgctgtctttccctcttgacttaattctgagcctggaattctggtccgcagacagtttcagcagggagctgagtccaaagggaaattcaactggattaaaaacacttaaggaatctgggtgttatctccaccccaaccaccccccaccttttcccctttctttttagtttttgtttggaaggaagagagccgctctg

SEQ ID NO: 10392 - DNA, 6000 bp, Homo sapiens
aggagttgtgagtattaaaccagaccatacatttcttatttgtctattcatcaattttttttttctggtggtcaggaatagcagtgcaaaaaataaagtctctgcctccatggaagatacagacaataagcaactcaacttagaaatataaagagagtgtcaggtcctgagaagtgataggagggaaaacacagcagagtagacagggtgatggaggatgcagcttcagacagggtctctgatgggggcagacacaaatgaagcagtgggggcaagccattctgctctctaggggaagagcattttaggcaggggaacagcaaagacaacactgagagtggaaccagtttggtgtgtttggggaatggccagaggccagtgataaaggaaggtgataaaggaaggagtcacagcaaatgaggttagagacgtagctggatcacctggggccgtgatagccatcagaaagacctaggatattattttaagtttgttggaaaaccctaacatatgtgaagagtttcactaaaacaggtatggaacacttcctatgtgccaggcctcttctaggcactttattaattcagtcctcacacaactctgtgatggggcccagaaggtgaagtgacttgtccacgatcacatggctggccggtggcagagccagaatttgaactaaggcaggctaccttcagattaatgttcctgactttcttctccctttgctcaatgtctggaacataggaaatactcatgacctgattttactgttgctgtttcaactcatcaatggcttcctgttttcctagaaaaacatcccgactccccagtagagtctgcaaactctgctgccgtggctctgccgtcttctgtggccacttgctcccttcctcaggctctatcctccaggcactgtggtcctgcagcttcctgagcatgtctaccctctgccctctttgggaacttcgcacatgctaaagcctctgcctggaatgctcttctttccagggagcctatggctagtgttgctcatcctcctcttctcagaggagacttctgacccacatacctaatagtagttcctgtgattatagtagcagcaccttgtgattttctttgttggtttcttgtttcttcatgagcttgttacgtgcagattatttcatgtatttatttgcttgctgttttcgttttgtatctcttatctatgagactataagctccatttggcttgtttccttgcaatccctggggctaacattcaaaacattttttgaataaagacgtgaatggacaaattattttttaaagcaggattttataggaaattcaaatgattttttcctttttcaacaatacatctagttggagatggcatgattgaagtgtcatattcagttacatcaaagtgctcatggtttctttccctgtagatgaaaagattttgagttttgcacagtgacaaaacaaaactttgacttacctttcaaaatttaaatccctaattttatgcattattgacagttctttcatgttgctaccagttataatttgttttttctcatgggatgtattctagaagtcaagagacatctaaataattatttttctagcctaaatgggtaatattatatgcaaatgtttagaaaacataattctttgatgaatcatttattaattaatgcattaatttattcaaacattaattgaatgcatctatgaaataggtattgtgctacaccctgaagcaaaaagatatgtcaaatgctttcttcccaataagtttataatttaatgagaaagacgattaagcaaaattacagcccagtatgacaaacactgtactagaaggaagcccaagacattgtggagtatgtgagggggcagggaacacatgcccagggtggcttcctgaggatgcagctgaaatgagctccgtaagccaaaggtgaagcaggaatcaggaatggctgagggaatagggtgtgcaaaggtgcaggggtggaaacagcctagaacattccaggagctccagtcagagcagttagcgccaatcctacatgtacattctcaaagtgctctatgttggcaactacacaaacacaagctccattgtctggctctcagatccctccacatgttgaccttaccccttctccaggagcttctctctcctccattcagggtaatcctgtgcatgctatacttattccaacctgtaaacctttgctcatgatattccttatccataagcccccttcctacctttcatagcccgtttcagctattgcctcttccaggaagccctgtctgattatacctgtccatggtgatcactcccagttctgaactgattttggtccctaaagacaattccttaaaaacccatttcattatcttttaattatttgggggtgttaagtttgcattcccaactcatttgtgaatttggtaatggtaggtaccgtttgtgactttaaattttttgtctagctcagtgggccatgacaaacactttcagtcagtaccagaacttaattaatattaactggacacttttttcatgggcactgctgtatgctgattgtggtttgtagtccctagccttttgtataccgggtgatcaaatggacaagttttatttctcctacactaacttatcttgtgaccttgaacaattaaaaacaatcaactagatctgctttctatatcaacatgtaagcgtcactggaatgcaaagtcgagtggaaatagcaacttgtagaatggtacaacatgatgcaatttatgtaaactttgaaaaataacggtatactatatttttaatgagtgtaaacataaaaaaaatttttaaatggactagaagaatatacatgcagttcatggtaaaggttgacactggattaggagaaggtggtcgaagaagattatactatgatctattttgattttacaaaataaaacattctaagtaaagaagacaaaatattttcaatggttaatactatttttccagtggttcatatgttattggattgtttgttttattagtctttatatttttctccattttaaacacttctcaaactccaaatcacacataggcacacagaaattacatgtgtgtttacagctggaacatttaggaaaattggagacaaggaatgtgtagatatagcttgaacagctcaattattgtgagtagaaaatttttcttgtaaaatattcaagctcctgctattttaccattatagctccttgtagctcaagatacaattctagtaaaaataaattctgtagcctttgcatggtctttggttttaatgtaggcttcctgagttaatgtgggagctgccctgaaggacttcagctcactctttctgaaccaacagaagctttctctgtgtcttttctgaactgtatgatttcaggtgaggttaatgagcattagttataccagtaggtggactatatgggtcctgaatttcaatgcctgaacccttgtcattttaaggttgatagtgactcaggagagttacaaataagtagatagcatcaaggggctgatcattaacattctcataaaagctgagagggtgggtggagggatcagcagtgatctagagcccggaggacctgaggacatcaccaacttacagggcctgaattgctctcacttaaactcacatcagtggaaaagatgggaagactttaaatgaacagattgagctgattcaacaagactgtgtgaccttccaaccaagttcagcctgaggagataataaagacacaatcgaacccaaatgagagggcccagttgttttaataataactcacagagaaggaagtttctttgaaatccaagtctgcttaggctcctagaaaataggtcttgaagtagacatttaaaaattctttaaaattatgtatgaacttacattcatatatgtatgtacttgcatttatatatatatatatacacacacacccccacataaacaggtaaaacatatatatgagtgatatacatgatgtatatatcgtaatatataaatatatataacatatataaaatatatatatagatcacaacaaatacagatcacaacaaatcagtcctatgatcagtaaatgcatggtgagtgattgtcatgaatagacaagcttagtaatgcttttctcctgaatttcttattgttgatgaatatttgttaatcctcctgaagtgggctgaaatttcaggacaaagggtaacaactgggacaaccagggaattggggatctggggaaggataaggaatgacaagtctcccacagccaggagagctcccactgtcaccagcatattcattcttgtctccccagctgggcttacttgtggagcagccacttgccagtctctgttctaggcactagacatacaccttctcatggaatcctcaccgcaagacccataaggtacaagtacctcattttcagaactgaaggcttgggttaagtagctttgctcagttaggtaaccaagaggtggcagaggtgggatttgaccttcatttggctggctcccgatgcctgcattaataactaccagtaaggataattttgaccacaggcaacagcagatggaaggtgcttcctctctaatacaagggagaaacatcaccattcaggacagtttaggctgcaattaaaggtatatacaggtataaacaacctcagcagttttaagaaccatagaatattcatccaccatgtaaagatgcttccaaaccacacacctgagataagaccttttgggtatctgctctccactgggtagaagacagagtcttctggggaatgagcatggctttggagccagttaaacttgtgatcaaatcccagtcttgccatttaaatttgcagccttagaaagttacttaatctcactgagtttcagtttctgaagctctaaaatggtgacagcagtacctaccttgcaggggtagtctgaatactggagagaaacagcaagcagcacatggtcagtactcaatggacagcagttattattattaataacaccaattatacatatttgttggacattgaacttacagaaaacagtgcactggacaaaatagacctagacccacaggtggacagtacagagttccctgtgaaaacgcccttgcttttgctgaacaagggcgccgaggcttaatggaggagcacacggtaacctccatccaaattttataaggtggttgatccacagaaccttgaatggttaaactttaatagccaacagttaacaattactttgtgccaggcactttttaaagtgttttacatatattagtcttttaatcatttaatcctcacaataacaccattaggtagataactattttggcctcattttacagttgaagaaacaggcacagagtatttagatgtgttgcccaaagtcacaggccttaagtggcagagctggaatttaaattctggcagtccatctccaaagacctggaacacttgggggcaatacttggcatttacagccctgcaggttttgctattgtgatagagttgtgtgcaaagcaaaatggcagctagtggaaggagttcctccacctcagcaatacaaaggctcactacccagagttaaagacatgcttcttctcaggatgacgtcactagcatctaattttagagccgttaggtagcagggattctaaccaatatttactgaaatcaaactaaatgcacattttaacatcttggaaatatatttgccttagtgacatgctaagtgggtacaatgtcaaggcaagatcacagacgacaacatctttgttagccatatacaggccagcttttgtgatgttatttttttggggaagtcgtgtgttttgttgattgatttatataaactccaacttcttttatgctgcaaattttgcttgtttccctgtcacaaatttatcttgtttgtagtacagagtgttctatggtcca

SEQ ID NO: 10393 - DNA, 6000 bp, Homo sapiens
acaggcgggagctgtcttgcatcctgaagatggggctgagggtgggggccggtggccgaggttcctgcctcagaggagccttcctgagtgccagcacctgctccaaagatgaggctgagggtgggggcaggtggcaaacgttcctgcttcagaggaggcttcctgagtgccagcacctgctcctgccggccttacagatgctacctatcagcttaaaggaatctgcttctattctacgtttcccaagggtttcccctcccgaaatgcgggggccacaggcgagcgccaccactcggctactgttttttattatgttttttagagacagggtctcactatgtggcccaggctggtctcgagctcccagcctcaagtgatccttctgcctgggcctcccagagcgctgggctggtctctgcacacggttggattcggttttagtgcttccagttgtgttgggcaacggggtgggcgggtttgcccggggcggcgcggtccctccgggtctgttggtgcccggatcccggagccccgggcggggggaggccactggcttcgcgcgtgaccgccaggtccgcagcgcctttcgtggccggagacggggcgaggcgaccggaggtctcggcccaggggcgcgggggagcggggcgcggggcggggcggcggccgggagaggggcgtccacgggggaggtcgcctgtccgcggaccgctaagacaccgcagcagaggcgtccggggcgggcggggcgggcggggcgggagggacaggagcgagagggttcgtgcgctcagcgggacggaagcggttgcggatgcacatgcggatgcggagagaggcccatggcgagttcggcggcgtggccggccgggctgtccccgagggcggaagggaggacgcgcgaccccgacgggcactgacgggccggccggggacggtgctgggagggcctgccgggccttgccaggtcccccgcgccattgccctggggtggactgcggggcacagagactctcctgcggcgccgtccccagcccttcgcccctcccggcgcagcccccggcccctgagctccccacccaaccccggggcccctgagctccccacccaaccccggggcccctgaactccccacccaacccacggggggagctgccgcttcagacacaggccctgagctacccccgcaggggtgtcacagtgggggggtctgactccaacccgggctggtgccctcagggagccaggaaaggtgagtctccgcgggtgaggagaccccaggcccaacacggacaggacggaccagagcgcgggcctcaagtcctgcaggccctccagctccaggctggtcaagagtctgtccatctctgaagaagaggaaaggtcccacctgaggcctcagaggccacccgggaagggaagggctgagctctaatctgcttttgagaaagacatttgtatcccccggatccaacaaccaataagagtggcattgacgggaggtggcatgacgggggggcgcggtggtctctttcctggaagggcatctcccagaggggcctcttgcctgaagctgagatgtgcctggcacacagcaggtgtggaccaagggaaggccagcaggtgtggctcccagtggaataaaaccttccttaagaagacctggcccctgacaactttgggttgaaaaataaacttagagtgggcagtgatgcctgtctcctgcctggcttcaagcattggaagttacttaaaaacttaactttcttctcttaaatattgttaacaacagtatgaatggatgcgcctcttcatccacaagacactttcacaagccgtatgtggaattcatgacaggaaattaatgtgacagactaggtgttttcagttttattttcttaatcctgaagttcagatgctgtggcagctgggtataagattacagttgttttccgactggcttttgcattatttccacatttttgaatgttttacagccacgccccttccccatacgtgcagggggtccctggaccacaaggggtccaggccacggtggaaggatccagaatgctatgcgtgcctgcctgaggcaggaagtggtcgggcagttatcagatcgtcaccacccacaggacaggaatgttctcaggatacttcccaagaccccctcacacacacacacaagtctctgggtctttttggccatgaggatgtgcaggttgtgcactgtacaattccaaggggcacggttcatacagtctgcctgatatggatggtggcccctgcagtggtggggtgccacggccctgcctaaaaccacgacccagttagagggagggttttgtggctccagtccgagggtaggggagtgggtgtgcacaccctgtataatcccctagactggcttctgcatgaggctggcatcctcaaggccatgcccatcacaggctggggcagcgcccgtctgccccgagccctccagcaaccttggagtgcagacgcatttcatcctccaaatgctcacagattgagatgctgccaaacagccacacttctcacctgtgcagggactcgtgggcagtggggtgtgccctggcaggactcgtgggcagtggggtgtgccttgttctggccacgccacttcaggggctcattgcctttctattctccatgaggcagcccttcctgctgtggggggcagtggaggtgtgggcagcacactacctgatggccagcgcctggcactggtgtctgttctggatttgtccttccaggcagtgacactgctcttctgccctttgaacagctttgtggagaaaggttgtcggctcttaggacaggctggttggggggtggggtggccggaggtccagtgggcatcatggaacacactggtctggtggaaatttggccttcctgtggaatgcaagggcaacatcttcagagaggacgtcgttcctaacggctccacccaggaaccataaggaaagagcagggaagctccggactggagggaatcctgttcttgtcctgctggctttttctctgggacaagaggctgggagtggagtgggggacagagacaggtggggcagggacacaggccaagagcgactccgatgctcccacctcgcaagaccatactagtggccagtcacacacttccactcccccggtgccctgtccagaccctgcagtggcccaggccagggctgccctccctccacgccactcagcagccgagtcaccaggcgagcaccatctgaatgcaccttccctgtgctacacgggccacttccattagcatgaaactggggcccttgcagggtgaagtcattgaactcagcactgtcctcctcaggcctccgcagcccccactcagatgtcagaagacacatccatcctccatctgcacccaccccaccgcccacctgccctttgtccacctatctgtccttccatccatctatcatccatccgctcagccactatcttgcgagtgctattgtgtgcccagctatcttccaagctcctgggatgtatgcatgagccccttgctcgtggagcagacattcccagggtgagggcagacagctcaaggtcaaagccagcagcccccagggctgggaggtgagctgattcccggagccaaccgagtaagcaggggaggcgggagcttagctgccacagttgtgagctgagtgggtatcgggtgggaccagaaggtggcattggagccaagcccctggggagctgaggaagggagcacacaagagccgtccaaacagagggagcagggcgtgcaaaggccccgagaggcgccgattgctggtgtgggccgtggagtgcatgggggtgggggtcaggcagtggctggggtctgagctcccgggagacgttgagcctttcctctgagagggagggtcccaataggagggactgaaggggcaggtagagggccgagcaggagcctttgcaggtggctgcaggctcccagaagccgctggttttgtgcacattttgaaagtagagcagatatgctaagagcttggaaaccttgtgagcgaaagaagtccacctgcgtcccaggtctggggctggaaggctgcagggtgggcttggaggaaaacaggggtgtggtttgcacagtggagcctgagatgcttaagagagccagtgctgccggagcgggctgtgggcagaggccccgcatccgtgtgaagccctgggggtatcgaattgttttgggcggaggtctaaaggcaggggatggggcaggggagaccacgggggcccctgggctcccatctcagagcctggggtgggggatgctggctggcgatgggaggggcagagagacttaccagcgcaccacgcaaggcctgggcgcccccgagttctggtaagtggccggtccggctgtggaatgcaggttcctgctgaagacaatagcgaggggctgtgtgaagacacacctggggcccctgtgcacccttgggccgccctgtggggtctgcgcagccccaggccctgcgtttatgaaggagggttggggcgagcgcacccacagctgcccgggcatcccaggagctgcgcggaaccgcctgtcccgctgccccgcgctgtgctccccacgccccaggaaggcggccgcgcagtcccgggctcgctcttgccgcgacctcccggacctccaggccgcgggctccgggggagggtgggcaccagggagcgcggggtgggcgtgcgcgggcggggcgggcgtgccgggagctgcggcggtgtctgcgctcgcgagtgcgcggcgggggcgggcaggctccgccccggggcgggagggggccgcgggattaaaggccaccccggcgggcggggatcggactgtagccggtaccggcaccggagcgcgccgggtcctcgccgggtcccagccccgcgcgtcggcccagcccagccgggaccccccgcgacatgcgcgtcccagccctgcgctgagcaggcggcaatgtggggactcggggcccggggccccgaccgggggctgctgctggcgctggcgctgggcgggctggcgcgggccgggggcgtcgaggtggagcccggcggcgcgcacggcgagagcgggggcttccaggtggtcaccttcgagtgggcccacgtgcaggatccctacgtcatcgcgctctggatcctcgtggccagcttggccaagatcggtaagtggccccggggtctccggatctgcccgcggggtgtgcggccgcctctgctgggcctgggggcttcgttgtggccgcgcgcatcaggtcggagccgcgcggcggccgcccgggagagtccggctctcgggtccagcagagcgagactcgggagcgactctggccgcgctaagccgcccctgcgggtcccgaggtctcccctccccggcgggggcacagcctcggagccccggactcccggctcccgggtccctgtggggtctccgccccgcctccgctccgagccccgcagactgcaggctgctcgcgcccagggagtccccggggccgggtttccttcggggttctcaggctttttagagaaacgtccttggagtgatggcgttttttcgtgagttacaagggcagaaaagaaaagcggtgctacccgcatgaaacccagcagaatcctccctacaggcgcagcgttcccattggcgggcctccttttttttttttttttttagaaaatcccggtcggtcagatttctcttcttcttaaccggcgccaatgaaccagtaatgtgggcacggcaggtagctcctggcaaggtgacaggaaggtcagcttcctgaggagctcgtggggatcaaagtttcatgtgttggtccacagggtagggtctctccaggggtggcagggaggtggtcactcgtgtggaggggggattagggggcccgagtggggccaggagaagcaagatcagagcagcaggcgccgcggcaggtttccagagca

SEQ ID NO: 10394 - DNA, 6000 bp, Homo sapiens
ctccgcggggtctgtgcccctcgctcactgtctgtcctctgtggggtctgtccccccggctcgctgtcctcggtggggtctatccccactgctcactgtcctctgtggggtctgtgcccctcgctcgctgtctgtcctctgtggggtctgtgccccccggctcactgtcctctgtggggtctgtccccactgctcactgtcctctgtggtgtctgtaaccctcgctcgctgtcctctgtggggtctgtccccgctgctcactgtcctctgtggggtctgtccccccggctcactgtcctccgtggggtctgtccccccggctggctgtcctctgtggggtctgtgccccccagctcactgtcctcggtggggtctgtccccgctgctcactgtcctctgtgcggtctgtccccccggcttgctgtcctccatggggtctgtcttgccggctcgctgtcctctgtggggtctgtgaccccagcttgctgtcctctgtggggtctgtccccgctgctcactgtcctctgtggggtctgtgccccctggctcgctgtcctctatggggtctgtgccccctggctcgctgtcctctgtggggtctgtctccccggctctctgtcctctgtggggtctgtgccccctgactcgctgtcctctgtggggtctgtgccccctggctcgctgtcctctgtgggatctgtctccctggctcgctgtcctccatggtgtctctccccccggctcgctgtcctctgtggggtctgtccccgctgctcactgttctccatggggtctgtctccccggctctctgttctctgtagggtctgtgtcccccggctcgctgtcctccatggggtctgtccccgcggctcgctgtcctccgtggggtctgtccccgcggctcgctgtcctctgtggggtctgtccccctggcttgctgtcctctgtgggttctgtccccctggctcactgtcctctgtggggtctgtccccctggctcgctgtcctccgtggggtctgtgccccccggctcactgtccttggtggggtctatccccactgctcactgtcctctgggcagtctgaccccctggcttgctatcctccatggggtctgtccccccggctcgctgtcctctgtgtggtctgtgccccccggctcgctgtcctctgtggggtctgtccccgctcctcactgtcctccgtggggtctgtgccctccggctcgctgtcctcggtggggtctgtcccggctgctcactgtcctctgtgcggtctgtccccccggcttgctgtcctccatgggatctgtgcccccagctcactgtcctctgtggggtctgtgaccctggctcgctgtcctctgtggggtctgtgccactcgctcgctgtcctctgtgggatctgtgacccctggctcactgttctctgtgggatctgtctccccggctcgctgtcctccatggtgtctctccccccggctcgctgtcctctgtggggtctgtcccagctgctcactgtcctccgtggggtctgtctccccggctctctgtcctctgtagggtctgtgccccccggctcactgtcctccgtggggtctgtctccctggctctctgtcctacatgggttctgtccccacggctcgctgtcctctgtgggttctgtccccctggcttgctgtcctccgtggggtctgtggcccctggctcactgtccttggtggggtctatccacactgctcaatgtcctctgggcagtctgaccccctggcttgctatcctccatggggtctgtccccccggctcgctgtcctctgtgtggtctgtgccccccggctcgctgtcctctgtggggtctgtccccgctcctcactgtcctccgtggggtctgtgccccccggctcgctgtcctcggtggggtctgtcccggctgctcactgtcctctgtgcggtctgtccccctggcttgctgtcctccatgggatctgtgcccccagctcactgtcctctgtggggtctgtccccctggcttgctgtcctctgtggggtctgtccccctggcttgctgtcctctgtggggtctgtccccctggcttgctgtcctctgtggggtctgtccccgctgctcactgtcctctgtggggtctgtgcccccagctggctgtcctcggtggggtctgtccccgctgctcactgtcctctgtgcggtctgtccccccggcttgctgtcctccatgggatctgtctccccagctcactgtcctctgtggggtctgtctccctggctcactgtcctacatggggtctgtccccgtggctcgctgtcctctgtggggtctgtccccctggcttgctgtcctctgtggggtctgtccccgtggcttgctgtccactgtggggtctgtcccccgggcttgctgtcctctgtggggtctgtccccgctgctcactgtcctctgtgggatctgtctccccagctcgctgtcctctgtggggtctgtgctcctcgctcgctgtcctctgtggggtctgtgccccctggctcactgtcctctgtggggtctgtccccgctgctcactgtcctctgtggggtctgtccccctggctcgctgtcctccgtggggtctgtacccccgactcgctgtcctctgcggggtctgtgcccgactcgctgtcctcggtggggtctatccctgctgctcactgtcctctgtggggtctgtgcccgctgctcactgtcctccgtggggtccgtgccccccggctcgctgtcctctgtggagtctctgccccctggctcgctgtcctctgtggggtctgtctccctggctcgctgtcctccgtggggtctgtccccgctgctaattgtcctccgtggggcctgtgtcccctggctcgctgtcctccatggggtctgtccacctggctcgctgtcctccgtggggtctgtgcccgctgctcgctgtcctccatggggtctgtccccctggctcgctgtcctccgtggggtctttccctgctgcttgctgtcctgcgtggggtctgtcccctcggctcgctgtcctccgcggggtctgtccccgctgctcactgtcctccgtggggtctgtccccgctgctcgctgtcctccgtgtggtctgtacccccggctcgctgtcctccgtggggtctgtccccgctgcttgctgtcctccgtggggtctcttcccccggctcgctgtcctccatggggtctgtcccccggtttgctgtcctctgtggggtctgtccccgctgctcgctgtcctccgtgtggtctgtccccccggctcgctgtcctccgtggggtctgtcccccttgctcactgtcctctgtggagtctgtacctccagcttactgtcctccgtggcgtctgtccccgctgctcattgtcctccgtggggtctgtccccctggctcactgtcctctgtggagtctgtccccgctgctcgttgtcctctgtggggtctgtctccctggcttgctcacattttctctaatttggatgtattactttttccaatcatcctttccagctcttggtgcacagtttcgacctgaagtcttcagtcttctcaaagttcttcagtgttttcttttttctctcacagactctccacctttctgttctgaaatcctgacagatgaacgtgttgtctccaggctcaaggctcaaggccgctgagcgattcccctcttctcctctctaagatctgtggtccttcctggatttgatattccaggttttaccaatgtgacttggcgacatcatttctgtttgttggcactttcatttgggttttgtttttaactgggaattgtgtttttaatgtacagggttgtctttctgtgtttctatttccttccttggtaactttgacttttctttctttcttttttttttttttgagatggagtctccctctgttgcccaggctggaatgcagtggtgcaatcttggctcactgcagcctcgacctcccaggttcaaacgattctcatgcctcagcctcccgagtagctgggattagaggcatgtgccaccatgccctgctaatctttgtatttttagtagagacagggtttcgccgtgttgcccaggctggtctggaactcctgacctcaggtgataggcacgcctcggcttcccacagtgctgggattacaggcgtgagcccccgcgcccggccaaagaaccatggtcctgtttcataactgtgagtctctcgggtctcccagagacattcttgtgtgactcaagccccagggtcctgtggccccgcatccgcctggtgtcacatttagaggaccagggaggagccaccaaaggcagcgcagagccactgtatcatggacgttcacgactgcaagaacgaagaattgttaactatttctcaatgtctctcttctcaaagaaatacatttaatatcaacttcattttctgaaggttttttcccaaagagacaacaaggactttgagcgaggcataacgtggcgaagcttcctaaccctcctctgtagagaccgcccagcccctcaagatcaaccccccaccccgtagcggccgttgagtgtctttcactgccgctctgtgacaccacgtccctcccacccctgccgccctccccacctgactggccaggagcagccgcagcgtgttcagaacctcccagccactgtccacccgggcggagaccccagccccgcgtggctggacgggcttccctgtcctgtggaaggggagacacacaggaccctgtgaagtgagctctcgggtcctgctcctctgggaagctcagagaagcctctcagggaggatctggcaggtttcagtgttgcaccagtgagtaacggctcacgagctcttcaggcattgcctcagtttctcacaggcgcagccctctgctcagtgtggcctctttctgacgtgggttttcttcttgcacctggggagtcctgggtgggcctgtgtattcgtgaacgggttgtgggacctgtcgctgtgtgggggctgtcgagcactccccagaacgtaacaaatcctcaggggaactgatgggcggtcgcgcgggcactgggtcctccacaccctggagagccgttttccgttgccactcggctctggccggggtcacattctgcagcatgtctgttcattcccctgggcggggccctgcaccgactccagcccagcccctgctccctctgcggggaacgtggccccaggcagtgctgggccattggctgtcagtgctggtcctggcggctgcattcccagtccccttggtctctgtgacagtgggcggggccggccctcccaggatctgacggcgcaggtcctccccttctgtgtcctgcagatggacacccgctccgggagccagtgttccgtcaccccagaagccatactcaataatgaaaagctggtcttgccgccccgcatctccagagtgaacggctggtcgttacccctgcactacttccaggtggtgacctgggctgtcttcgtgggcctttcctcggccaccttcgggatcttcattcccttcctgcctcacgcgtggaaatacattgcctacgtggtatccttttcatcgtggcatggtctaagcgggaggggttcctggaggaacttgcgatggacctggctgtggggtctgggccatggctgcccggtggcaccagtcacctgccctgggccagactatgtcccctgagcctgcaggtgggcccagtggccactcatgctctgtgcagcccctgcttagggtcaggacaggacagcgttggctgagggggctccggagagggaatctgtcaggagggacagcagccccctggcgtggcgcaggacccgccctgctggcagccttccgctaaaatccctgcgcagcattttgcacatggccagcacctttctccttgcccctggtgccaaggaggaacagcgccatgccccgcaggtcggcagcctgc

SEQ ID NO: 10395 - DNA, 6000 bp, Homo sapiens
atgacgtctgagagaggattggccacatcgtgtcctgggctctgcttccatttctgaagggctgcgtgtctgccaggttgggaggttttgagcccatctggaccctggcatggcctttccccctgagccgacagcaaacatttgcccaagcttcacgggaaagaagtcacctgtggagcaggaacgagagctggcggggggtgggtgggcttctgggcagcttggacttcagaggagatgcgaaccttccctgtgtctgcaactcacgggcgtccgtgtgagattctgagtaacattatgtgagttacactttgagagaaggaaagccacacacgtggtctaaaaatcctggagcctcctgagtgaggggaagagtgtgtcggactcatccacggaatcttccagagggaacttgagcgaagactcagtgtccgtgaattacaggactgagagctttgtcgctcaagcttgaccttctgttggcgtcacttacagtctcagacacagatggtctgagacgagctctgtgggaggggaggccccttctattcccagattcagctccatgggatgtacccctgcccagcaggcacaggacccgggggaggctcagaaccccacgtacctggccactgtgcagacaggctccccagcgccaggccaggcccaccatccaccaggcccagaggccccgccctgggcaagccagggatcggggcggggggcagcttgcggtgcctgcctgggaagagcctggcattgtttgcagaacccttgggacagggctgcttcttcaggggagatgcagccatgggcctggggctgtggctggggtcttctgtcatccctgcctaccacagctcccttcgagcccccacaggtggtggcggatgtggggctttagggccaccctggccatgggcagaattctcggccctggtgggactcctgggcagggagagtgtgggtcccacaggtggccggagactctgcttcctccactgatgtccacataccccaccctgccaggagaggctcaccacgcttaaaaaaaaaaaggtttgttttttaaaaatcactttagccttgggtaactggggcctcccttccctctcctcccttcccacctctttcctttccctcccccttcccccgattctccttcctcccctctctcttctgctctgccctattcgctctctcccccactcaccatgggtgctgggccaacaggcaagaacctgggtgggtgcccggccctgccaggcagaaggcgggtggctttctggtgagaaggagtgtggggcctccagggccggcctcctccaggtgtccccttccctggacacggagctctccacggacactctgcctgccagccccacctgcatccttcagccctggaggtgcgccctgcctgatacccgacagcaggttcccagcccagaaggatgcagatggcgcaccaggagatgagccccccaccctaacaggaaagcagaagtggactggggggacccgcggacctggggagaagctccgtgggcagaggcacacagatacctggaggcagcctgcgtctggtgagagccctcccaggccacagccctgattccaagccgtgggcacgagcggcctcctggcttggaagctggcattgggtgtccgtcctaatccattagaaactccaccccagggtggcaggcagcagggactgtttcgagaatctacacacagaatgtaaccaccatcggctacactttcgcactaaatcccagggttcccctggctgtgccctgcacacggccaagaggccatcgcagatgaccaggctcacatcataaggatgcgagattgcatttgaagaggccccctgggcaaagctggacaccgatgcttggaaagggcactaatggtgatcgactgagacccaccaatgtgtttcatcagcgatgtacaaatatacttgggagattgtcgggaaccaattcaccgttgtggaaactgacaaatgagggagaggcacccttgccctgcctttcctgtgggcaccattatccagatggccagacggacaagatgagcctctccctccagtgaattcatgacgaagccaccacgcactggaaaatcaccattttgctccatgaatctgtcgattcagacatcaagcaccaacgactgcggacggaggagctaccaccagacagtgcgtggctccctctgcgagcccccggccttgccaggggactggacccggatcccagcagtcccctggctccaggtgcccacttccaggagacgcagaggcctgcaccgaaagatgcagctccaacccaggcctcgggtacctccacgtgtccgagggccacttcctacaacaggtgccgggtacagaaaaggacagagggatggaggtgggtaggaagagagcactgaaagtcacacaacgcacatttaaccccaggctgccgtgtgggaggatatacgtggacacggaaacccacagagcgaagggaggggccaccagacccctagggatgggctactgatgggatgggaggggcctgcagcggcttctgggctccggcaagggtctctgtcttgacccgcaggtgcttacagggtgctgatccctgtcgtgactcacctgattagaatgcaaaaggcagcagacctcaccccccacccgaggtctcccacaagtaagatctaagatttaaacaagagaagccacctgccttctgcctggcagggctgggcacccacccaggtgcttcagccatggcccctggtcctagtcaagattttgtaatcacagagaagaccaccctcggagctgccacaggaccctaaactcctgggcctcagtttcctcctctgtaaaatgaagctgatgagtcctgagtccgggagctggccctggccacagaccctccaaaccagctcctctgaaggtccacagccagcacatggcgggcagccggccctggggtcctggggtgtgaagcagagcttggatgtgcgacgggagccctgcacatctgttgctcctgctggcatcacttgggaaggcctcgtgcccaccctgagctctgtccaaccctcgggaatagcgctgggtggcaaccagggttgaatgtacagaagcccctgctggggtgactgaggagagggtttacccagcaccctaagtgtgaaccctataattgaccccattgggcacttctgttcccaccccctggatctttttagcaaagccagccctcctcataaggatgcctgggaactattttatcttctggggaggtgatggtttcctaccttccaacccactgacccagggaggcagctgacctagcaccatccacagccctgagctccctttggtgggaggtggggtgagagtgtggagcaggcacagctccagacacccaggccagaggaacccccacctctgcaagggctggtgctggatgggcgacgttccaggagggtcccaggcctacagcttctgcccagaagagtccatggggcaaaggggtagaaccctaggccaccccagggcatgactggctttactggaaatggctggagaggttgggcttgcgttccttgaacccacagagcccggtgatcccacagcccggaggccatcactcccctccagctgccttttaggattagacaggcaagcggctaaaacatggccaggccatacccattttccacgtgacaagaggctgtggccgtgtttgcccacaccacctgtgtttctgctttgttgtcgtacagcagttgtgggtgattaggaataaaggctgactcattgcacctgtgtgccatagcattttagcccaattccccattgacggacatctgattgttccgtttttcatgagtcatttgttgagaaatgtgccaggtgctggccggtggtatcctggtgtctgcctggtgggttctggaactccaccttccctgcatcaccctgtgagcttctggaacatttcccaaggagggaagggagggttctagggcaggggccgcggggcactcctggggcaggtgtggaggagactggggtcttcgtgggtggtatttgtcatgggtggggggggggactccctctactgggttaggtccctaaactggagctggaccaagctccggagtaccccacccccaggctatccaaggctccttccactggagttgcctttgcagccaggttgggctagccaggagccaggctaggagcccagggtctgagcgggtgttgacagcctggagtgggtgggcggactgtgtgggaggtgggtgctggaggatggcaggggggaacaggagggggaagaaggaggggtagggggctggagcaggaaatggggggcaaacaggagggggtgcgggagggggcgcagaaggaggaggggcccagcaggagggggtgcagaaagggcaggggttccagcaggagggggttcataggggcaggggggcccagcaggagggggtgcaggaagggtgggggggtgcaggaggggtgaggggttccagcagaagggcgtgcaggaggggcagggggctggagcaggagtggggggtcggggaaggggacaagaggggaggcggggagggggccggggagggcggggagggcggggagttccagcaggaggggcagggggctggagcaggagggggtgcaggagactgagcggggattcgcgggctctgcgatggtcgggagcgcaggcagcgaaagccccgcgtcccgggtcgcggcggtcagacagacgcagcctgggttggggtccctgcaggaagtcgccgcgggccaacttttcgtggggccgcggggcaagcaggtgaagtcacgtggcccgggcggggcggggcggctcggtcggaccccgcccctgcctccaagtcccgtggcgtcggcgggagcggcgcagcgcgggccgggccgggacggggactgtcggctgcaggcggccatgcccaccaacttcaccgtggtgcccgtggaggctcacgccgacggcggcggggacgagactgccgagcggacggaggctccgggcacccccgagggccccgagcccgagcgccccagcccgggtgagcgcggccgcacctggccggacaaaggccgagcgccccgagcgcgggtctgggcccggcatccgggagcggaggcgggcggcggggccgggggtacaggaggcgccccttcccgcgcccccaccgcctgttctcggtcccccacgagggcccccaccccacgttagtggcagcgctagggggcgaggggccctgccagggctcccggtacggtcagctcgggtgggaccgggggcagaggtgtggacgccgctgctggtagccatggaaacggggaggggctggagcgcgcctccggagggagcccgggcccctgggtggtccctagtgggacaggggtggcggtggagacccgggcggttcgggagccggggcgtcctgcgtcccccgcgctctcccttcccctgcgccgcggccgtccggtaacactagcccgggccggcccgtcctgcccccgcctgaccctggaggagccgcccaccccccagaggcggaacaggaaggactgcgccctggctggggagggggcagccaccggggccttgctcaggccgcgtcctccgtgttcccgtcccccgttccgggaatctggaggtttctagcactttcactttctctagggggtggggacggggctggggagagaatcccccagccctgttccctccatcctggctccaaatcccagttactccccggatctcagccccctctagaaaccggaggctcttaggcccttccatccggagtctctgagaaggtgtccggactcagtccagcccccaccccgcgtgctggcagtgcccgcatgtgcccgggtctcatgcagtgggtggcagcctccctgctccctggcagtggaaggaaggt

SEQ ID NO: 10396 - DNA, 6000 bp, Homo sapiens
tatgtgtgaggggtgggtgtgatgctgctgattggggaatgatcactggaactggagtcaggaagacggtaagaggaggtgttggtagtttgggtgagagacactgacactgtgaattatggtaatgagaatggattggaaaggagggcctgaaacaacacttgatggagggcccactggatgcttgatggctcttctttctatggatttgctcaggagacattttacttttgggtttaatttcacttaatcatcttttcattaactcaaggttattttgagttaatctctctggtaaataatgaagtaaactaaggcagagtaatctgtgcttctaaatctaagcaggatgaatattatttttgaaaacatatttccaaaggtacttattttcccccaaagctctattttcaaaggcagaggaatagagaggacattggttaataagtataaaacatatctttttaaaaacagtatagccattctttgcttatagacattcaagatatatacaagactcaatgtcggaaaataacaccctggaaaccatccagaggcttcatctccattacaagctatctgtattttcttcagatattccaaaaatcttttaaacttagcatttttttcttctccccagaccacacttataaaagatgacttgggcttttttgacacaacaattttgtttaagcaaattgagttgctagacaatatatccagaaatttaaccaagaggacaaggcaaaacactttcagatttctagaatcctttaattgtctgcacccatagctgaagtaaaatacaatatcttattaaaaggcccgtactgaaagaagaatcagtaaactcttcttaagaagagtcagctgctcctgcgagtcagcgcatcttcttaaatgcgtgctctgcttctggtatccttgagtcattgctttagccaggctgcttccttgaacttggctgtgaggtgggggaatgtggttctcccttgagaaatgggttccagagagctcgaagatgagcagagtttgcctgggttaggtgaggtccaggtcatgctgtgccaacctctgggaacatgtagcagtggcaaagtgcaaccctctgaccagacatgggcagaggcagactctgacattgggtcttgtatatatatgtgaggcaggccctggtggacttgagtggaagctcagactgcagagtggggcacatgatggggtcccaggctgtgcctggaggagcagactgacctggcccttcagtttaagggccaggaaactgcacttgctatgcacatttgtgctcattctcatctgtgcctcaagtattttctgtctaagtttctgggtggctcctttttagtaaaactggtctgcttaactttgccaatagagtgggctgccacactaaagaggaatgcgtgtttcttggggtaagagaaccctaaagacgttttggtgaaatccaagtggaggggctatttccctaaaatctccccacttgtaggttcctaatccatcaaaagaacctgacaaaagaaacctgtctgggggcaacacagcatcacctgtacccataatcatgttttcccaatactttgaagtaggtgagcaataaagcagccctaggcaatcttagtgagacatcaaacttcacgtctttgtaccaatgtttagcattaggaaaaagactgatgggcctgatcagatgatctttccatttcttcagtttttaaatgtcatggatctaaaagaatggaaacaggggtaaaaagagaacacttatggaggatgattgtaatgcatctcattggtaggaaaatgcagttaagatgtaaatgtcaagaggccacgatttctggattgaggtttttttctataattttaatacaatcttaccacatcttaaagaccacagatacccggctttcctttgaaggtcactcatggcccacagtcatgtcctgatttcttccaggtgatgttctttccagaaagcccccctccctgttcctctggtctgagatggcagcttagggatgtggctgaaattcaagcactagggagggaagtaaagacaagacaaaattggtcaattagtgcagaaacataaatgatctttcatagttccgaacagaattgaggtgaatcaggaaatggatggcatttttcaagtcacatgaatcagcgccccagaattcatcattttcaccaagtgttttgttggtttcttcattctttcacattgtgtgcatggctcacctaaaacagtttagggaaagctatattttactttgaaaagataactaaatacttttgtttgtttaaaaatgatcatccttagttttataatgtgatgagaagcagcttaatgcagatagctttctagcaagcaagacctttgcaaagcaaaacaaacaaaaaacaaagaaattttgtttagaaaaaagaaatacttgtggatacctcaaaatgactttatgaagagcctgcttatatgttgggtgctcggtgagtatttcacacagattactgtctttctcctttcaagcagacagctgacatacccctgccaggctggtgtgtctaagctccaggtgaagagactgtagctcagaaaagttaaagaactttccccagattaaaactcaaaattatatcctcaatttagatccatttcactttaaacaaaggatgcactctaaattataatttggtttatttacctgcttattagcaattattttgtaattaatcacaattatcactaaaatatacatcttttaacaatgcattggtgcagcctgtaaacagcaaaactgaattcaactcccccctacatatatacaaaattatgtaatttatccagttaaatgttatgttatcagacctattgggtcatggtttagaaagctatcttcttcccactgcttagctctatatgccaagagtttttttgctttttttttttcttttcaagtattaacggcaatgttcagaggcaagaagaggattagctgaatacattgggttctaatttctgtctccctcaccctggccacgtaggctccacaggtccaggcaaaggctgcagatccaagcataaggcagcttcctccctacatctttccccctagaagcagccaggcaagaccttggcctgcctcttcctcccagggaggctcctaggcctctgtgccacgtaggcaagataatcggaatgtctggaatggaactagtgctctaagtgccaagcaagggaagggagaacggttaagcttttccttcaggtccccaggagcctgcagctgccacacagcaggccgggagcccccgccacaacccagggaggaatgcttgccaagaaggcctgcccagctactgacacttcctcccagaggtcttaaaggaaatcccagtaaggcctgagtacccaagacagccagatcacccgtgccagagactgggcatttggggatgggctgggctttcatagaaaccttcggaattgctttcacttaattcttttattttaaaaaaaagttctagaaaataaagacacatcgatagcaatttgtatttccattgtcctcttaggtctgcatggctactgtgcgagctatgacaccctgcagcctgcaatagcttctttgttttatggatgagctcaatggaacccttatggacgcaccggaccatgcccaggaccagcgaggcccatccataccccaccactggctggaagggcgctggtgtgaacgtgggtccttgcgggggtccctacctcactgcggtcaggagggggcaattcacacatttcctcatgcaggggaccttcaagcctccctctgaggcgcagactgagtaaaaagggcccagagatactgtcccgcacccccatccagtgggaaagggccactcaaggccagtcaggactcccaacccaagttttatgccttatactcctataactttaccatttgctcttttcgcgaggctgaccccctccctctccccccccaccgcctcctccagaaactgaagaactgcaacaaagtgtccaattatacacgtcttcaaaggtactttacttgcttcccaattatcaacttttcacctgagtacttagtaaggcccaaggatcctgcaaaagtgcaacaaggaataattgacacagaattggacgaatgactttgaccatacgggacttctctcttaacgctcagcgtggctacctggggacgccttctctggcctccctgattcgtcagatttgttcatttccttgacttaatcccgctgaaatcgacccgaactagccgggagtctcacccccaaagtgctcctccaagaacccgcaacgactgactctctcgtcttctttaaggagtttctccctcagaacggatgaggatgtcacacagaaagaacaaaatcacaaagttcgagttccggaggaccagacggcccctgccccccatcccccgggccagatttagccgagggaaccgcacgtacctgaagccgaggccggcagagagggagcgccacgtctcaggtctcggccggcgcccccctccggggtgcagccacgtctgaaccgggacagcgggcgggggagccgcagagggacccagtgagacgggggagggagcccccaaaagtcagcgctcggccgcactcgcactggggaggctggaatggaactcctggggtgcagcggggctcccaggagcgaaggtgggggtcctgtaccgggaaggggcggggcccggggaggggctcggggaggtcaggcgcgggtggggcgctcgagtttcaccccggcggggaggaggaggaggaggaggcggcgcggcggcgggggcggggcaggggcggggcggggcgggggtgggcccaggctgtcccccgctccccgcccagcgctctccgccccgcgctctccgcgcccgctcgccccgcgccgatctacttgccgggaaggcggcgccggtggcggctgctctccctgagcccgctcccgagcgctgctttcccgccgcgggtgggcttcgcagcctcaggccagccgcggcccttggcccgctgcagccccggccctccaccttccccgtgcaggggcggcccggccagtgtcgctcatcccgggacgctcccttctcccacccaggactgccccgcggagctggcttggacacccaactttgccacctcgagggtcgtctctgctgggcgcgaacctgcccacccaccggttggccgcgcgctcggggaccgtgctcgtggcccccaagccggtgcccccattctggaactcagcgagtagggggcggctctggggaagtggcagggggcggctgcagctgctgcctccacttccctagccaggtgctgaagaggatcctcggagccgctctggcccccaggcgctggatgactggcaccagcgctcctcgcacctggtgagcgacccccgcccgattcctgcgtggccttggcaggagcccctgaccgcgccgcgccgcgccgcgccgctggccgggacccggggactgcagcggtcggctggtgggtggtgccgatctcgggtgggatccatcagcaggcacctgggcgggggttgcgcgtacaggattaggacgaccgtcagtccgggggcgcccacagttgagctagtgcacgggctggaagtttgtgtacccgcctgtgccgaggtctgagcatggagaggtaaggagccggagtgtcgcggtgggcgagacgggacccctgcccaacacccggaaaggtgcgcacactggtctgtgcccgcccccggcgcgcctccaggctcgcactgccgcgagccgggggcaggggacacggaggtcgggacttggcggttcgggagcggccacctcgcagccccaccggcttgggcaggttttcctgctttccttacaggggaaccgggaggcaatgggacttgggctcaactccgccaagcgccttggt

SEQ ID NO: 10397 - DNA, 6000 bp, Homo sapiens
ggaagtcattaaaagcgataactataactcttggcagaatttagctagctaattctagcttatctacagcaaatgacagtttcaggatcatttacccattcccctcacctcctaactccacttctggcatgtgctgagagtacagaaactgactaataattagcccaggcaaattacacctaggctttgggctggaatagcaaaagtaaaacttaacaaccgggacgaagcaagtaacttctctttttgctctcttggaatctggcaactgggcagaaatcatgactttatcaataggatgatgtttacatgaacacaaataaataggctgaaatcgtagacttccccttatcacattcccaacgagccatggagcataattactcgtggcccaaatatagaactgtgaggcttaaatttacacctcgtctaccctatattggagatttgtgactcaaaactagacaccaatctctaggactaagccttccatcaaagttgttaaataagttggctatactaaatacatgatataggataattgcatggaatcaatgaagataaccctgttgggtcaagcttacacaaatcaatatggcatctgctcccaaaccatgttcactgctacaatcccaacttgacatcattgggttcctcaagtcaaggaggtctgagttgcagagttctagaactggataaccttaaacgtgatctttcattttgccctttgctgcagatgttccttggtgaggggtcggtggggggtggggggttacttgaatccattcatttaagatcaatttcagaaaaaaaggtaaattagacatgtatgtaacttttagtctttctttctgcattagctcctttaaaaaattagagttaataattttaggcaccaaaatgatattgctggtcatttacgaaattgttttgcaatttcgtaactttttccatgctctgaactcagtgctaccttgcacttccaataaagttttataatttttttaaacttttaaaaaataaacttatatatgcccattgcattaaacacagaaaagtatacacaggaaggaataatcagccatattcataccactcagcaataactatccactgtgaatagttgagcatattttcttccagcatgttttttctacatgtatttttttcttacactattgagtgtagtttgtaaatcttataatgatttttgaccaaaagtcatcaagtctaagactttataaatagaagataaagctgtaccttccaaaagaaaacacccaatgacttggggatatctttttggcttctgggtaattaaaaagaaattccctactcattctcatcacttacattctgaagttatcttttcaaacaacaaagtttaaaaagagagcctgggtgcagtggctcacacctgtaatcccagaattttgggaggccaaggtgagtggatcacctaaggtcaggagttcaagaccagcctggccaacatggtgaaaccctgtctgtactaaaaatacaaaaaactagccaggtgtggtagtgcacacctgtaatcccagctacctgggaggctgaggcaggagaatcgcttgaatctgggaggtggaggttgcagcgagctcagatcgcgccattgcactccaacctgggtccagtgacaagagcgaaactccacctcaaaaataaaataaaataaattagataaataaataaataaaaagagagagggagaaggcaacatttcacgtttgggtcaagatggctggcaggctggctaccgcagcatcagacaggtagctggatggtatttgaaaatggtatgacaatgctgcaggattcgagaaactaaagtaaatgtgagatgagacaatatatgaagatgaagatgtaaaggaagccataagacggctttctaacggcaggatgtttcgcattagaacactggacctatgagacagcagatcttgccttaacagcagcggaccaaacatgaagaggataaattctaccatgagccatatctgaaagcgcttatttgggaaagaaaagaatgagaatggtcaaagaagtcatcacatatttgaagtccgtggatgtagctgtcctccaagtatttttatgaaaatggttaaacctgaaacatataatttaagaattatttggtctgccaatgtttcactttaaataaaagtctattgtaatattaaaaaaacaaaaaaataaaaaataaagaggagcccaaaaatctctttgaaatctgtttcagattttgactgtgacagaaaaaataatgaaatgtctcattagtttccatgttgccacagtgttactgaaattcataggcctttaaaatctaaaaagggctctttgccataatcagagatgacacttccaaatcactcatttaaaaaatgcacttttagaacactcaaacaaggatgatgacctttcattgatccactggaattttctcatcattcccctaaagaccaaaggtgtgcattcacatcaggcagcgggggctgtggcggtccttgtccagagaccaatgaaagcaaactggacttgatggagatcgatctaggacctcatcaatcccacattctagacaaaggtcagtgtaattagattgctctaagtaaaatgagcccatgaaacctagaataacagaatgataaaccatgaggtgatatttgttttaggaaaaaaaaaacctctttcccagagaattcctttaaataacaagctccctttttgtatatttaagttagattcaaatatattaaaacacacctttcaggaacttgctcctgaagacagtcctgtccacatgaacctcctgttttgctgggaaatcttttaaatacagtattgctatttgacacatttaacaataaatacttaccaagtttaattttaatcatagggaatgtaatttgaggttacatcagagctacaaggtaaattagcttcctatttttcaaagcctgctcaaattgtgtggaatttcaaaaaagtattttaaaaaggatgcaaaatatggaaatatttatttatttatttattattttttgagagggagtctcactctgtcacccaggctggagtgccatgggtgacgctgcaacctccgtcttccgggttcaaaccattctcctgccttagcctcttgagtagctggggctaccggcgcccaccgctcacgcccggcctatggaaacatttaacactttcaaagtagttgggaaatacctgaacccaggatattgaggtctcaagctcactatttacaaaagctttacaaagctaaattgtgagttaatcggttcattctaggtacaagatagtttcttacttttaataataaattactttacttcgttatatttattaaatgcagagatgtgtgtgagagttggtataaaatagtaagaccacgataggctacatactatgccaggcccactacaaaatgaaaatgcagagacccttgttcaaattcaagagtgcaacagcagcgcgttagtccttttaagtgcgggccctctgtgacttcacagatcgcacgcccgtgaagccagccctgcccagagtcccttttcattcactgggtcctcctccctcgcgtcacagtcctggggtgcggggatgctggcgttgctgtcacactgccgagctttaggtcaaactctcagcaccgcgactagttaccctgaaatcactggggcccggtattacaaaacagaacacactttcctctttcttcccctttatttaaaagagatgataggctttacgagttatttttaatagaaattttttacaatgaaaagaattcgggcgtactgtttgcaaactgcagcagacaggtctgagcgccccagaaggcggccggccccagcctgggagcctgcggggaccactccctgctgccctggcgcatgtcctccagggacacgggccaccgttgcccctggaaaccctgggggacaggctccctcctgggcgacctttccacgtttctttcgccccccccggagcggcacctccatacctcccgggccgctagtcccccgaagcaggccccagccccggcgcaagctgcctcctccgcagtccccgcccgccgccagcccggccaccgccggacggcgcccttcccagccccgcgccccgctccccagccctcctcgcgcgtccgagcccacgtcgcttgccccggctgccaagtcttccagacggccgggccctcccggcacagcgcgggaaccccggcccccggccccacgggacgagggctacagggcccggccggcgagccagggcaccccggggtctccaggcggcccaccgccctcaccccccaccggcgtccccaagcccccagaccgtccccgccgcgccctcagcgccgccgcccccgggccggccgaggctccgcggcgagtcccgcccagcgccccggaggcgccagccccacggcccgagcgtgcgcagcgccccccgcggccgcgccaagcgcaggcgacggcacaggaaaggaggccgcggcgcgcccggcccggccccctccccagcccgcccccggggccgctggcggtgtccgcgcctccgcgcccgcccctgatttcctccgggcggcggcggcggcggcggcgcctcgtgcgcgcggttatttatttccgggccccagagcgcttataatggagccgctgtcagcagaaccttctgccgccgccgccgccgccgccgtccctcctcttttttttcccggcagatctttgttgtgtgggagggcagcagggatggacttgagcttgcggatcccctgctagagcagccgcgctcggagaaggcgccgcagccgcgaggaggagccgccgccgccgcgcccgaggccccgccgcccgcggcctctgtcggcccgcgccccgctcgccccgtcgccccgtcgcccctcgcctccccgcagagtcccctcgcggcagcagatgtgtgtggggtcagcccacggcggggactatggtgaaattcccggcgctcacgcactactggcccctgatccggttcttggtgcccctgggcatcaccaacatagccatcgacttcggggagcaggtaagccccggccccgcgccccacgcccgctcgccctgccttggccttacacgcccggacacgggggcggaggggagtcacctgctccgagtccctctttatcctgaaacatttggtcgggtgtgcagcttgtcaagggtgacttttccagcaccccattccctccctccctcccctcaattattcagcagacttttccagccctctctggaaaatgttaaaaagactggatggtgtgaagcttcacctatggaagggtttttagtgcacggcagtattatgtaatttgcgattatgtaaacctcagctctaattaaaatgtagtttctagtagcttaagtgctgggtttttatttacccatggctggtggtaatggtgacggtggggagattctgttttataatgcgtccaagttgatttcccaggtacttccatttttaaacatttgtttcgtagtccaggtaaggattaggggtatcccgaatgtgtcctgataagccggtcttgaccatttatttctagtttgggatttcttttttttccttttccttttctttttttttctttctttctttctttcttttttttttttcatggaccactaaagaaggggagcacatttttgtttggggtcgccttctcgtccttgtttcttttcacgttttctccatgtggcgtcattgaaaatctagcgctgcaagctctccagcgatggggcattggcaccctgcactttgcatgtggggaccgttttggcagggccaccagcgggatgcagctgcgttctaaggccggggagaggatttggtgatggggaggcagtgacatgccaccctgatgggcaggtgtcccaagtggccagagcgtgtgacgag

SEQ ID NO: 10398 - DNA, 6000 bp, Homo sapiens
tttctacttcattatatttgagatgtcacccaagtttttcaagatcctttatgaaatttgtagttcttcatccaaatatactggctctgttaagggacaatttcttcatgaatgattttggtgttaatggtattgataaaagccagtttcagggcaggtttggagttggagctctacagctatctattggaaaccttccttgagtaagcacttttgacatttttaaacatgcttaggtagttgcttactacagcaacacccaaaaattgtagcaacacccaaaagttgtacttaaacacccaacactcaaaaattgtagtagcaacacccaaaaattgtacttaaaattctccatgtgggctataacgaaatcatgagggctacgatgatgatgatgtagaaatcatatacttttttttttctatttccagtcttgcatgtccggaatagaaagaaatgacatttttctggaatgacttatttgtgaatgtaatgcaaacccaggtggtcccactgttttctcctctagcagtctgttcatcgctttaataagtcatcttataccttttccactttccacatttagttcaataatttctaatttatagcatccatattcatttaaattttgaaagttaggaaaatatttgcttaactctagtctttctgcactactttattctcaacaaatccccagtttacccacagttgtttttttttttttttaagtctggcatatactttatattttctattttaatacttaaagctagacttcatcatctattatattttcacttattttggaactcagtgtcctcatttcatcatttgtagtacaacaattatctgttttacagaaataaaatatgtgtgtaatagaaattgaggagttttaccatttgctttgtcaattattcatactaccacatgagagccagaaaagctcattggttctttgatattatacatgcattgaagaaaaatctaaaaagtgaacacatggatctaattattattatgagtaaggaatatgctactttttagaattaattgcacatacggttatctttgaaaccttcttgatagatgtctttcattttaatgcattaatgttttaccagtactctgcaattctttttttttttttttttttttgagatggaatctcgctctgtctcccaggctggagtgcagtggcgcaatctcagctcattgcaacctccacctcctgggttcacgccattctcctgcctcagcctcctgagtagctgggactacaggcgcccgccaccacgccagggtaatttttttatttttttatttttttattgttagtagagatggggtttcactgtgttagccaggatggtctctacctcctgacctcatgatccgccctcctcggcctcccaaagtgctgggattacaggcatgagccaccgcacctgtcctactctgtaattcttaaactgaagagagatgacagaatgagtaaaggttaactaaattagatcatctttcatagtatagagatcacttttttatcaatttgttttctcttttgttcttttaacaaaaatacacaaactatagttcttgctaaccaaacacataaaataaatagttgcagagaaatttcctattgctttataatttactagctctttttctttatataaaaatcagatcacatattttgatattattcttgtaaacaaaaatagtaactacatagaggtgatagatatgttaattagttataagatgatcatttcacattgtatatgcatatcaaaatatcaagttgtataccttaaatatataataatttttatgccaatgatatctcaataaagctgttaatgagccaatgcaccatgtttgtgcagttgaccgctctaaaaactgaattataacaagagttttctctctaaattttgtttacattgctcccttattcaggtttggaaacatcacataacttgctaaattttcagggtaaaattaagcatgagatgccatctaaagagacaattttctgagtctctctctcagaaaatgatcatagtttagcatgacaattttatctttccagtttctatagtctgaccagcatcaatcgtgtgttagatgtgtctctgtctccagctaaaatgattctaataactctcccaaggtaacccaagtgggaattcagtatcagaaatgtccatgctttcactttcagagattagttctgtaataaattctggtgattgatacactgtccacttttttgaagtaatcttagacataaagagaaaacaagcacctgcctaccacctggctttccctagcagcaaattccacattggttcacttgtttccttcttcttcttcttcttcttcttttcttttgtgtttctttatttgttttgagctgaaaatacaagagatgcactaagtggctgacaagtccacttttcaatggctagggaaaattggcacagtttcagaatgtcaaactccagaagccatttaaacccagtgtgtatgcatcattgggattgtggagaatctagagcccttattccaagagtgtggcttcatagatacaaatccttccttgatgaatgaattctttctctagaaatggattgtattggttggcagtattgacaattccctctgcatgtcgttgcactgaggagcaagtgcctgttgacttccattatgactgtccactggatgcacttattacagtcttatccagggaaaaccaccaaggaaggccagcaaaaacaggttttgttttgaagtgtatccctaagatgctcattgcttgtgtctcagccactgcttcagtagcaagctggcaaacaaacattttatttcattcaactagaggcagtcaaataaacagagttagggttttctagagaatgtcataacgtgaattttaacaattaaactataggacctcttacagacttaaagtttctttttctatcccttttatttttcatagctatttctttctttgggcactcagggcttcatcaacatagaaagattggaaatgtattctctcatacctctttcaataaacaaaaataaattaagaatttgtgtctggacactacacaaggagaatccctcatttaaaacagtagctgcataataaagaatatataatgcgcaatataatactggcatattatcttgatgctgctgtttccgttccacttttttctaaaagtttaaattttggaaatttccaaattctaattgacttctaacatcttccttaagagcaacagaacactgaaatgtgcaattccttcccaattagaaataattcaattcctgttctacctcattgctcctgttggtttgtttagtctttccgaaagctaaatcaaattaaatccttccacatttcacatcactcaagcaaaatagtcaaatataactttagccgattcaaacattcactctcagacccaagaaacttccaagaaatacaacttaccttatcttttcaacctctttgatctttctcagggaagaagaaaagaggggagtaattagaaattatacaacctttaacaaaagtttatcataagtttgtacaaggatacagattttttaaatcttcacagagacctgctaaagtgaggattgccttccaggttttagagtggcctcctgaggctcagagaagggtaaaagcttacacaggttcacatgtaaaggtatgtcccagccgtgatttgaatccacgtcttcttgcctttagagcttgtacaccctatcactctacctctcttagtcttaagtccttgttcctttaacattctgaacctgggcatttgtagttttatcaactaagcagaaaaagtaatatctttctcttagtgtttgcaatgatggagggtcttgtacaattcttattatatctgccaaggggcccttagactagtcattcaatttagataaactcctacacttgtttactttaaataaggatgcttgatgtgctcaatgggtgagtgtgggtgacttcgtgcggggagaaagtactaaagttatttcagctgtccagatcaattttgaatgcagcccatcagaccttaaatccctgttatcaaaagctatgtacattgcaaatcgatttaatttattctggagtgataagaggtgagaagtttgtgtgtgtgtaggtttcctggcacaatcaaagggggttggaaaagcatcacagcttctattcgtcttcacaaatataaatgctgacctccaaggggaagctctgtctgatataaaccctccataccttgagtactttgggtgaaggcgttaaaggacatcactcaagcgaaatctcatggctaccactggactatggatcactgatgaatgagccagcagttgaatgtttagcaggctgtgacgactttgcacgggaatatgaaaatttattaccagcttgccacatcagcgcctgccctgccttatttcctgggtccctcccggtggctactcccactccatctgacagtcaaacccctctcgctccccagtttcccctcccccgcagagaattgatggtctaaactgtcacggagtcctggccgtcatttttcaagaaatctggtacccaagatgatgccgttggatcagggattttatttaggagtagtagtatgcgctgaattgttttctacatgaccttgctgagggggttaaagggtgtccgttttgcttgctgtggaatttgtgcagccccaaaagtatgcacggtggggggttgggggggagaaggaggcagaagggaaaggagccgcggagaggagagccagggagaagaggaaggaggagagaccgggagagcgcagcatcaggcagacaggcgccgccagccaatcagaggcgcgctcgggagctgcagagacccagcctcggagcccagggctcgaggtgcgcggagcctgagtctgggctttccgaggacggcgagcagctgtgcccagagctctgggaaagtcccctctctttgcttcttataaattaagttcctttccaccagttagggcaagtccgccaaggtaaggcttcaataaatgacactttactctctagtgacatgaatatttttgtgtacagcggggctgctttacccagttctgagtcaaagcaatattgggtgaaatcttcatctccgatgggtttcacaggatcgagggctgaggggaaagttgtagctaatgcaggctgccttatcgctggtatacatttgaattttcttatgcaggaatgctgccatagagcctatcgaatgcgagtctcagaatccagctgcgtgtctgtttatgtttatctgtgcctgtgctgttgtcttccctgaagaagttggaagaatactctgcaaggcacattgcaataatgatggcatcagtataagctgtcatttatgtctatctgtaaaagtgaggggacgcatggtcagaatagaaacaggggcactgaaattgaattttcgatagtgctttttttaattattgcctttccagtatcctctaaaattacgtgatttctgagcactgaaactgcagcaggacaagcctcatttatattctttcattctttttttttttcttcccacgaatccctgccttaaatgcttattaaagcttaagatgaaacttttgcttcttttaaagggcacttataaatgatgcatgaaaagaaattaggtaggctcctgtgatcagcaacacactttatttatgtttgttaactctcattcatttctttttcttaacttcttgttttagtgtggaagtaactattattttgtcttgatttttatgtctgcaaaacaaggtaaattatgccttatgcgtgtgtgtgtgtgtgtgtgtgtgtgtgtgtgtgtgttgtctgtacagatgtggctctaggcaaacctctcatatgtaacaggtgaaaaaatagaattttattagctagggctat

SEQ ID NO: 10399 - DNA, 6000 bp, Homo sapiens
tatatcatatgacagtaaagaaatatgaaagacaagcattagaggttaatgaggacaaaacagagtttagctgccataacccagatcctgactccactggtaccatgtgaccatcaaatgttattcttatttgtaaactagataaaataatagtagcagcttgacatgtggtataaaactataagtaaaatatttaataggatgcctgatgcctagtcagtgctcagtaaactaatctatttattattagtcatggatatcatagtattttactatcactgctgctagataactagcccaatctctattttctgctatgtgctggggcagaagtttctattcaatagttcatgaatcatcaactcatcccagtctatctggatatcacttcttaatctgaatccaaatgccaaaatactcaacatcacagttctgtgaacctatcgtctctgtccttctgtccctttttttttctttttcttttcttttttttttttcctttgagacagagtctcgtcagactcccaggctagagtgaaacagtgcggtcttggttcactgcaacctcccactccctcgttcaagcgattcctgtgcctcatcctcccaaatagctgggattacaagcacatgccaccacacccagctagtttttgtatttttggtagagatggagttttgccatgttggccaggctggtcacgaactcctggcctcaagtgacgcacccacttaggcctccgaaagtgctgggattacaggcatgagccactgcacctggccctggcccttgttattgacataaatattatcctatgctatcagatgacagcttacattttcataaaccctctgatttcagttgcagctggagggttagattcacatggctgtgattcactattttgctgatggtgaatttctcaagtgagcatggcttgtctttgccttctgccctcagactctttctacacgaaagggggagatgataggagtcagtgtgcctacatatgtatatatatttcaaaagagggcacagttacgtccctgaggggagccttaggctgacaagggaaggagttttctgttttttttgcttgggaaattctgagggatattctatatacctctccagaaatccgagtgtaattaagctgtgttacccacggtggccacctcaatgaagcccctttacacttgctctgaagataatctgacacataaactatatgcacgtgggtctttcattcatcctctgcttcaatgggaatacaagcaagatcaacaatgttcaggatctaaaaacactgaacactgaatatttcttttccctacaatatatatctgtaattaaatacatgtcagtgattctgatgcaatttcttgcttttgtttatttttttctctttgaaatcatttcagttgaatgtgcacaacatatgaaatggcaaaacacatataaagaaaatgtgttcttttccctagacatgcagaccacctggtaggcaacttcatctctttgttgttttggggtcagaagagaatgtcgtagattgtattactcttcaaaattatcatcactggcctctgtgtggctctctagaaaggttatatatctctgtcatattgacctctggcttagcaatgtgtctgtgattttctttagtcaaggatatatacacagaagtggggttagtcacttcagagcaaaagttactgttttagttgtctgaatgaaaattcccttgtttttatatcttctttccctcccctttgaggatacaggaaatgtcccatcagtctggttgggtctggcagtaaaaaagctgtgaaacaaatcttcacaattgtttgtatataattgtataaaattgtgtatagttaaccaataataaaatgtagaggagacagagatacccattaagagactgttacaaaagtcttggaagtaaaagttcaatcaatgcaatccaacagctatgacaatgataatggtggataaagaaaatgataaaatgatgcttttaactagtatttaggaagtacaactgatggaacttgactcactggatgtaagtataagggtaacgatacttgaatagtggctcatattacatcatgttttaatttttcacggccttgtgatgaattttcttttgtttattgccctttgatctcttcctcgccaacagagtaatcttatagcataattttgatgatgtcataccttttctaaacagcctttatggcttccattgctaataaattaagtctgatgtccttagccttaattatttgtcctaatgttttaatatccatttttatctttccagtctttattttcttaaacaaattctattgatttattttattttccgaaaagtaatttttgagtttccaggcaaatgccttgtcccagtcattacattacaaaacaagctttaatgcttgttttcctacctctgcttacattaattgtaacttgttttagtcaggagagattagatactactagtctagtaacaaaaaaatccccaaatctcagtggtgtagaaataaaagctattttatccttccatgctacatgtccatctagggacaaataagactccaatgttctcttctttcaacaacccatgctgatagagtgcgcacaaatttatatttgttcttcaatattctgtttggaaatggcaatattcttttccattcatgtttcatactaagatgccaagactggggagaagtgcatccctcctacagggagagcagcaaaaatctgcaaaacacacacaccaatgtaatttattacatgatcattttcaatctctttcaaatctcaatgatttcattaatttgatcttctccactccaccttcagatgctcttttttcttcaacttttgccgtttgtactaataatattgcacatcttacaatgcgctaggaggggtcaaaacatttattttttaaatgacagatagtaaacattttaggattcatattgtaagtctctgtggctactacttgactctgccattgtaatgcgaaagcggtcatggacaatacataaagaaatcggcaccactgggtttcaataagtctttatttacaaaagcaggtggctggtcttctgttgtaatttgtagaccccttagctagagcaatgactgtccaacctgaatgtgcattggaagcatctggagggatattaaaacatagatcgcagtgtcccattctcttaaagtttctgatttgataggcttggggaagggcttgagaacttgtcttttcaacaagttccaggtgatgtttttgctattggtctggggaccacacattgagaactctcgacctgtagtacaaagacaatgttctgtagtcaatgacctattatttgtgatcaaaaaaggaatttaaataaatgaaaaatatactatacaattgagggaaaagcaatgtttatgattcattttttcatcagcatattcttttcttcacaaaatccaagtgaccaaacttagccagagactgccctgaatgaaatatttattggctacataaatgagttacaataaagttagcattcaccttgttatagtgacacagcatacagtgtgtaaatattacatttttccgtgcctcccttcacgtgatagacaggtcacgaaattgttttgtttgtaaagtctccccaagccatttcaatttgtcacgatacacaaagcttggctacaccacctacatcaacacatttgtattcagtgaaacaaaaagatttcagacagtcccaataattttattctttttcaacactagcattgaaaagacattgttatttgtgtacagtcctcctgtagggagacatatttttaaaactgtattgagactctgtactcttgagattttttatagaacaaaattaaatgattatctgaaatattgtggcattcttgatgtctgaataataaaatgacttagagtcttagaaaatacacgattcttggtgaatatatttaagcaaatgtttattcaatagttagcactttaatagtgaaacacaaagaaagataatcatggttaaagaatgcaaagttgttttgtggcttttggaggaataggttttcaacaataacacttttcattgtaatattttattgccattataatattctataaagttttaggtaattattaataaattctctcatataaagagaaattaacattaatttttaaaatcttacaatatttaaacatgacaaaattaaaacagaccagactaatgtatatagtcttagcaatcttgagttcttcatagactctgaaccaagttaaatcagcctagaaacaagtaagtgaattaggagaaattgcttgagcatggttattgtcaccaataagcatctgattctcgtttagacaattaaacattgagacagcttccaggtaaacgtaattaattgtcttgattcacaaaaaagactcaagcgacttagtggaggaaagactaatagaacccaagattttttcctcccaggtgacagttctctgatatgcaatagatctcaagcatttaaaaagcaaagcttcgggtgctaacccaggtgctatcactttctcagcgcctaatcttcacccgctgctaggctcgtttaatgagtcttctgagagctaaggagtcctcggattcattcaaagcattctacaatgaacgctaggggggaaaaagaacaaacaaaatacatttcaaatataggattcaattacttttcactactcaatgatgtgtcaaaggcacgctgtgttttgttttgagggcggggagatgacaggagggaatcctgggcccccattggctcgccgctcgccgctgcagttgagctccagccgctccgagagcattattgatctgaagggtaaatgtggagggagccacagagaggggtccaggcttttctgagaagagaggcagcctcttccaggaagaaagtggtgtctactggctgcccggcctggagaaccttctttgaatgaaaacggacaaaatgcaaagcagtgtgttggcacagtgatttggaaaggggaaacagaagagaagggtctcaccttccgcgcaaggctgagctgttggcaccctgctgcggccgtcggtgctgctgctcctgcagctgccttttctgccatcaggtaaggcttccgtttttgattgggattgcaccgcgtgtgtgtgatcgcttcagggtgcatgcacagaaattcatacatgattaataaagtgatgcctagcgtagtgagaagctgaacgaagctgcacacagatctggcagctgaattaggagcttgtgcgtggttttgctttgggaaacttcggtaagttctaaacaagtctctggtcctcagaccgtgagaggttacgtgaaaagaggaaggaaagaaatgttttaacctcaaatgcatcttagcatggctaaattttcaaatgaaaataagtaggtgtgctagatgtccaactagttattttataaatggctttatagatatctgatttttacaacaaaataatgaatgctttattttcaaagagcttccagagatgccgacccccctcactcatttctccactgacgctgaaatttatgaacttcattcttcatttgaaaaataccactgtaaaaccatttaaatgttttaatggcctgcctctcatggtacagccatttgagtttcctaccacaaaactaatctgggacaaatgaaagagatagattaccagatctgctgtgggttatataatatgcatttccaaattattttaaggttattgatcatttggtgatacatttaacaaggaggaaatatgtgtgatataggacataatggcaaatcatttttcaaaaaagaccttcagcattttataagtattttcttatgtttttaacatcattatttgttttttgctacatcgggaccacagtgtatttagaacctctgtacttca

SEQ ID NO: 10400 - DNA, 6000 bp, Homo sapiens
agtggaatgctgagttggtcacgtcccaggggcctttgggccttcggctccctgcagttagataagggaagttccagagagaacacttgaggggaagaaacaagagaaggtgaagaagtccttgcttctgaggcagtttctaaggcctttcaatttcctttaattgaaacatgctcagtacaccaaagcaccatactttgaggtattgttctctgcgttcccaaaaaagtcaagaaagcaagcagtaacctttatacctaaagcacagagagcatagtaacttctaaagagaaggggcatgagacaaaaataaatttaagatcatatgttctttaattaactattgattgtcagaatgattacattttttaaaacatagctaactatttgacacttcatttttttctcaggattgattctccctttttccaccctcaagttataggacttttgaaatgttgagatatgattaagtagaaaaatatcagtaacagttcagttgcagataacagaaaccgctctcactattttagacaaataacaatttaattttgaatgatgtgtggttaacaacctaagtagaaagagagggactaggtgaagatcaaagtacttctagctcccaggatcacacattcattgtcctggttcaaaaagctcccaggccggggcgcagaggctcacatctgtaatcacagcactttggaaggcccaggcaggcggatcacgaggtcaggagtctgagaccagcgtggccaacacagtgaaaccctgtctctataaaaaaatacaagaattagctgggcacggtggcaggcacctgtaatcccagctactcaggaggctgaggcggagaatcacttgaacccaggaggcagaggttgcagtaagctgagatcatgccactgcactccaacctgggtgacagaactagactccgtccccccctcccaaaaaaaaagctcccaatactgcccccagattatggtaactgcaaaaccatgcttcctcagctactatggtagtgaaataaataccttgcatcttgcctttctgcttatttaactctgtttctaattaaagatgatgagggcatctgaaaaactgaatatgaatcaccctccactcctacctcaaacactagctgtaaggaaaatgtgatttttaattttccaagtctgtacagtcctttaaggcagactagaaggagtttagcaaaaatgttgtcaaacagactatgacaaattattattctgccaacatatttatggagagtgaagcaatgtggacactctttacttttgtttcatagacttagtgagataactaggtttcagtaacttcctaacagaaaatggaaattgatattatttttcataacattcaaagaaaccgaggaaagggtggctaagaagctagtgttttaaaataagcacatagctgctcagcaagtaaagtcttgtgcagttaagcttattgtttagcaacagcatgacaacttctaggcatgtaatagtttcatacaaaatggaaggttgtttcatttaattgattttactcaaattggatctttcacatttgcaatgaagagatcagccgtcattgagtcccattattatattaataatagaatgctttcaaattttcttagtgctgtatgattgtagtaaggtattttctgtgcaatttcctatttagttttaaaagttgtatatagaaatatatttgcaaaagttttcattaacttttatttgcttgtagttgatatatggcctctcctcatattaaaggacatttctgcgagatattgacccattcatttcattgagagtttactgtcccttttacatttcatttattcatttcacttcccacgtgctaccagtttcctgatattggtaacaacaggaaaaccctatctaattcacaagactatttcacataagatttggagggaaaattataaagaaatagaaaaacttgcagaatcctaagttaactcatttatattgtgaaataaagaaaatgaaaaataatattgtttaataaaacaaaacccattgtcagaagttttacattttagtcaatgttctgtttattctttattttaattttaattactagggcgtatattcgataggatggcatttgatctcagatatagagtctttctaagatgagcattaagaaaaatgtgaatgggtttaattcatttattgttcaaatgttttcctcttcattctctcacatctataactagatcccctgaactttggaatacatggatgctttgcctattatttattaattatattacttgatcaaaaaaagaaaaaatgcaataactgacaattgtttcataaatgttaaaatattattaacgttattttgtatagatacctttcactagcattataacataattttaattttaaactagaataaaaatttgcttttctccaaaaaagtacattataccaaatatactactctataatacatgaatataatagacaatcctgctgtttgtacccaattctgtcacctccctaatagcaccagtgactttagctgggcaaatagtgagagtaaataccacatccccagcctccctagcaacaatgtgtgaccaagtgtctaaattccacccaatgagatcatgaaagtgacatgtacatgttcagggtcacatttttcaaaggacgggagcaactttctcttgttccttttattcctttttctagaaggtagatgtgtggtgatctctcctggatcatataaatgagttcaattccttaaaaacattgagcatcaagacagaaggaagctgagtttctgatgactagacagggcagaataaacacaccaaccaaaaacctatgtaagagaagcataaactatataattcagaaaatgttattttgggaatacatcatttcaacatgtattctaattaataaaatagcaatttacctcagatcttagcctttggttattttctcgacccatttaaatgtaacccccaaattcttcacattatgtagtcatacattttgaaattagcactaaacaaacatatggaaatagttaatttaataagagaacaatgtgtgtgtgtgtacctaacctgctgcatttaattaaatattataaatttctcttgatagctaatttaacatgtcaataacagtattatattgaatacacacatataccaggcaaacacaaatacacacaaatatacgtatcagaggtaaaaaactgaatatctattttcacttgactctgaaattaaggcaccctgtcgaagaaaacatacaaaacataacaaaaactatgggcaaatgatacggtgataattcagaattctagctctattattatcaaactttagaggggccataaaattttcctgatcttaatgccatcgtctgtaaaattaagagtttcaaaagtccatttctgctctaaatgtcatttagctgttcagctcagtggaaatgtttggtgttttcaaatataaaactaattggtaaaattcatcatataataacactgtgatacattaaaacctttttggaatctaattttgaatctccctctcacttcttttttgcccctcagattgagtttcttcctttttcattgtgctgattatgtaaggggcctgttgactgttagaatgatcaaacaggtacagaggaggcagtatggcaaccggaaacaatactaaactggaagtaggagtgtggtattacagctttgaccccgcctccagttagtcctgtgacaatttaacattctgagcatttttatctgctaaagaaataataataataacagcccaaaatgatcttcgtaatttctcctctagctttaaaactataattgacatatatgtatttatatgcatatatgtatgtatatgtgtatataatttatttatggatggcactttaaaaggaatctacctgtagccggaaaaatgcaaagatgttaattactttgtggagctatactgacatcctttggtaaggtttggttgattgcaatttgatgtggagattgataaatagcgagacagttagatgtttaagtagatagaacaatccaaatgtatttacatctgtccacacactcatttgggtatgaaacccgtatttatgagaaaaaacaacgttaaaaagaaaaaaaaggagactgtgtcaagttcaaagtctaaatattttaataacactaattacatatttacatttttaataaaatattttatctataaagtattaaaatgcaaagattaggcagagaagactggctcgcggacattccaaaatgatgagcgaggtatgcactcctgtgacaataagcaacaagagaagggatttggaaaatcaagccgagaaagttccctgaaagcaaaaaataaacatttaaaatcacaacgaaaaatcactctggtaacatatcaaatctggttgcaatttgacttggcgctctgataatacttggatttcggtagtctggtgtaaggacggtgcaggaatatatattccagaagaactatctttttttaaaaaaaattgcaagaagcagtcctgttcctgagattgtattacggacacaggcggattagattgggctgattaccttagccttgaaacagagagtctttctgccctgcgggggaggggacgcctttcaagcaaagccctcctctcggatgcgccctcccctcgcattcacttgcaaatcgctgtgtgctcgcagaagccagcacttccacagtctctaaccttcccatggcgagtgctgcagctctatcagcagaacctttctctccgtgtgaggaagagcttttttcccccctttccttttttttttttttcctttccccttaatcagaagcactgaatgaaagccaatcagagagagctcgcccccgttttcttcggttccctgctgtccagagttaaaagtgatgctgagaaagagcttgagttagattgaagtagaatcagtgatagaaaataacagccgaaaacaaacaaaaaggggacatagtgacaatttctcctgggttattttggctggaaccaacttccattatccagaagctgataaaaaaggtaggaagacttcacctctttcttttaactccgttaaggtattatatattcctccacttgaggggtggggggggagagggaggagataaatgtttgtttttaagttgtgtttagcaattatttcaaaataattatctttaatacttaaataagcatacaactctatatatttaattctagaaacaactgcttcgaatatctatataggcaatgtaaagctggataaattatatattatgctcaacagtgggtcatgatattagagtttgtgaattcattcacttggaacaaatgctaaaaaatatgttatgaagtgaatttgtcatgcccagacttgttcatttttattttaaaaatcagttcaagagataacattgttactgtgaactctaacatcatctaacattactttgcattccatatgaatggattcactctgcacttattcgtagtcatagttcattgtacgttcaatataaacagaaatgacaggcagaagacagattccttgaaactgtcaatggtcactaagcatctacataaatacaatagattgacattcatcagaaatagaataggcagaattcttattttcaattttatatctgagtcagaagtattggggggagagaggtaaagagagggagagtaaatgcatgtagtcagcagttgcagcatttattgtttctgctgcaataaaatccatattttatgtgttgttaaattaatgcagcatattgcaagtataaatgcatgtccccaacaagtaactattgatagcactgtaactatgggcaaaagcagtagtctgaaattgtttttatgccactaaaataaaaacctactgtctccttattatgaaaaaaggggagtc

SEQ ID NO: 10401 - DNA, 6000 bp, Homo sapiens
tggcagtgaacttaaataggactggtttctactcctgattgtatcaactgcctagctaagtagattttgacaaataaccttactaagcatcggtttccttatatcccatcaagaaaaaacaaaatctaccttgtagagctgttttaagaaatgacatttatagaaggctaacagttattaatgtaagtatacaataaattaaaaccattgctattattattattagtgctattattattagtggtggtggtggcggcattagttgtagtcatggtagggtaataatagtaatgatgagagtcgtatacaggagataagtaagcataactataagcagaattttaaaaactagggggtcactgttataagccgtccatgttctgcatagtttatgcacatccaagtatggacttcaaggatgttttgagcttactgaacttgcatcttcaagataaggcctggaatttgttgaagctccctgaacaatgaagaaaaaagggaagctgagaacagaaactccgatgccaaagtgctgctgttgctacattattgggatgcagatcaccccatcaaccacgattccaagcatcccagattctgtccctgctctatattttatgactacaaatacaatatatagcccacttttctttatcttttcattaaaaaattattacatactcatgcaatcacagagtgatagcaaaaccagagagtatgtaagagtgtgattttgataatgggtttcaggaaaaacctaaataagcagagaaaggagatttcagagagatgacaaacattaaaaaaaaaaaaaaaaaaagaagtgtggagtcaatggcagggcctaaaggaaggaggaatagctggcatcagatcacagaaagaaagacttaattgtagaggtcataatagcaaaattaggatttttgaaaaaacatattttggaagtcatactggttttgctaactgaaagtctgggtattaaggtcaggaacaagcataagcatgacacacagcataagtgcaaagcaaagtttatctggaaaaaaaatgtaacagagaaaatcaatataatgcttttagttccttagttttctccatctcacagaaaggagtgcttgggctaagtacacagggaactctcttgaagagaatctccacactagaagagagcagtaggtaccagatcctttgatctgtcttgttgagataaggccataaggataaaatgaacattcttccctctgattttgtcctctggaggaatctatttgccagttataaaaggcaagtagaaatcgaatagcctttaaggctaatccagtttagttctgagtcaattcattgctagtccaccttgaggcatggaatagagaaaagtcattatggttattcagaagaaaaagaataattttctcttctcaataaagtgtggccattggattgcaaactggaatggagaggaggaaatgattactgggaatgtgaaagtcaaggcaaggaaggagtgggtgtattattggggatcatgtaagtggctactaaatttcttaagaatgaggaccttcattatcatacaccaaaataataaaacataataaaaataataataagatactaacgcgggtattcagtttcaatgaatgagaaggagtaatgatttggtcttcaaatgattttgacaagtagagttaaacaagaaatcagctgatggcaagcatggagaaaagggtgaagaaaagtggcccagtaatgacaaggcagaagatcatctatctcaactccaggcactgttttgttgtacatggctgtgagagtaatatcacttttcttgtgagaaaccaaaaataaaaaaagaatcttcagacaatagccagctttcagttacagcaggtagctgcagagaatgttcaaagaaaagttgaaggactcaaaggattttgcggtgtcacactgagatccatcaatgggcataattggactgaagggatttcactaagacctgagggtatttcaagccagagagtaattagaatcatggtcctggtagatgaccagagaagcttaaacttctgagaaggcctgataagcaatcaaatgtggacagtgatgggattgatatcaatggcttgctagagaaaagaagggaatttataatttttccttgattcttggtatagtttaatcttcaggtcataggagcaagcccttggtgctgaggtctggaaagggatatatttagtagtgacatgcaagagctattgtgcaaagtatttcagttttagttaggaaggtgtgaatgtctgttaccaagagcaaagagtggtcttaaatttcagggtgttcctatgagtggtctcatagcacagggagattctgtctcaagattttcctggtacaataccataaatatgtctttatgggcctgtctgaagactaaaggacttacagttgtaagcttaaaaactcgcttcactataaagtttattttctatttcagtacgagataaactggcattgtgtctatttttttcagtttttctttctcaacaatttgcaaaattaccattatgcaaaggaatatatttatcacactaaaatgcaaaaaaatgaaattttgtatgtggcagagatctatccatttttttgaacagcattaaatagatggagtccttaagtatgacaatgcattatgttcaaagaagaagaaaagaaaaatatccatataatttttttccacaataaggtaatatgttcaatataccaaataattaagaaaagtaaattcaaactaatcttggaaagagtacttcaaataatattttaaatttactgttaattttttatgtctaaatacataaaaggagggcatatactctgctaatgtaaataatgactaatacttttgtacaaaatgtttgctaaatattcatacacattactgcaagtatgaaaagttgttttcatgtgatacagaatgctactcacatttgaaaacttacaagtagctatacacatgatataaaagaatttttgacaattccagggtttaagtcctttgttttcaaatgctggttccatatcaaacaagagaaaggtagaagacctttcatttggcaaccccttttttttttcttttttttctcagagtagtaaaaataacttcaaatcgggatttaggctgctctgttgaattgtggatttcacacaaaacagccttttcccacagttggatttcagtgggaaataaaatgtatgcaacattagggatttaaagcttttatttctgaatgtctaccttaaactatgataaaatattttgtttggtttcttttttccactttacatacattactttatctcagtattaataaagaggcttctataatatgtagctttatttataggagcaagtagacccagaagacataagtctaaaggagcctgtgaattttaaattaagtgtctttgcctcaagaaaacagtcttagcctccatgaagaattcatcaagctgtcttaaccacttgaatctatctagccctgggaatacgcataaggctttatttcttccttctttttctttatttatagatgaacaaaatgaagttcccttttttttgtccacctcctacacttcaaacacagaagtatttaaaagccattcactccatgttcaatcaccacgttttagtagtgtcacattttatttggggatatgtaaaattgtgtttttttttaaaaacatttgttttccttttaaagaaacgaatttccataatgcacaagcctccgatgggcacctctattatctacatttcatggataagctttaccattgggggaaaaaaaagaagttgaatttttttttgtattgtcagttttcctttgaagcatcaaataggatattgatattttttcgcacttaagctatttacttactgtgacttaacgagccgttataaagtgagccatatccccaccgtgcatttcatacaactattactagaacttcttttcagaaggatttatctactaatcaatatctttcttattgtgccatttccagaaatactaaacagacttctttctgaagcagggtttaactttagctttggtccacccgctctaagaggtgtacaatgtgcaacagggactctaacaggtggatcatgtagtttttgtgatgtggctatggtcaccattatttttggttatttccagggaagatgaaactcattcaattgcattatctggtaaaaagcaaagtcgttctagaaatttaaaattattcttaaaaccattatctttactgaaaacagatatgtcaattactgaaaacagatatgtcaatcattaatttttagatgtttaacaatgtttctaaaagactattttagattataaactcgtagaggcacaagtaaaaaaattcatcgttatcaatgatatatattatctgtatttttttctcctctttttcttaaagttgacattttgacactgaattgaaataggtagtagtaaattctgcaggaaccataaacaaaatttcttttgagcaacagcactctccctgtgatatatattttctacagatgatttacaggttacagacatgctgtgacctttctctcccaattgcaaacagattaaggagagctgattaaccgagactaaaaacactgggtcgttttctcttatgggggtctttgacaaagccctcctttctgagtcctcccacttcattcgcttgcaaatcattgtgcccaaagaagtccttactcccccaagcccaaacctggcgccctgcagcgccatcagcggcaatatcttcctatttgagggacgtctcttattaatcagaaacgctgaatggaaaccaatcagatagagagttcctttgccttcagcttcctgcctgtctgagttaaaagtgatgctcgaagagaaagccacactgagatgcatgaagattcagctgtgaagatactataaaaagggaagagaaggaccgagacagaagcaacaacggaactgtcagtgcggagtagggctaaactcagttccattgttaagcaaggtaagtgttatttactttgcttgacaatgtaagctattcagtttttgctttcttataacgaagtagtacaaatattgcttttctcctagttgctatattttgctctctctctctctctctcaacacttggaagcacataagaatacattttagtagtatttgagtaaaatgtttacatgctcagtgacaaaacttgcaacatttgcttcttattttacttttgcaaagctgatacctactcaagctctttttatagtcctcatatttgcatatggaatattgtcgtaaaaataaaactaaacttaaaattgtatcagttgattgtggtggctttcaattattcacatatttatgtgttcatgtatgtgattattatattaatttgaaatggactcctggtcttctcataacttttgtttaaatcacttgagtcaaaattgtcaaaaataagggcatctttattaataattgaataagaaatgctttctttattttcaatattataaatgaaacaatatatgaatagtaaaaatgccacagatgcatattggatgtcaggattaaggtgatcactttacctggtaaaagaggtttcttcacgtatttgtggctcccactcaggtcgacactctgaatgtatacatctgtgagctataattgctttctattattgtaggcaaatatgtcttaatgtaatgatgactagatagatgaaagccacaagaaagggagagtgtttctaagccaaaattggcatttaaaaaatttgaagtgatgtgggaaatgcattgatttggtggagcattgttttattgtgttttccatcgcatgctcaagatcaccattcacatcaaataaatttttgcaggtaggctcgtctcaataaaggcttggattttagctataaggtcatcaaaa

SEQ ID NO: 10402 - DNA, 6000 bp, Homo sapiens
aaataaactcacgcaaacctggtcattgcccagcgatccctatatcatcctctcctacacaagccagaagtgggagtaatcctcgacatctccgctcctttatgccccaacactccgtagtcagtctttcattgagttgtgtcagtttaacttactaactatctcttgaatacattcacttaccaccctttcttcttccactattgtggtcgaacttaccatcaggttctgtaggactactgcaaaaatgagctgcttctgtatcctatatccatgccttgggtatatcctgcaagcttttcaaaatgcaaatctggtaacatctctcacccacccatctcctcttcccccacggagggcatttaaaagtacccttgatagcttcccattgagtttggttggataaagaccagattttggccaggcacgatggctcacacctgtaatccctgcacttcgggaggtcagggcgggcggatcgcttgagcccaagagttcaagacctgggcaacatggtgaaaccctgtctctacagaaaaaaacaacacacaaaaaaacaaaaatcagcagtgtggtggcatgcacctgtagtctcagctacttgggaggctgaggtgggaggatcgcttgaacccaggaggcagagccaaaattgcgccactgcactccagcctgggcaacagagcgagaccctgtctaaaaaaaaaagacccaaatcttaaaatggccttaaaatggacagcactgtatgatttggaccttgtctgtaactattgcttttgccatcactccctccctcagcccaggtaaaaactcttctacttggttctcctccatcccatgatctgtcttttgctacagggcctttgcatatttcctctcaggaatgtcctctacctccaacttggttaacttcagttcattctttggcttatgacttcttcagagcagctttgagtcccagataaaaacttaggtttctcacatatatgacagtacatgatctcataggactgtattccttctttcaaagcatttctacatttctacattaattagcatcaggatttgcttaatatctgtgcccttcattaaactgtcagtttcatgaaaagtatggctatgtctcttttggcttagtattgtatctttattgcttatgacaatgcctggcatgcagcaaacatgtagaaatatacttgtttgatactgaattaaggaccagggttctaatccaggtctgtgattttccagaagtgttaagttgggcagattacttaacttctctgaactgtttcttcataggtaaaatgggcatcttaatctgtgttccctaggaagcagggcctaagacaaagtcttttgtgctttattagggagtgcaacagctgggagcagaagctagtggagggaagcgaggagtgaaggggtcgttgagcttgctggagctaaatgctactgagaagttgtataaacgatctcaggacagttcatgtgaggaaagaaaggggtcctgttatccacctgcttgaagtgcttactctcccacacttgtaggtaggcatggaggtgctgccagaccgcactgcatgagatggttgcagtccatgtggagctggtcagcacagcagcagcacctaacctgcagggtcctggtgggggttgctggagaccgcgcctggcacatctcagcaggcaataaacaaacaatcaaggccaggcgcggtggctcatgcctgtaatcccggcactttgggaggccgaggctgctggattgcctgaggtcaggagttcaagaccagtctggccaacatggtgaaaccccgtctctactaaaaatacaaaaaaattagctgggcgtgccaggcgcggtggctcacgcctgtaatcccagcactttgggaggccgaggcgggcagatcacctgaggtcaggagttcgagaccagcctgaccaacatggagaaaccccgtctctactaaaaatacaaaattagccaggcgtggtgacacatgcctgtaatcccagttactcgggaggctgaggcaggagaatcgcttgaacctgggaggcagaggttgcggtgagccgagattgcgccattgcactccagcctgggcaacaaaactccgtctcaaaaaaataaataaataaataaataaataaattagctgggcgtggtggcatgtgcctgtaatcccagctactcggcaggctgaggcaggggaattgcttgaacctggaggtggaggttgcagtgagccgagatcacgccactgcactccagcctgggcgacagaatgagactctgtctcaaaaataaataaataaataaataaaaattttttaaaaagtaacactcattgttgtaattaggaatattctcattcctaaaattccttcttttttccttcctaaaatatcctttcttcctcttcctgtttttaaaatatctccttccttcctccctcacttcttccccagctgccctccacccccacccatcatgatggctgggggtggagggcagctggggaggaaaaaagctgcatagactttcatgacctgagaagtgccacacagtcatgttggccacattctattcatttcaagagagtcactaagtctggcccacactcagggggagggaaattaggcttcacattttgaggggaggagtatcagaggatttgttggcattaaaaccttcaggagagaaaggagaacaactgggtgaacaggggcagagctgggagggagattttcactacacatatctttgtactctttgaactacatacttgactatattagtcaagtaatttttttttttttttgagacggagtctcgctctgtcacccaggctggagtgcagtggcgcaatctctgctcactgcaagctccgcctccggggttcacgccattctcctgcctcagcctcccgagtagctgggactacaggggcccgccaccacgcccggctaattttttgtatttttagtagagacggggtttcaccgtgttagccaggatggtctcgatctcctgacctcctgatccgtccgccttggccttccaaagtgctaggattacaggcgtgagccaacgcgcccagccaattttttttttttttttttgagacagggtcttgctctgtctctcaggctggtgtgcagtggcacgatcaccctcatggcagcctcaaattctgggctcaagcggttctcctgcctcagcctcccgaagacctgggactacagatgtgggccactactcctgattaacttttttcacataataaattaattacatttattttacaaagaaatatttcaagctacaacatttggtaaaatcagaaaagatgaagaaaaaaggtccaaagagggtgtgggctggcgcggtggctcacgcctgtaatcccagcactttgggaggccaaggccggcggatcacgaggtcaggtgatcgagaccatcctggctaacacggtgaaaccccgtctccactaaaaatacaaaaaattagccaggcgtggtggcgggcgcctgtagtccagctactcaggaggctgaggcaggagaatggcgtgaacccgggaggcagagcttgcagtgagccgagattgtgccactgcaccccagcctgggcaacagagcaagactccgtctcaaaaaaaaaaaaaaaaaaaaaaaaaagagggtgtgaatgggagaaattggttgaggtgaaatcgaccttcaccaagacaggtgggaaaaagggaaggtctacttggtgtgccccctggaccctctcttcccttcatttagcactgtcactttccagggcatgggatggtaggcagcagcagttctggataatggatttgtggaagagaagaatccatctaaagcactctttagccacagcccatgatcactttttttaaaaaatttttattttttgctttgctgttgttccactctgtccatacattgtttaatacaggatggcacacaataccattcctggttaaatgtttcacttaacaagcgccaccctctactcctccaactcctgtctcaggtttgacagctatttttttaacctaatttgcgcacgccaagaggatttcacctagtaactacacggagagacatccgatgcgtacaaagacgtggcatgaaacgctgcaggtttattgtctctataaaaagatcgttaaggtcgagcgtgctaacgtgtgcggtactaactgtactcactacgccctggtcactttatagcacaagtccgaggcaaggaaagaagttttacaaacaaaactggtcaactgttctatcttcttactcctggaaaacaataaaggtccactttcaaaccatttggacgcacttgctccttctaaagggttagggagtcccggcagatagcgtacccctccccgcccagcagcagagagcaaagtccttcctgccgatcctgcagaccccggagtccaaatgggaccccgtccacacgaccgcggagtcgcctccgaagacggcggtgtctggggcgtggagggcacggctggaggctgagtggggtccaccttcgcgtggcccaggctcttccattcacggggggccccgccaggttcaggctccagccctgggtagtgaaggggaaacggggaacggaaggagggagggcacgtcacgggagcaggactgcaggaccgcgggtcagggggcgcaggaacgccaaagaaaagacaagcaccgagggccgggaagggtgtaggctgcagtggcagcggatccccggccgccgcttccggcgcctcccggcccagctctcccgcgccgactctgccacatcctccggtgacgtcagccggggccgccatattggaaaggcgccgccgccgcctccgccttggagctcggggtgtttcggggactgcggccacaggcaggaaggcgctcctctcctgccccgccgacgcccggccagcccgcttcgccctgacctgtttcctcatgactgcccccggccctgctgccgacggacgtcgccccggcgtccggatttaacacggaaacccggatcggaggccgcgcggggaggaggagggcgacccggtcggtcctgcgaccctctcggcccggctcggcgcctcggcgggagccatgacctcgctgacccagcgcagctccggcctggtgcagcggcgcaccgaggcctcccgcaacgccgccgacaaggagcgggcggcgggcggcggcgccggcagcagcgaggacgacgcgcagagccgccgcgacgagcaggacgacgacgacaagggcgactccaaggaaacgcggctgaccctgatggaggaagtgctcctgctgggcctcaaggaccgcgaggtgcgggcgcggcgggctgggcggggggcggcggcgcggggcccgggcgccaggtgagctccaggtaggtgccaggtgagcgcccgaggcttccggcccgcgcacctgccctcgctccgaagtccgcgcctggtggcgcccagctgacgccgagcggtgtcggagttggttgaccccctggcgcggctggtgctttctggatcctccccgtagagatggcttggatttttccttacccctttcacagtcgctcctttcatttcgacaccctggcagtttgtatttcttcgtcgccttttttccgcgtttttaacccgtgtagaccccagggtgcaaatccaacccggagactgcccgggaaactaacagctggagccaccagcgccacgaactctttgggtttttgcaggctttaggacctgggaggggtgcccggatctgcttgctggggatgttttttttttcttcttcttcagttaaagcttactgttgggaattacgaaaaacgtaggcgaagtggtaatagagggaaaagctcttttactgagtaaagttaagttaagtttctcatgaaacctcctggtaaatgactttctaggtgaacttacattaggtgag

SEQ ID NO: 10403 - DNA, 6000 bp, Homo sapiens
ctcatttgagaagcccttatagaacatcttattttgcatagtacagtgggctcagcattcatttttattgattataattgctctgttcaaagcataataatttaggaaattgtatttttcctcaggacttggactaaagtctgatgaacttcccaatcagatgagcatggatgattggccagaaatgaagaagaagtttgcagatgtatttgcagagaagacgaaggcagagtggtgtcaaatctttgacggcacagatgcctgtgtgactccggttctgacttttgaggaggttgttcatcatgatcacaacaaggaacggggctcgtttatcaccagtgaggagcaggacgtgagcccccgccctgcacctctgctgttaaacaccccagccatcccttctttcaaaagggatcctttcataggagaacacactgaggagatacttgaagaatttggattcagccgcgaagagatttatcagcttaactcagataaaatcattgaaagtaataaggtaaaagctagtctctaacttccaggcccacggctcaagtgaatttgaatactgcatttacagtgtagagtaacacataacattgtatgcatggaaacatggaggaacagtattacagtgtcctaccactctaatcaagaaaagaattacagactctgattctacagtgatgattgaattctaaaaatggttatcattagggcttttgatttataaaactttgggtacttatactaaattatggtagttattctgccttccagtttgcttgatatatttgttgatattaagattcttgacttatattttgaatgggttctagtgaaaaaggaatgatatattcttgaagacatcgatatacatttatttacactcttgattctacaatgtagaaaatgaggaaatgccacaaattgtatggtgataaaagtcacgtgaaacagagtgattggttgcatccaggccttttgtcttggtgttcatgatctccctctaagcacattccaaactttagcaacagttatcacactttgtaatttgcaaagaaaagtttcacctgtattgaatcagaatgccttcaactgaaaaaaacatatccaaaataatgaggaaatgtgttggctcactacgtagagtccagagggacagtcagttttagggttgcctgtatccagtaactcggggcctgtttccccgtgggtctctgggctgtcagctttcctttctccatgtgtttgatttctcctcaggctggtagcaagttctggatcttatacccaacacacagcaacatccagaaataaagatctcaggaccccccagcaagtcgttttgtgtctccttggactgagttaagttacaagcctttcttatacctgtctttgacaaagaagacgggattgtctttacataaaaccagcctgctcctggagcttccctggactcaacttcctaaaggcatgtgaggaaggggtagattccacaatctaatccgggtgccatcagagtagagggagtagagaatggatgttgggtaggccatcaataaggtccattctgcgcagtatctcaactgccgttcaacaatcgcaagaggaaggtggagcaggtttcttcatcttacagttgagaaaacagagactcagaagggcttcttagttcatgtttcccttagcgcctcagtgattttttcatggtggcttaggccaaaagaaatatctaaccattcaatttataaataattaggtccccaacgaattaaatattatgtcctaccaacttattagctgcttgaaaaatataatacacataaataaaaaaatatatttttcatttctatttcattgttaatcacaactacttactaaggagatgtatgcacctattggacactgtgcaacttctcacctggaatgagattggacactgctgccctcattttctgctccatgttggtgtccatatagtacttgattttttatcagatggcctggaaaacccagtctcacaaaaatatgaaattatcagaaggattatagtgcaatcttatgttgaaagaatgaactacctcactagtagttcacgtgatgtctgacagatgttgagtttcattgtgtttgtgtgttcaaatttttaaatattctgagatactcttgtgaggtcactctaatgccctgggtgccttggcacagttttagaaataccagttgaaaatatttgctcaggaatatgcaactaggaaggggcagaatcagaatttaagctttcatattctagccttcagtcttgttcttcaaccatttttaggaactttcccataaggttatgttttccagcccaggcatggaggatcacttgaggccaagagttcgagaccagcctggggaacttggctggacctccgtttctacgaaataaaaataaaaaaattatccaggtatggtggtgtgtgcctgtagtcctatctactcaagggtggggcaggaggatcacttgagcccaggaatttgaggccacagtgaattaggattgcaccactgcactctagcccaggcaacagaacaagaacctgtctctaaataaataaataaaaataataataataaaaaagatgttttccctacaactcagacttttcatttgaactcggtccagcaaggaaaatataacccactcgaagtctttaaaacagaggaaatttaatataaagaattccactggtgacgaaagagcagagaagcccagaagatagtgaggcaaccctgataggaacataactaggaagccaagaccactcctatggttgcaggggtgatgggaaagctggtgtacttggacccagaagccaaagttgctgcacccaccttggagacatagacactggcagtaatacctcagggagaagaaagaaatctagggaaatatcctggcttctttccttctctctctcccctagtcttcctaccagtgtctcccattagccaaatctacctagaagccagaaaacaagggaaccctggaaatgtagccccataagataaagagcaccaaaggaaatagatctgagcagacaggcagcacaaaatgcagtgtgtatggtttattcactcagtaattcctttagcaaatgtttattgaggatctactaggtgccaggtatcatgatacttgctggggataccataatgaacaaaacagacctgttctccgctcttgaggaaatcaaagacaaacacaggatatggaataaacccagaattatctcattgtaaaatgtgttaagtaccacgaggagaaatatcagggcgatctgacacagctaatgatttgaagaagggtgtgacctgccaccattttaaatctagttatttcactcctgagctgtgtgtgtggaaaacttgtagtaaaaaatagaatgtctatatttataaaaagtttatgaaaagatatcaatttatttacattttgacaaactctatgtaataaggctttattacctcacggccatgtgtgtgatcatgtgtaatagcatgtgtgtatgagagagagaagccatatgtaattatgtgtaataacgtctgtgagagagaagccatgtgtgtgatcatgtaaaataacgtgtgtgagagaagccatgtgtgtgatcgtgtaaaataacgtgtgtgagaagccgtgtgtgatgtgtaataacacgtgtgtgagagagaagctatgtgtgcaatcatgtgtaatagcatgtgtgtgtgagagaagccatgagtccgatcatgtgtaataacgagaaaagccccatgtgtgatcatgtgtaatagtgtgtgtgagagaaaagccatgtgtgtggtcatgtgtaataatgtgtatgagagagaagccgtgtgtgatcgttgtgtaataacgtgtgtgagagagaaaccatgtgtgatcatgtgcaatagcatgtgtgtgtgagagaagccatgtgtgatcatgtgcaatagtgtgtgagagagaagctgtcatgtgtaataatgtgtgagagaagccatgtatgatcatgtgtaataacgtgagagaagccatgtgtgaccatgtgtaataacgtgtgtgagagaagccatgtgtgtggtcatgtgtaataaaatgcatgagaagccatgtgtgatcatgtgtaatagcatgtgagagagaagccatgtatgatcatgtgtaataacgcatgtgagagaagccatgtgtgaccatgtgtaatgtgtgtgagagaagccatgtgtgatcatgtgtaatagcatgtgtgtgagaagccatgtgtatgatcatgtgtaataacatgcatgagagaagccgtgtgtgatcatgtgtaatagcatgtatgtgagaaaccatgtgtgatcatgtgtaatgtgtgtgagagaagccatgtgtgtgatcatgtgtaatagcatgtgtgtgagaagccgtgtgtgatcatgtgtaatagcatgtgtgtgtgagaagccaggtgtgatcacgtttaatagcgtgtgtgtgagagaagccatgtgtgtgatcatgtgtaataatgtgtgtgtgagagaagccacgtgtgtgatcatgtgtaatagcatgtgtgtgtgagagagaaaccatgtgtgtgatcatgtgtaatactgtctgagagagcccatgtgtgtgatcacgtgtaataacgtgtgtgtgagagggagagaagccatgtgtgtgatcacgtgtaattgtgtgtgtgtgtgagagagagagaaagagagagggaacagtacaaaggaggatccctttagaaaagtattccaacgtcttatggagccagagggctgattcacagctgctaatctctgtcatgctttccagcaccaccccctccctctcatcataacttgtgatcttagaggcaggaaagaatttgagcccctcccccagcctgaccatctctgttggttgctcggccaggctccacgtcaaatccagtttgaaacacagaccctaggaccacgcaggaggtggtgggctcgcaggaaggttcctctcccagtggccatgggtagcaacagtgggcaggctggccgccacatctataaatccctagctgatgatggcccctttgactctgtggagccgcctaaaagacccaccagcagactcatcatgcacagcatggccatgttcggaagagagttctgctacgcggtggaggcagcgtatgtgaccccagtcctgctcagcgtaggtctgcccagcagcctgtacagcattgtgtggttcctcagccccatcctgggattcctgctgcagcccgtggtcggatcggccagcgaccactgccggtccaggtggggccgccggagaccctacatcctcaccctgggagtcatgatgctcgtgggcatggctctgtacctcaatggggctactgttgtagcaggtaagtgggctgcacaaggtgggcagacagggatatgtgtcttagtgtgtacctctgcaggaggaggatgttcatgtgtttgacctttcctagaaatttgttagaattgatctctcctaggttacaatgaacttcccctttgacaaatttggcccagattctgtggttggggagcctctacttctagaaatatcaaaataaatatgtttcattgttgtgaagatttaaaaataggattaaatttgtatctattttattaaatttgtatctattttatcgaattgaatatttttacatatttatcaattgagttactttttgagcccattatgctctatttaatactcttatcaaattgactggctgccaaatagctccataaatatttacaataagtcacctgtgtatccaaataagttaattctgttcatagttttatgtagagcgttttaataggcgtagggcataagcccatcagctcaagaggacctttctggcattgcaaattctggacaaaagcaaacctgagggtaggcattttttctagccattaatcagctaccaattaatc

SEQ ID NO: 10404 - DNA, 6000 bp, Homo sapiens; identical to SEQ ID NO: 1137

SEQ ID NO: 10405 - DNA, 6000 bp, Homo sapiens
tgaggaaagctacagtaaatttgatatagcaataagtggtttgataggaattaactcattttgtcatctctacaaccctacgaggtaggtacttttaataagccctttttatagagaaggaaactaggaaaaccaagacttgattttacatcattggcttcacttcaaaggctagggaaaacaaaaacaaaaacgaaacaaccacagtaagagtctcactacttactttcaacaatagcaatgttcaagttaatcaccagaaaaaaaattagctctgtatgccaccaaaagatagccaaaattgttgtgtagtgtccctcttaacttggatatgtgagtatcgctcaggtaagtacccttaagacaaattcttcccagagactgggtcaggaaaggctttctcctgatgaaactgtaggactccttccacttgacaatgagagctatgcaaaccttcatttcccctatttcactgctatgaggaagcttgggctcagttttatgctcaaatactattgtttgtctcagccagaatttcaacttttcttttttaaaaaatatttgtctttcattgtaaataaaccaccttaagtcccttttggaagaaggcacggtataaataaacaaaagacaggctgggcgtggtggctcatgcatgtaatcccaacactttgggaggccgaggtgggtggattatgaggtcaggagttcaagaccagcctggccaagatggtgaaaccctgtctctactaaaaatacaaaaaaattagccagacgtggtggcggacacctgtaatcccagctactcaggaggctgaggcagataattgcttgcacctgggaggcggaggttgcagtgagccgagattgcaccactgcactccagcctggacgacagagcaagactctgcctaaaaaaaaaaaaacaaaaaacaaaacaaaacaaaacaaaacaaaatgcaatcctgttggggccaagctagagatataatttatcaaattacttgacatagcaccctgaaatcattgcatctaaaagagaatatcctaaacagaattttgagcagatactatttttgatggtctttgtcatatttttcatgtctctcaaatagcattccaaaccactttgggtaaagaacataaaatctagagaaaattatctgattactctcaaatgtcttcatgttacagggatataattaaagttttgaatcttgtccaacactgtgctcaaaaataaaccaatttaagtctacatttatcagtcaggcttaaaatgaaaaaaagtttcactcatttcaattattcaccggttaataaactatgcttaatttgtagaatgtttttttttttgcttccaaaatttattccaggaacacagccatatcttctcctgctgactgataaacactatatatattagatcacacatagagaagcctgtttaagggtcaagatgtaggtgatttaatgaaaaaaccaccatcaactcaaggttgctgtttctgtgagtaattgatctgttcaaaaaacaaagcgtttcatttccagaactttcattacaggtgtgactatgatttttgtttcatttaaacattattatataatgatgcatttcaaatgcaatagcatttacaaaaaagaaaataaattatcaaaacaaaaacagaaagaagagccagtagctgggaagaagatcacagacgtttagcacaaaataattaactaagaagtcaattctgcttatccagcaagtacttacagctcaacattttgctacttcagtcccattcaattttagcttgtgacaaaacctacacttttacttcagttttgtgacttactctgtttcattattttatttattcaacaaacacttatggagataaggctcgttgtattatgcaatataagcatcaaacaaagtacgttcttgttctgatacttattttgcaacacttcatgaaattgcaaaaagtaaatattatataaattagaatttacaacacagactggtctatgacaaagtaagtaaaaatagtctcaatccatgagacttgaaattgagctgaaattccttcaggagtccatatggattaattcagatttttatacaacagataagaaaaatttattcttgacagcacagacagcagtcaggtgccccaagctgggttatggcctggtcaaatattgctaacatatttttaaagctcttgctttgttacagaaactccgtttttcctcacgaaacagtgcgtataccgcaactcttcaaattgtacctcagtatggtgtaaggaatgtggtgttccttagaagctgtggcaaatccctaaatttcttacctgtaaaatgggtatacatggaaggcaggtcttctgtgaagctcacacagcataaactttcgggcatcttctctaggcctccatcccaggccttggcaggagccttggcgatacattcacctggtcatatgtttatgtacaatttgcaaaagcaatatattgtcaccacaattagctgagactgaggtctctttccactaggactttccctctgccattttcccttctattgggtggtgctagggcagcctggacatgctgtgggatagggtcaggctttgtgttcctacccaaacctcatcttgaattgtaatcctcacttgttagggagagaaatgacttgattatggggacagttttcccgtgttgttctcgtgatagtaactgaattctcacgcgatctgacggttttgtgtttggcaagttcctccgctcacaattctttccgcttccttgtgaagaaggtacttgcttctccttccaccacgattgttaagtttcctgaggtctccccagccatgtggaactgtgagtcaattaaacctctttcctttataaattacccagtctcgcgcagttctttatagcagtgtgagaacggactaatacacagtatttgctttttctttaagaggaccacccaaattgcataaattgcaggccccacaaaacctgcattaccccctaagtgtgagaatagtacctatttcacaggtgtgctgtgaggattaagaggtaatggacacatggtgtgtatcaggtggatgttagccattatcactactctgaatctccatctttctattatagcaaggccacagaaatgagcattttatgtaatattcttaaaactaaattcttctcatggaatgggatttttcaaccccaggcaacagggccacatcatgtttttcttgggctctaggcctttttgccttcgttgagccccttactccattaaaatatatatacatatacacacacacatatatacatacattttaagattgtattagcacaaaaacaaatatattaatatatattaaaatactttcttaaacctaaattttttttccttctgatttgaaaagaaattaaaatattttttgtgggcctctaaaaatattgtggaccttaggcactgtgcctaatggaaaagacagtgacaggattgtgcaatatgaataatgataaatttcccaaaccatcaaggactcaagaataagggtaaacatcttaaatggggttggtttcgagtacttataatagaaaaatgttatccaaacaaggtcttaggggtaacaggaggcgtttttagtgttcaaaatacgcacatggatggagttggccattaggacgctaatagcgaccgtatctagctgtgaaatacatatttttgttttgggagtctacttttcagtaaatgtcctttcaggtgttttgttgcccatttaattacatgatcaacaaggaagagttattttacaaaacaagcttcattttgccaatttataaattgctttggagtttcatcgaaaggtctttaaaaaacacgttggccttggtgctggtgcatcacataaatcacagatgaaacaaacaagcctgtttcctactcaaggtgtgtctgtagagtcctgactgcgtgccaggggctctgtctggcacatttctgaactttgcaaaattaattgtgccgaagagaacaccatcaaacgcgtccggcatacagcgtaaacatcttcagaccgtgattctgcgccatcaaacgctctccagctaatttcatttggtgattactctgctagaaaaccgaggccaagtgaaactgcggaaatgggaacaatgtacggaggaaaaatctcaccccattaagagatccgtttcttctccgcacaaataagcccaccccgcctccgaggcaagactagatggctccaggatactctcggcgcgcccgctggccatctcgggcaggggagccccacacccggcaggaggaccaggacgcgagcggcggcgcctcggccctgggctgtttaggtaattcgcaaagtcccaacaatcatccccctctcccagaagctggttttcttgtgtgcagtggttacagaggcggcgaaaacacggttccccgctttcctctcctcaaggcactgtttgcagcggcagcagcggccgcattcggggaggcgcggtcctccccgcagagccgtcgcgcactcggcctttctcgaggatttgcctgggctcggccgcctcgctctcccctgcgcttccatgaccttctgagagcggcctcaccaccggaggctcggaggaagcaccaccctcggcgtccggggcccgtcgcgcggccgcgttcctccgactccttggagcacccgcgcgcgcgggcgcgcggccggggatcggcgggggcgcgcgggttggggcggggccggggccgggggcaggggcgggtcaggggcggggccgggcccgctgcgcccccagccgagcggcgtgcaggcgccgcccccgcgcgccgcagtcccggctggagcgactcggccgtggcggtggccgttaccgttgcctctgggaggctctggcggcggcggcggcccgcggggttcgcggagcgcagcgggccgcccttcgcccgtggccgcctcaagcagcctcgcgccgacacaggggaggcgagacggcggctgcggaggcggcggcgcattgtgcccggccccctccttggcggctcctgcccccgggcggctgtgggatctgggcagccccggggcggcggccgaggctacagagccggcggcaggggatggcaagatagcggcgcgggagcgtaccgtgagtcctgggggcgggtgggcgcggcgcggagcaggggagccgcggagccccgagcggggtccccaggggcggcccgggcggggtggggcagcgctcccagctctgcggagcgtcctaggggagtgaccccggagagcgccgctccgggtcccgccgctctccgcgcgcccttgggtcaccctcgtgtcctgggggacgcggactccagcgcccagaacttctgccccacgcagggcagtgagttctgaggccagaggttacctgggggatgggagggagcttgaaatgtttttccttcggagaggtgacctgccaggtgatttcgtgcccctctgcttcaactcccctttaaacctgttcctcgtcctttctgtatccgtagtgcatttgacttacctgtatttttatgtgctaacttccgaaggtggtgtactggttaaacccaaagttaaagtgttggaggtcaaagttaggctttgtgaaagatgccatttctgttatgttgtgtaaaagcacaaagctggattcaggagttctgagcgacacaaaactgcacatcacgtgttctgaatttacatgattaatctgaattaatgtgatttttgccccccaccccccacattccgctaccaaaaatatatgaggtcttttatttgcagttgggtatctttgtgttcctttttgaatgtttaatgcagtcaaatattgttataacctgtattgttattgagtggcatttatatggaaatcggttctttgcatttctttttatgtgtctttaaaagatacattctttcaacag

SEQ ID NO: 10406 - DNA, 6000 bp, Homo sapiens
ttacagcaacgctgatggacaagggccagccatttgtcatctcacctgatgagtggccaagcccctcatttgcccttgcttggaattgtgtcctgcatttaattactaaacctctaccacatactgaaatcatacaagtgcttgtctccagcaagaccatggtgtgggctgctcagtggcaaagaagctggccttctgcagagatgaaagatgaggttgttaaaaatggaagggaaaaaaaaacccaactctgaaattctttatgactaatttttccttgtgatattggttgtggagttttctgtcaattctttattcacttggttgatttcaaccattattttatcttacttacaagaaagcagaatcattgctgctctaaaagttacagggtaacatgactgggctggaattgagtagaggatgcttctcgggtgtgtctgatgctgcctccttagtggaagctctaaaatttcactgtggcattgcaagacctgtggatctttggacagtcagtaagaaacagctatggaatggggcaggcattcctaatgagatccctggatactaagatcccttaacttactgctaagggactttcaagaaactgtttccttcactataaaagagtcaaatggaaatgaccctcaacatatttatatcaaatcagtaaaaattaagtgtttctgcctgctggtcaaagttttaatgtacatatgtctatgtttgccttaaaaactgggaaaagtattattaagcaaaaaacttagttcactatcacaaagttcccaagaaaattgaaactaagaagggaacaaagggcaactgaatggcgaaaaccctcagcagagtggaaaaccctggaatcagagtttaaagacatggtttgttcaaatctcacccctgcctcttctgtgtagccttgcaggtatttctctgagcctcatctgtgagactagaataaaagcttaccttctatggagttgacaggactcagtaacgaattttatagtaaagtaccctataagcaacatgacgtacttaaaataataacaatagtagtaatagcaaggtaggaaaagcctgagatgtggagccagacatagcaagtacaaatgtgcagttactcgtccctggctgacgctggacaaatgatgtaatctcaatgtgtctccatttcctcagctgtaaaacagattattttcaggattaaatgagattgcatatataaatatggcctgacacatattagaagttcaataaacatttattttgttatttggaagcctttaagtgttatacaaatgaaaatgttactattttcactgctctagtctaatgcatgatgatgctttatttctctgacatacacacagaaacataagcctcatttcaaaacacctcagacacatgatagatgttaaggacaagaaagagttaaaagcataaaaatgtggagcatattattcatatattttatatatttatataatatttatgattttatattataattatgcattatatgtaatatataattacatatattataattatataattataatatgtaatatataatataatttggctctgtgtcctcactcaaatctcatctcgaattgtaatccccacatgttgagggagggacgtgctaggaggtgatgggatcatggggacggtttcccctgtactgttcttgtgatagtgagtgaattatgagagctaatggtttgtttgtttgtttttgaaacaaaatctcgctcttgtcccccaggctggagtgggacagagcgatctcagctcactgcaacctctgcctcctgggttcaagcaattctcctgtctcagcctcccaagtagctgagattacaggcgcctgccaccacgcccagctaatttttgtatttttagtagagatggggggtttcaccatgttggccaggctggtctcgaactcctgacctcagatgattcgccagcctcggcctcccaaagtgctgggattacaggcgtgagccaccacgcccagccagctaatggttttaaagtgtggcacttcctcactcttgctctctcctaatgccatttacgaagtgccttgctttcctttcaccttccaccatgattataagtttcctgaggcatccctagccatgcagaactatgagtcaattcaaccacttttgtttgtaaattacccagtctcaggtggtatctttttttttttttttgagacggagttccactctatcgcctgggctagagtacagtggtgcaatcacggctcactgcaacctccgactctagattcaagcaattctcttgcctcagcctcccaagcagctgggattagagtcacccgccaccatgcctggctaatttttttgtatttttatagagatggggtttcaccatgttggccaggctggtcttgaacacctgacctcaggtgatctgccctcctgggcctcccaaagggctgggattacaggggtgagccaccgtgccagccaggtagtatctttgtagcagtgtgaaaatggactaatacaatatatattgccaatatataattaatatgctattagtatactttactgctgtcattatttttctacattatatttaacctgaactatggtgataaaataaatacaactgagcaattcagaaaagcctcctattcaaactagtcagccaaaaatatcccctcactccctcatcccccttccattgatttagtctccaaagagacaggtgatgtacaatctccagtcacatcaacttatcaagtctaatcatcacaacttctaatcaattagcatcaaatctagttagtataaagcatcccatcctgactgcttttcagtctttatttccataagtatcttgatagggtccagagaggcctcataagagccctcaacattgctacagcatttttctttttgtgagacagagtctcactctgttgtccaggctggagtgcagtggtgccatcttggcttactgcaaactttgcctcccaggatcaagcaattttcatgtttcagcctcccaagtagctgggattacaggcacacaccaccccacccacctaatttttgtatttttagtagagatgaagtttcaccatgttggccaggctggtctcaaactcctggcctcaagtgatccacccacctctgcctcccaaagtgctgggattataggcgtgcgccactgcacctgccctgctacagcatatttgacagattcatactgtttccaaatgtagcccacctgttattagccaagactcacaggaagtgtctttcaggcatggactcatcccatgacatagttacacgagttgtggcatccattcgaatcatcttattacttggcagttctgcatggcctacactccacagcaagctcaggaaaaggtgagatcagtcccattgaagacctcaagttctctgcataaaaaggagaggggccaagaaagtgggtgagagtagataccttttaccacaggtaggaatatcagtagaaaaggtaaggcagtactggagaaaatagctgtatattctgtcttccctcagctccaccccttgctttgctggtctttatatgtgctaatgtttgaaatttgcctataagtaataataatacttataaagtccctttaagaactatatccagagatatctgatgtctttcttctcaaggtggtcatcctcagtctcaaccctggctacacgttagaatgatccgcaaagcttttaaaagcatggatgcagggtctcatcacaagtcaattaacttagagctgagcagacagcgggcagccatcactactgttctcaagagtccccaggtcattctatttttgcagtcagtgctttaagagcagttgtgatgtccacattctctggtgttcccaaaaaggcactgctcttcccacaagtgctgggaagcatgaaatgtgagggggagactatttttcatgggtaggaacaagtttttctgtctcagattctatcttgttgacatgtgtgatgctgagataaggagaccactctttctggtggacgcccttaatgccttcgggagtttacatctcattcttcaaaatgtaccactcggcctataaggaaagccaggattgtaaatgcatttgctcacgtggaaataacctacctagcccatttgcagattaaaaaaaaaatgaagcatctacgtctgtgccatcctttccactaagtgcagttctttactaactttgacttcatgcctccatgagaagcatccacaggcttttttttccccaaaattgcatactccctcatcttccacccaacccctcgagtcttgcaaactaagaactgctgggggtccttcatttttgtttctatttttttgtttttgtttttgtttttgttttgttttgccggaattttgctcttgttgcccaggctggagttcagtggccccacctcggctcaccgcaacctccgcctcccagattcaagcaattctcctgcctcagcctccaaagtagctgggattacaggcacccaccaccatgcctggctaattttttgtatttttagtagagatggggtttcaccatgttggccaggctggtctcgaactcctgacgtcaggtaatccacccacctcagcctcccaacatgctgtgattacaggcgtgagccactgcgcccggcctttgtttccattttcacacagcactgctgcccatcttagggactttagcattcacaggcccattgccccatatctacttgtcaatatgagaaagcaggaggccaagaattacaaaatgattctcctttggttggacttcagtacccaggccacccaaattgacaaaaactctgaatgcagacaaacaatgcttgttccctgtcctctggccctttgcaaataaatgccttaccagacctgccctgccaccccactcgcagccacccagcaagagcagcatgtcagcctgccggagctttgcagttgcaatctgcattttagaaataagcatcctcacagcacagtacacgaccaggtgagtcagttacttttctgcttgtctctggaagtttcctgtaggattagcatctcaaggtcttcttagcagcaaagtacatgacaatgttaatccacatggcaatatacagagccctagaatctaaacttcgaaaagagataagaaaatacatagggtgcatctttatgagttttctgtggaaatgtgctgctgtttctggggatttattttcaacaaggcactcaaatgttaagattgaggtattctttaaatatctggaattataaaataaagcttgttttcaccagtgtatgatgaacctgggtttattagtgcctgatgtctgagaagtttaaaattaaggaaattaatctttccctcactctgcttcaatgcctgacacctttaacatttggatacatcacccttttgcctccacattaggcaaaggttaactattttgtttctttcccttgacatcctgagttgtgttcagaggcatgcattttgtttagggccatttgggatttaggtcatatttcttccattccagaattgcagtgatgcagacctgtcactcatgcttctaccaaagatactttttctcctttttctctgatcctaatcggaattgcaaagcccatggcaagtcatccaggaaacaaatcacccatataataagtttttattgaacagctacactgtacctagaaatggtggaggttagggtcacatgaggcatccttccttccatcctggagtcatcagagtagacatcgacctgtataattcaatacaggatgatccgttctggggagagtactgaaatattcctcacttcaacagtgtggctggggggaaatgtctgcccaagccctgttcctctgctcagacataaccataacctgcttccaattcctcattagtcatttgactcttggttt

SEQ ID NO: 10407 - DNA, 6000 bp, Homo sapiens
attaaaactaaagtgtgtttctggtatttatttatttatttagagacagggtctcactctgtcacccaggttggaatgcagtgacgcgatcttggctcactgcaacctcagcctactgggtttaaactattctcatgcctcagccccccgagtagctgggattacaggagcatgccaccacgcatggctcatttttttgtatttttagtagagacggggtttcaccatgttggccaggcggtcttgaactcctgacctcaagtgatctgcctgcctcagcctcccaaagtgctgggatttacaggcgtgagccactgcacccggcctggttttgactcttttgcattgccttatctgtctctttctctgctcagtgctaccctaagcaattctaatactttggacattttttcattgttttcatttttaagccatagcttatgaactgttaaaaatgatttattaatccagttaaactttaaaaacattttgttgcttttgtccgcatggagaaaactaataacacttttttttgttgttcgttttaaagtaagtaagttgctttattggttaccaggaatgactgtatattgctggtgagttgtttggtttgctttcttttttttcttttttttaagttttactttaagttctgggatacatgtgcagaaggttcaggttgttacgtaggtacacatgtgccatggtggtttgctgcacctatcaacctgtcatctaggttttaagcccctcatgcattaagtatttgtcctaatgctctccctccccttgccttccaaccctcaacaggccctgttgtgtaatgtttccctccctgtgtccatggaatcaccaaattttgtttgaaacttaaaatcaattttggaaggagcaccatatttataatattgagactttatggacaaagtatatagctaatttatttaaatgctttttatgtcttttatcaaaataaagtatcttaaactatggatctcagacatttcttgttaaatttattattgtgtagttttcatttttagttgcaattgtgaaaaaaatcattgttctctatattgccttaatggttattgctgatgcttaggaaaaatgttaatttttgcatgtttactaaagtaaccaaaagttgataccaacttcccaacttctattattagttatgatgattatccagttgattatttggggttttcaggagacaatattatcaattaaaaataccatgcattgcagaaatggtggatatgagcgtattgttctgactttaacagctttaatgtttcatattaagcatgatgttgatgtggctttccagatagataatcagatttgcctgtacacaagacacagaaagactgtgaggttgtcaatgaggaagtttttttttcactgttccttaccactgccttcttcaacagatgttcttattttatttccttacacgtgtaatatgtttgtaacatattactctgtcctactaagagggtcaaaatgtcttatcccttaaatctttaagtttcactgagattttccaataaaccatcaaacttcaagtcaccgatctatcttttttctttcatttcacgtgtgctagtatctgctgcatggagattttattttagatgcatattaatcttctgctgctgccttgcaatttgatcttaagcagagtattaaaggagacagggaacatttcagaagatgcacaattcttgtatatattgaatagcacccattacaactactgatgagacgttctcctgaaattaattcataattgatattctctaatgagtcctcagaaatcagattcctgtaaaatactaagcattttgacatcatgaacatctaatgacacagagtcaacatgatggtagtcttatttctaagatgtctttgaaataaacactcgcatttagctcgctagattttagcttgagatagtttatcaacaaaccgatacaaagacaagataagaagagattattctgaagtttcaagattctctctgtctcttcttctatcactgattccattcttttattgctttcactttgtctcaatcttcttgagagttcattcttcctccaaagaaaacttaaatttcatattctaaacaactttaaatcaacactctgaaaagtaaataaacatgactttttatattgctgacaactttaagttaatgcattgatataatatacacattctcaaatttttaagaaaatgtattttttgagattttgaataaataaaatatggcctagaagctatacttggaacaaccaatgacttgtgatctttttaagacatttcttagttctattttgagatcttgtttttcagtgattctgtcatatcagtttagtacaaaccttgaaactcagaaaaacttttactaaaataactgcctggtcatgagtaagattaagttgcaatagaacaaacagagagattggctaaaagaaaagcaaaacttacttaaactcagcataacattttagatggtatatttttacattattataaaatttaaaatttatgttaaaatatacattgtcacactcatgactgaaaatagagggactgaggaagcatgcagaatgggagaaaagtagggaaacatctttagtctaataaagaaaagctgcctgagtaatcgggtctttcttaggcagaactgtgctttgggcaatgtttgtttttatccattcccgtggcttccttctgccctcagcacctggtatccttatctgacctcttggctttccaaagtagagaaaggtctctattttgacagatcagagctctatattttcatatttttcctatctcttaccattaaaatttggccatccatatttattcttagggttctggtatatgattagttgaaaacagatggtgcctgagtcaggacatagctccgtgaaaaaaggagatttagcacaggctatggtaaggagaatggtaaggaaatcttacagaattgcaactgagttaggcctaatggctcgtttctgcttccctctgctattttctctgttctctgcttcctttctcagcctctgttaacccctcaggaaggcatccaattgtcttcctttgtctttatccttgcttccttcattgttaattggcttcatcactgtttaatttttcagaaaaacaccttgattagccccactcattttttttttcctcatgatagctcactagttgccagcctgacatacacattccctccttgagtgcctgccccttctccataaaatgtggctacagctgacaggaacccaggggatctgggactcttggcagggcaagatttcctttgaagaggctatgggcagggaggcaatgcttgtatctgaaacagatgttttgggacattcgggagtcttgaagctcttcagacgccggggctcccctgctgagtgactggtgggtttggcagcacattttgcttcctttagctaatccagtgggtttcagagacgcagagggaataagaggaaacggataatgctttcctcagcatcagtactacacttgtaagtttcccttaagagtgttccccccttctgaaatggtaatgacattctgacgagagattccaagacgtcttaacttcctagcgtggtgtcgttaaacactgaccgacacacacatcccttaatgtgttttattgattatgtaacttatctaaaaagataggtcagctcaggcgaggcctccctcacacacttttctttcaatattggtggctgatagatctgcttgcacgtgtattgatacgaatggccttggaaagaaagaaatcccgtcctctgtttaaaaaactctgcaagaattaacaaggataagtgtaaggaggtcagttgtctgtccccaggtgcagaaccttaatctgaaaagccccaagcagctggttacctaggattacacagacctggtagcttttgccctctgcctctctttctagtacacacgcgcacgcgcacgcacaggcacactttccctgatactttggacatttattttccattgtcaaactttactttcttttggacatttggttttgcacttgaattgttggcatgcatagtcagcttgtccccttttctccatctgtaacgttattcaaacaggcgttcagacaatgtcttcatgagtttaagatgtttgtttcttttggaccaacacacactcgctagttcagtcttgctctctctcctctctcccctgtctttcatgcaaacatacaccgagtccttctccacgtgtaccaatgaatgtctcctccgagggctcttgagttcaatgtcacgctgggcagaagtagagcaagagtaacgagcatgtgtggagagcggacggggagagaccctttctggccaacagagggcagccgaggggaggcgctggggcgcgagggctgagccgagctgagcctcgcctagctccggcagcctcagcttcagcaccagccgcaccggagcccggaccgcagccactaagggcagcggcggcggcgggagccaggcgcgcagctagcagcggcgcggtcgggaagcagcagccgccgccgccgccgccgccgccgcgacgggcagctgggctcgccggcagccggctcgggcccctaccctctcggctacgtgtctccggcgccgggcggccggcgagtctggagcccgcgccgtcgccggccgcgtcctccgggcatggaaggaggcggcaagcccaactcttcgtctaacagccgggacgatggcaacagcgtcttccccgccaaggcgtccgcgacgggcgcggggccggccgcggccgagaagcgcctgggcaccccgccggggggcggcggggccggcgcgaaggagcacggcaactccgtgtgcttcaaggtggacggcggtggcggcggtggcggcggcggcggcggcggcgaggagccggcggggggcttcgaagacgccgaggggccccggcggcagtacggcttcatgcagaggcagttcacctccatgctgcagcccggggtcaacaaattctccctccgcatgtttgggagccagaaggcggtggaaaaggagcaggaaagggttaaaactgcaggcttctggattatccacccttacagtgatttcaggtgagggctcccggtcgccgccccaccctcccttcaggcgcgccctgaaacgcgcttccccgcccttgggtggggggcgtcccggggactaggagggcgggcggggggtggcgctgccggcggcgtcggctcgggctaagcaggctccactcggcgcctccgggtagtttccacccaggaggggctcggaggatgtgctcctgttgcccgggaatcccggacgggctctcctccttggcctcctgaacttcggggacagatcagggaaggatggaggccacggtcaccctcctgggaggaggcgaagttgtacaagggaaacttttacttcagagacgagagcgtgaggaagcgggaagccacccttcctcgcgcggctccctcaagtgtggtctcaaccaggagggaaaaggaggcttctggggctcagaagaagactgggtaaccggagacagcgattcacaagcccgagcagttcctgccgcgctcgcccctggggagtgtgtttagtctgtttttctttataggcgctggttatcctcgctgtgtttactcagaaacagcggccggcaggcaaaagaagggcaatttgcacttggatagtccctgacgtgaggtctcaccaaagccaggcgcttccaggcagggcaggagcgtggcaggaagcctctagttcctgaaacagagagagggggcgttgacagagcccctttctgaaatagagcggcaccctttcttgaccttgactgcaagtctatttcaaaaatctttttcacgtcctccagctcgggaagaaggacaggaaagctgtcagcaggaaaactccg

SEQ ID NO: 10408 - DNA, 6000 bp, Homo sapiens
aattaaaatggatgaaaggtttaaatctaatacctggaactatgactatgaaacaattagatgaaaactttgcggaagtgttccaggacattaggctgagcaatgacattttgtgtaagacctctaaagcacaggcaaccaagaaagaatagacaaatggcattgaaccaggctaaaaagcttctgcacagcaaaggaaacaatcaacaatgatttaaggtcctgtatgagggatttgttaaagtataatcaaaatggaggcaacagtatattcttaggtcaaccactcatagccacataaccaaaatttaagctatcctgatttctctgaaatgcaatttctaatgattaacaaaagttaagctttcctttcttgttagtatgatgaaattgaaccaatttgttacagataaataagtttatacaactctacttgcccaaaaaggaatatgtttttaatagccagtcacagcagaggtcaatgcacttcctcattgatgctttataagctgcactgtaactctcacgtcaagtttcttactatttttgatttgaagtcttctggtttgtgaactattcttctgtatgtataataaaccttcatattccttttttacttgacctgactttatttttacggggtcctccatggcgtttgggtttctcacagtgtggcagtctcaggataatactgtagtacttttcactaggcaggtgtcttctatgagcaagatctccaacagaaaggaagtggaagctcttgtggtctggaacagaaagctcacacaatctctctctctctttttttgttttgagacagtcttgctctgttgccctggctggagtgcagtggtgcgatgttggcttgccgcaagctctgcctcctgggttcaagcaattctcctgacttagcttcccaagtatctgggattacaggcatgcgccaccatgcacagctaattttttttttttttttttttttttttgcatttttagtagagacggggtttcaccatattggccaggctggtctcgagctcctgaccttgtgatctgcctgcctcagcctcccaaagtgctggaattacaggcgcgagccaccacgcctggccagcccacacagtatctcttcagcaatattcagtaggttaggggagtcaaagagcccacccaactcaaggggagaaaacaaaggacccttattccccctttatacgcttcatgatgagagtatcaaagtgcttgttgcaatatttatttcaccaaggaggaaaaggtcaatttggaccagaaaggtcagaaaaagtttcccccgtctgggtatctccaattcttctatccctggttcacctcagagtattgcagttctgagaaccagtgcattctggattcattgtagaactttgattctctacttgactgtatgtcagaatcaccagagagcttgaaaaatcctgatacctggatcttttcccgcaaaactctggttcatttggcttgggattcagtgtgggcattaaggagtttcatcagctctccatgtagctttaaatgtgattttaagctggttaaaaaccacagctttaaaatgatatggcctagacagtgcactgttaggtaaatacttattccataggcatcagggttaagttgatatgcagagaagatctctaaagagaaaaaaaaaaaaaaaggtaggaaacaaatgaaagtggaataaatgaaggtgtaaatcaataagatgaatgggggaggggatgtcactctacgtatatggtataagttctgctcttttagctccacgtaagctaaaattgtggaataatgtacaagacaaaagttatgaagttagcatcgaatttaagccagaattaaaaattgtcaggcactctcagcttgttttctagattcggtattgatctctgcgaaattcagttttctctttgccaaaggatattgtgaggtttactggatatttttgacctagatgtataggcctacatacttggacacaggttgtctgttaacctaagactttgagtcaaattttaataataagaatagttataaatgtatagccctatgagttagcatttttttagttccagctgaaaaaagaaaaaagaattgtctagaacatttttctctcttctgggtatccccagtacttctatccctgagttgcaatccactaatattattatttatttgatgctcaatttgtcccagatttgtccagtgggaacccctttaaatgtccttaaaggtaaaaactgccagcatgttctactgagatatggactaacaatgtcagacatatgtgggtgcttgaatagtatttgcttcaaaaatatttattactagaaagctgctgtgtttggggtgagaggttagtagggaagggggttcataaagggaatgcaaaagccacgtcctctggaagttaaaggatcattttaaatgattctactgcaaacatttttcaaaagataaacatgacccatttctccaatttgtgtcatgtaatagtaataataatgatatttaaatactcccactgatatgtcctttacaaagatatattatatgtcttatttaatcaaaaaaccttaaaagagtccctgtacctaattttattccaggactcaaactgtgtcagcatgtcattcagtgcaaatcagacatttagatgcataggctatgctgtcagtagttctgaactttcatagacatttccaattagctcggagagacaactggatattgtgtttaagcactgtgtttaggaaaacaggcactggatggaccaatgccaaatttcctgctctgctgcttaactaagtatgtgtaattacttgggcaattacttaagcaattacttgggcaattacttaagccaatccccaatttcttcgtcttgagcccagaaggtcaaggctgcagtgagccgtgaatgtgcctctgccctccagcctgagcgacagagtgagaattccccaggagtgcagaggttctcagaactgcaatactctgagatgaattttgaaaggtgaatcagggatagaaaaagttatatagggaaggcagtcaataagcttgttttaaaggatatggagcatttgaaaaagtggaatgtacataaggctggaaatatcaaatatctaaatatagaacaggaacagtgatgaaaagactttcaaaatgcttagcaaaatgagaattatatttctttctcaactcttttgttccaacagcaaaagcaacagtggggatcagcatcaacttgggtaagtaagtttttctggtcataaataggctgattcaactgaaaaaaatgtttctttaagaagggtgaatttgtgtctaaggattttatgagactaactgggaaaagtcagtcagagtttagtttgaggtgagaagtgcttactgttgacactctacctaattatagggaaatgtgtgcagttagtcctgagaccagatgcagggttgaaagaaagaggtgtgatgtagcagccattgattaggcaatttgggtttagcaagcccagtcaatgccctcagagggtcaacagtgtataagatttagtccttgaaggcatcttttaaagtttcattcagaagattttaataattttgaccataattttctgagaagaggcttttctgagatttgtcattcacagataaacagttgtctaatttgtgtgtgtgtgtgtgtacatgtgtgcatgcgtgcatttgtgcatgtgtgcctatctagcctcttttgaacacaatggtagattggcacctggtagataatattgttgaatgaattgtattattcatattatctcactgccaatttgaagaatctacattctgtttccaaagttttgtgcatataatactaaaccagaaacagacgtgttttagtaatacgtaccaattacaaattaaccattcctgcctggaataaacacaggttttgttaaatagctcaattttcaaaatttgtctcatgttatttccaatccttttttttttaacgccgatatattttgaatttacgaatgtgaaagctgaacttcaaaaaaataaagggagaggaaacaaagctcgtgaaaaattttaaaaatatcttttaatgcgttataacatcctggagagaaatcaaatcaatgtgtttcaatgttacaatatagatttctcctcccctcccggataaagcactaatttatttaatttggttcagagcactgaatattccaagctacagccttgtgggtaagagcattatcttaaagagtgttcggatttaacaaaggtcaatgtcttgtgcagtttacatagtatctactctcagtagcttttgcttcttgagctctaggtggctcctcagaagctgttaggcttaacaaacaaaaataaagtaaaatcagacacggtatggggccttgggactctaaaaccttcatccggagaaaatcagttaagccttcagagactagaagagagaatgtgtgtgattggtaggcaaagcaaagaaagattaacacaagttgtctggcagctggataaaaccttacacctgcgcaaaaataagcctccctcgtaagaaagcccaaagatgtccggggtccgggaggagaaaagtgtttctcatctgtcccatcaaagcaaattagtgaaacctgcctcaggtgaagtgcaaaggccagtctgtaggcagagtttcgacctctccccacgagattggctagacatcacctgcccaagctctctcccgacctgctagagccgagagggcggaggccggagaggctgcagccgggaagtagcaccgccaccgcacatccgggaacgccagcagccggctgagggctgcataactgatggagggccgggcgcggtaagagcgtctcgggggagtggggcaaggcggccgggcccctcccattccgccttttcttcagcgtcctacccgcggcactggctgcgagcgccgggccacctgcgagtgtgcgcagggactctggacacccgcggcggcgagctgagggagcagtctccacgaggacccaggcggaccctctggcgccatgcgcgccctccccggcctgctggaggccagggcgcgtacgccccggctgctcctcctccagtgccttctcgctgccgcgcgcccaagctcggcggacggcagtgccccaggtgtgatgggtacagggtccagggtagggagggcggagggcgcgcgaggctcgggtccccgcgggcagagggcatcgccggcgcgccgggcaagggtggcggggagaggcgcggggatgctggtaagggcgggtgggagagtcggcggcggcctcccattagctacgtttgtgtcacctaagctgaaccctgaaactgctgcggctcgcgttcctgcgctctttggggcgagtcttgaacgaacagcgccccgcgagtcgggcgcgtaggtaacagggcagagtctggtttttcctaggaagaaggcagtggggtgtgtgggtggttgcagggaccagctagcgacttggcttgggcaaatatggcatgaattttgaaagccacatttccccaaggcctactcccttttcttgattcgagagtaaggctcgagtatcacctccttccctcctcttggcaggtgggttggctttgaggattttttttttttttttttttttttttttgagacggagttttactcttgttgcccaggctggagtgcaatggcgtgatctcggctcaccgcaacctcctcctcccgggttcaagcgattctcctctgtcagcctccagagtagctgggattacaggcatgcgccaccacgccgggctaattttatatttttagtagagactgggcttctccacattggtcagtctggtctcgaactcccaacctgaggtgatccgcccgcttcggcctcccaaagtgctgggattacaggcgtgagccacctcaccttgccgaggatgtttttt

SEQ ID NO: 10409 - DNA, 6000 bp, Homo sapiens
gctctgtcacccagtctggagtgcagtggcaggatcttggctcattgcaacctctgcctcctcggttcaagcgattctcctgcctcagcctccccagtaactgggactacaggtatgtgccaccatgcccaggtaatttttttgtatttttagtagagacggggtttcaccaggttgctcaggctgctctcgaactcctgacctcaaatgatctgcctgcctcggcctcccacagtgctgggattacaggcgtgagccaccacgcctggcctttcataacttatttatatgttatatatttatgtatcaaacattacatgattaaaatttttattttatttttatttttatttatttattttttgagatggagtctcgctttgtcgcccaggctggagtgcagtggcaccacctcggctcactgcaacctccgtctcccgagttcaagtgattctcctgcctcagcttcccaagtagctgggattacaggcgcgtgccaccacatccgctaatttttgtatttttggtagagatggggtttcaccatcttggcccgcctcggcctcccaaagtatcgggattacaggcgttgagccaccgtggtcggccgattaaaaactttaataaggtatgaagcaaatggctttgacaaaaagtgtaaaaaggattaaaatacaccatcctgtgaaattttctttttggagcacatgtactggggaaccagacatcgacatttttagttattttagtttcacagtgctatttgagtataatagaaactgtatttgcttcagtcaatttggggagaaagaacataaacacatggaaacacaaatatcctaagggaattgagtcttattactttgcagacaatttttgaaataaataagttgctgagacagtaagtgctgttagaatggagagagggagacttaccaataatattatgttaaagagcagtgcaagtagaggagtggggacagaattgagcatgcagaggtatcgaaagagaaagtggaaatgcagcatgtaaattgcagattccttttcaagaagtttagtaatgacagaagagaggaaattagcttctttcttcttcagggagcttcaggactgttcttcggaagcccaccctactttgcttttgtttgatgcctgtattacagggagaaaagtttggcccaaggacaaactttgttaagcatttatgcaagcctctgaggtttctttctttatttttttaaagtatttttttctgggatgcacaaactccagagaaatggagtcagtgctctcgcttctgaggtttcatgttcagtccagggacacactcatagctgcccccctcccccgggggtattaatggtgttaccatttaattcgtgtttcctttttaaattattttcatcaccatttcaaagttatttaactcattctcaattccaatgatcacaccagaattcaattatgacaacaaaccaaaacagtcaaacaaaaaaattcccccaaaaaggaatgaaagctccccattccaaaacaaaatgatgtgtcatagtcattctttccacaaataagggcttattaattgtttttttttttttttttgagacagagtctccctctgtcacccaggctggaatgcagtggtgcgatcttggctcactgcaacctccgcctcctgggttccagcgattctcctgcctcagcctcccgagtagctgggattacaggtgcctgccaccatgcctggctaacttttttgtatttttcttttttttttttgagatggagtttcactcttgttgcccaggctggagtgcaatggcgcaatcttggcttaccgcaacctctgcctcccgggttcaagtgattttcctgcctcagcctctcaaatagctgggattacagtcatgtgccaccaggcctggctaatctttgcatttttattagagacagggtttctcttgttggtcaggctggtctcgaactcccacctcaggtgatctgcctgcctcggcctcccaaaatgctgggattacaggcgcgagccacagcgcccagcctactttttggtatttttcatagagacagggtttcatcatgttggccaggctggtttcaaactcctgacctcaagtgatccgaccgcctcagcctcccaaatattgctaggattacaggagtgagccaccgtgcctggccttattaattgcttataatctgcacatggcacaagtcccatttaaaataacaggaaatgacaatgcattttaatgggctttggtttattaatctattttatttatttatttatttatttatttatttatttatttatttgagacagagtctagctctgttgccaggctggctagagtgcagtggcatgatcccggctcactgcaacctccgcttcctggattccagcgattctcttgcctcagcctccatgtagctgggactacaggcacgtgccaccatgcccagctaagttttgtatttttagtagagacggagtttcaccatgttggccaggatggtctcgatctcttgacctcgtaatccacccgcctcggcctccaaaagtgctgggattacaggcgtgagccaccgtgcccagccctaatcacatgctttctaagtgggcctcaggattccccttgtgggcagagaacttctcttgtttattttagcttcttcacagatgtgtaccaggtatccattaggggctcaataaatgttgaattaatgaatgtgtgaataaacaaaaaatcactaatcagtaaggtttttttgaatgcttatttttgaaaacgcactttaagagtaaattttttttttaaatagaaagaataagatctagtacttgatagtacaacagggtcactatagttaataattaaattgtacattttaaaataactaaaagagtataattgaattgtttgtaatacaaaggataaatgcttgagaggatggatacctcattttccatgatgtaattattacacattgcatacgtgtatcaaaacatctcattaccccaaaatatatacacctattatgtacccacaaaaagtaaaaataaaaaatttttaaaaagtaaatgtttttaaaaattacttttaaaaagtaaatatttcaaaagctgtttaagacactgagactagactgtaacacaataggtgctcaacaaatgttttttgaataaatacctaatactcagacatcacaagtactttgaatttattgtgaccttgcaatctgaggcccttgtaactctggaagtaaagaaagctacatgataaacaatggcacatctttctcaggtgtaaattgcttaaagcttttacggctatttaaacaagaggcaaaataaaacattagcattcgttttaaagaaaaacatctttcttcaaatgtatattttgtttttgagagcttacttggggctgtatctccagactctgtttaatgttatctttccattggctttatgagtgctttgcaggataagtcgaagaagtagtaggcacattttgtgatttgtgttttacatatttaaagagaaaatataccaatcattaacatctgtagacggtttaactctagataaagccactatcatataatcttttctgggtttcacttcttcctccagactggaacactgggcagcttaaagctgtaaaagctttaagcaatttacacctgagaaagatgggccattgtttatcatgtggctttctttacttccagagttacaagggcctcagattgcaaggtcacaataaattcaaagtacttgtgatgtctgagtattaggtatttatttaaaaaatccccattttacatattaggaaactgagattactaaatgtgggctagggtcctcctgggtatggggcagggggagtgcttgctgctgttaaagaaaattatcctgacacttgtcaaacacatgaataatttattcaagattattacaataagggtcatgactattggaacaggagagagaaattgagctcaactcagaatacagcaaagacagcaggggatttatagccaaggaacaggcaccgtgtctgtgagggaggtgacggtggatggaaaattactaagaggagacatcaagggtagagggattctggctaaaggcaggtcaagggcttctacaacaaaggtgtaatataaggaatctaatccgatattaaatatcaagaattcaacggtgatcaggtatcgaggatggatgatttagcatgcttcttgctaacatttgggctcagccaggacacagggaggtcaacgttgaggcctaagtgagaaagggctcagaggtaccaaactaaaggagagcgtctctgttcctgcctactctgacctcttttccccccttaaactcagtggtaacaatctgacctgtttattacctcatccccatggaaggggtggggagtggcaggcagccggtgctctaggatcgttgggtagggagcctagctctctgaaagcagcaatgcctagtgggggtaccgaggccgagttcggagaccacctgagcaattgcggtccagagcaaagccccctggatcggaacgggagccgcccccacgccccgcccggctgccgagagccgcacttctgggcggatgccgcaggtcgggagggatgaggccgacggcgctgattggctgaccgccgcggcctggggtttccctggccccgcccctgctgcactccccccgcccgcgaacccgcgcgctgcccggtcctgcgctgctcagcgggaggggctggaccccgcgttcctcctccctgccggtccccatccttaaagcgagagtctggacgccccgcctgtgggagagagcgccgggatccggacggggagcaaccggggcaggccgtgccggctgaggaggtcctgaggctacagagctgccgcggctggcacacgagcgcctcggcactaaccgagtgttcgcgggggctgtgaggggagggccccgggcgccattgctggcggtgggagcgccgcccggtctcagcccgccctcggctgctctcctcctccggctgggaggggccgtagctcggggccgtcgccagccccggcccgggctcgagaatcaagggcctcggccgccgtcccgcagctcagtccatcgcccttgccgggcagcccgggcagagaccatgtttgacaagacgcggctgccgtacgtggccctcgatgtgctctgcgtgttgctgggtacgtacgcgccgccgggtccgaggggcgtgtgcggctgtcccgggagggctttagcgcagagccgcgacgggcagcgggggtgtgttgcctgacgcgtgcgcagctgtggggcgacacacgggggcggcttctgcagccgagggaccccgctttgcagcctgcaccccggctcccgcgtgcccgccgctgtctgtcgcccgccggtgcgatgagcccagccctgcttggacgctgttcacgcctctgcgctccataccttgctcctgtcctctgtttgcagttccactctagcagagcagggtgggctcctcccctctgtacggtagaggagcctggtcactggcccatctcagtagtgaaactggaggtttgatgcacaggggattctcagtagcaggcgccagtgcctgatttatcgtgagaagcagtttaatatttcggctataaaaggctagaactagttcctaattagaaggtgtgccaggttgtaaattgtcaggttgcaagtagggatgagcacgccaagtttttgcgtataggtctaaagaagttttgggggtgggggaggatgcggtaccccagacctgtttccttgtctgcccagaccttgccatggtgtagctttccatctcttgtgacagtgtctcaaggagcagtagacattctttggctgcagcagatttcgcattgtcttcctgattggaagagttcagttatgaggcttctggttgccagtt

SEQ ID NO: 10410 - DNA, 6000 bp, Homo sapiens; identical to SEQ ID NO: 3430

SEQ ID NO: 10411 - DNA, 6000 bp, Homo sapiens
gttatgagtaacatgcagtataaataacatatagtgtctagtacaaagtcccaaaactcatgagagttaaatggagttttaaagtgtaaatattttttatgttttcttgtttattgtttccattaaatttctaaaatagtttttcctgatggtatattatttacccatgcaataaaatgtaaattatgatagtagttttatctctttgaagagcagtttattattatgaaatgtaggacatgagaattttaactagatactattatgttagatttggccttcacaaaactgtgatatcaagataaactgattgaataaacattcagataatatagttggcacagaaagcatttttataatatttgaagtcagatcaaagttaatttcatgatcataataagtggcaattcttcacagtcaaaaatcatgagtattttcaaataactgaggtttacaggaaaataattatattgattgttataataacttgagggatgttctcattctgtatctcacattgtcttggagatattaattttacatatatcttagatatgtgaacaggattaccagaaagaaaatgatttttctgaaactcatagtttgcatttcaatgccaaaaaaaattaaaaggatgaagcctttaagtctggcaggctacagataccttgtggtaaagaaacaagatgtgggaatggttgatagtcatttactcaatgaacctatcatattgcaattatgttcttcctctgatgatatcagagttatcattatctctcagagttatcattatgaaatctatataaaaaaataggaaaacattttaaagcatttaaatatgaaactcacaaaagtacattccacaacttttctaaatttctttttgccatctacatatttatttagcacccactgtttgtaggctaatatcctaggcaccacagatataaagagagagtagataaaatatcttccctttagggcttatagcacagctggggaggcaatgataagtatcagaaaagataggtcacatgtaaggtgtctcagcaactcttaacagaatcagttaagagcgtgtgttaagatgcacattccttggcccactctccagactcactaaatcagcatctcaaaataattttcaggaacttgcataacatcccaagcattgtgactctcagtaaagtataagaatcactggtaaaagttaaatccatatgatactgacatagagtaagaagttgacagggttcaattttctcttaaagaataaaatatagtgaaaaaaattgtaattattcacaagggttatcgttgcctcaagagaataccagaggcactctacaaattactaataatttagtaaagacaaaggatttacaaccattaaacaaaaattagcgttcttatatttacatttagaaaatgtaatttaaaaatacatataccaggccaggcacggtggtttacacctgtaatcccagcactttgggaggctgaagaaggaggttcttgagaccaggagtttgagaccagtctgggaaacatagcaagatcccgtctctacaaaaaattaaaaaattagccccccatggtggtgcatgcctgtagtcctagcttctctgatgctgaggctggaagatcgcttgagcccagaagttcaaggctgcagtgagctatgattgtgtcactgcactgtagcctgggcaacagagtgagaccctgtcttaaaaaaaaaaaacgttgatagtagtggcaataattataaggttcctaagaataagcataataaaatatgtgaaagaccaactatggagatatatgttcatggatgggtcacctcaatatcataaagatgacaggttatccctaaataactttaagacaattaaaataaaaatcctgccatagcttttcattgaaaacaagaaagaaagcttcttttcacatttacataaaatagtaaaagtaaaagaaaatataaggcaggacacatagacagtggaatggaatcaagagcctaaacacagaaccccgtgtgtgagaatttagcaaatggggaaaggagggataatctcttctctattctcactcttggtgctcttagccattctcatgcctttcagtgtcatctggaaactgactacatccagatttatattgctagcccagacctctctttcttgacctccagactagtgtaatcaactacctacttgacattcattcccatttagataggtaacaggtatctcaaattaaagcaatgccaaacaactcctgacctgcccttctccctacatttttctttcacagtttttttttctttcagtaaatggcattttttttcttcgagttacccaaggcaaacaccctggagtcatccttgacctcttttttctctctctcatagcccatatcaaattctcaggaaatcctgttaatattaccttcagaatgtatttttttaaatcttctttcactactaccaacttggtcaaagccacctttatctctcatctggatttcccaagagcctcctgatcatcgtcttacttctgtccttcttctctgcctccataccccatgccctattctcaaaaaagttgccaaaatactcttgaaaatgtcaaagtatgacagttttttactcaaaatgcttccttaactctttgacctcatttcttactgtcctcactcactgaaattcatctgacatctcccctttgctggtctatgaatggaatatcccacaccacacccccagagcttttagccttgccattccctttgagtggaatgctgttactggataggcacacaggtgtgtcaccttacctgttcaaaatctgggctgaaatgcctgcttccactggggccttccctaaccactttaacatttaacacaactccccacctccaaaagtctccatccccttcccttctttatttttcttcatagcacttatcaaaccctgaacatcacattttttttcttttttttcctcttttttttttttgagacagagtctagctctgtcgcccaggctggaggagtgcagtggcgagatctctgctcactgcaacctctgtctcccaggttcaagcgactctcctgcctcagcctcccaagtcgttgggactacaggcacgcaccaccacactcggctaatttttgtatttttagtagagacggcgtttcactgtattgcacagtctggtctcgaactcctgacctcacgatctgcccgcctcggcctcccaaagtgctgggattacaagcgtgagccactgcgcctggctgaacactacattttttttacttctttattcatgtattgtctgtcatctccaactagaatgaacgtatagtccctgagaacggggaatttgttatctattgaaacttcagggcctggaacatagcagcactccagtatttgttaaataaatgaatccatttgagcttctgcatatttgaaatttcataagtatatataaatggtaaattgtgatagactcaaaggctagtatcattaggcaattgtctcccgttcccaaaagacttcctaagtctactaaatgatctgtttttaatatgaaagcaaagttatctaaaagaaaggagaaatctttagtttttttgacttcgagattctttgcaatttaagcttttttttttttttttttttttttttttgcttttctttcaatggacactttcgaagttttacataaaaacattaaaacctcttgtttaatgtagtgggattaagctgccgaaggcaatccctacatgtgaggaaaatatgcttccgacaccccaattttttttttctccctacccatcctctctggtggtcctgacgctcccagcccctttttgtgtttcttgattccatgctgagaactcgcaatacaaactcaaagcccacatttgtgaggtggttgggtcaggactgcaactaaaaatgattattgttttttaggtttctggacagttcaacaccagcctttggttttgcctcagaagcagggaacttctctaggcccctattttgcctttcagctattgatgatccaaatcataccagcgattaggaggatcattaccagacacaaggccaggtacgtttaaaaaataaataaaccaagcgcaggtgcacactccgaacgctcatccccacccccactttccaatccaacagtaggtaacgagaaatgaattttctagactttttttcctgcagcagttgctgttaccagaaacaaagttagatgatatacaatctaatcttcattgctctaaaagtcctctccccatgccccccaggctgcctcaattctctagtttcttattccttataagcaggggatggagctgaaccaagtcggccttcccctcccagggccttctcctcttggtctggcttccatttcagatgcgaattaaccctcccaataccctttcagaagcaaggagtcccctttttctccgcctccagcctcagctaggttttcctcatttcggatttttctactgctcattcccaaatgagtcacgcatgacgacaatttccactctgctatgtcagcctggagatgtcccccaagtgatggcatctgctctcggaaagaaaggtcatcggtgccacgaccagccccgctaacccagagcggccggtgggccccagtcccgagagtcagggcgcgcggcggaggcgaggccggggcggcctccgccctcccggccgctccccctcgcgccgccccggctcctccctccggccctcggcgggcacctggcggcggcgggcagggggcggcgctgcgcgcgtcacgcggctgggtgggatagcgggcaggtgacacccggcggcctcctcccctttccaacccagtcggcggccgggacagcgggggccgctgtgaggagctccgcgctcgcgctgccagtcgccgccctctctcccgcgcgcgcccggcgcttcggctccgctccctgtgcggtgagtgcggggttccaggccggcgggcaggggccaaactttcccggcgcgcggaggagaagagactggggagggaggcagagccgaggggaacggcgtcgggagtggccggatggaggaacttgggcgcggcgcgcgagaagtgggacccgggtgcgggggccccgggagcggggccaggccctccctgggctcgggaggcgcttgggaagttctgtccccgctgcctgcgcgtggggaggaccgaggcccttttcgccggagcgcggggccgcggcgctcacctgcgccttctcgggagcccccacccggcagcatcccgaagggaaggtcgggcccggtgggcgcgctgcggagcggagcctggactggggtcccgcgcggcgctggccctgcggagcggagcgggaggggcagaggtgctcgccggcgggactgggagggagaaggacctgctcgaccttggacgcggaggtcattttcccagctccggggtctggcctcgctagccacccccccaaattccggagcccctttctttctgtttccttccttcccctttgggcgctttttttgctcccgcggccagatgaacttggggcgctgtcccttcggctccccgagccgcatcctgtcttggtggctgctgctggccgggaggaggctgatgaatacagagccgtggaacaggtcgtgccggagatggaaacaggaaagcctgttgttttgtcgtcccaggtatcgttggttctttgggaaatgggctttcccaggttcgttgggaaatgggctttcccaggttcgttgggaaatgggctttcccccttcaagtcagagctgtttcaaacttcacccggtgcggacagagcgctctttggagctccctggggaactcgggacgggaaggagcgggtctttacacctgtcctgctcccagtgtagttagtcccgcgtcgactgaagaacagttttagcgacccgagttcct

SEQ ID NO: 10412 - DNA, 6000 bp, Homo sapiens
aaacagtgcagagaaatagtcaagttctggatgagggtcagcatcacaagcctgtccaacttcaaaagtacacagctgagcttgaaattgaaggggaccagaacataacaccccaaaattcaccactttgatgtgttgattattctgacctgaaagtaactgagaaattgcagatgtaggagaggcttcctgccctccccatttttacctaaaaacaggacataaatttcccatgagaaaggtgccattcctgtacctggaataagagaatattcttatcactggagacaaggagtcaaaacagaccttacttaacctttacctttcattaattttccccatatatatcccagtcactttcccacaatttactgctcctagctcaaatccctttttcctttgtcttgtaacatctccacagttgattgctctttgttaaaatggtatgtaatcctctgggtctaaccgccgctttgggatcttcctgtctttctaggaagcccttgtgccacacaaaaatattaacatcaaataaaattattgtgctttttctcctgttaatctgtcttttgtcagttcaattcacaggctccagtctgagaaccaaagagggtagaggaaaagtctttcttcccctataaaatcaagccagacatgaggaaagccctgtctcctctcaaggtgtgaaaggagcatcaccatcacttgctctgtctagcctggtagcctcacaagcagcatcaaccacaaagacagaagcaaaagcagcatgacaagaaggcaggagtagaggaacagatagctttgttctggtgcactcatgaagcagcacaacaataaccctcagagagaggtgggcttgactttgggcccttattgctctgaaccttgggttataataatttgatttaaaaaataaacaggctgggcatggtggctcacacctgtaatcccataattttgggagactgaggcaggcggatcacctgaggtcaggagttcaagaccagcctggccaacatagagaaaccccatctgtactaaaaatacaaaaattagccgggcatggtggcacacacctgtaatcccagctattcagaaggctgaggaagtagaatctcttgaacctgggaggcaaggttgcagtgagctgagatcgcaccaatgcactccagcctgggtgacagagcaagacttcgtctgaaaaaaataataataaaataagataaacaaacatatattgggaaatataatgataaagagtaaaactgaccatacaatatttaaaatattcacgtaaaattttagatgcaaataaacataaccatctggaggcaggaaagcaggcttgaacaaaaagcagaactacaactaaatgtagagaggggaaaaatataggtcagtttaataccaactggtgcccataagatataatataaattattgttttaatcccctaatgaaattattttaaaaatatctagctttttgctaaacttagatcacaaaagcatattttggtttgcacatccttgaaagaaagtacattagcctttgagttatcaccaggaaagagcctgaagagccaaataaagagttataggaccccaaatcactcccagattataaatacatggcaacaaggaagtgaatgtatgggcctcaccagacaggaaattgggtagttctgtggggtcacccatggggagatagctgaccacaagggacaaactgcatgcaaatgtagtagaataaaagacagtacaacaacaaaaacaatgatttgggatttgtatgtaaatatatgttaatacctaatataaggatgcttgaacttttgaaaacttctggggcccacagtctgttgtttcctcactgaaatggatgctgatcagtagaaataaatacatttctggtgccttttctcatgttctcttctccctctccatatctctgcaagaactgtttctcagcatgggtgctggcagtttgatcccttaatggcactatgagtcaactgggaatgcagaaatcatggtgcccatcactccgccaaacttctttctctaatttttgtttgccaagaagatgtgagactacctggaaaaagaaagagcagattattaacaaaaatcaagtgtaactcaatattattggctcaagccaaaaactctgttacaaaagtaaattggaaatcatagttttgaaatagagtaatggagttttaaataaagaagtaccttgttgataagctagttaaactccataatttctcaggtaagtaaactgagactgagagactgccccagtgacacacaaccagtgagtggcaaagctgggattaaaattcaagtcagtgcttttcttgggcaattgggaaaacatttagataaacagcctgctaggggttgtaatacatgaatttatgacatagtttgaggaactagagatttttaacctagaaagagaacgattcagggacatggtagctattttcaaatacttgaaggtagaaaaggccttgaacttactctgttagccaaaggagactttaacagttcaatataagataaaaccttttaaacagtcaaacttggccaaaaccattggggggtgagggatgatgagttttctgtcacctgaggcatttcataatagactgaaaaataattcagagagtatgtttttgtctacagagaggggtgaattaggggtgtgtaggagagaattcaggcatgaacatcatttggatgaggtgacctgtaagaggatgtggttctttatatccaaattctgggaccaaataaggtttcattcttgcctctaaactctaaaacctatcttctcatctgtttgcaatagtttacattttaatctatttcatatttcagggtattatgccctgaatatgtgatttgaataccgtggcagaaggtcactcatattcattcattttattttactcttatatacttgcagtgagtcttttgaattcattatgcaaacacatgtaaatcatatgcaaatgatatagcttaagaaaatgacaaaatctgatggccttaactgagccatcagacctttctttaagaaggaaagtaatatgcctttcaacatctctggggcaggagacaatttcctgagagtgatatttacacgacattggaattcgttactcagtctttgcctcacattctgcatatttatgtgggactttaagataagaaaagcattttcacatacatgatcctatttgatcctcataattactctgtgatgtaggcagaagaggaattataattcttgtttttcagatgggaaaacggacttagagaagtgaaatgacttgcccaaggtcactcagttggtaagcaaggatctgcggtctaccactagactcttcccagttctcagctcttcctaatatacactgatggatgtcttatttgaagcaaggtggtccgtcattggtctgggtttgcttagactgtgtcttgctgatagcatcttcagagatgattttgttgatgaagatggcattttaagggtgaccaggaaaagcccaaatatgtgtagcaggcctagcagactgccaagtacatatttcctccaatcccctctgctttttagcatcttttctgaaatctccagatgaacaacattcttcgccccatctactcttcagctccttcaggaggcaaagtcctttcttaaactgtgaagagtagcagcatagtctctgcagtgagattttctggatctgaagccctaatctaccactctctaattgtgtggcttggagagatcatttaatttctcttaagcatcagtttctacatctataaaatgagggaaataataatatctctcttatagaatatatggaaatattcgaggataggaaaatgcagcaaaaaactgcattaaacctgacccagtgtctgacacatagtaaggactcaataaatggcagatactatagtcatttgattcatcatagtaatactgtagaggtggtggtggtggtggtggtggtagtagtagtagtagcagtagttaagtcattgtgaactctgatactaagaactgggctcttggaaatggagtgggagaacagtaacaccaaatatatcctgtatgccagagggttgaagaacagacagaacaggtagctaaatgcagcctattgaggaatgtttgaactttggctttctttaatcattgccacatcttgctccataataagggtaattgtaatcctgcttcaaagctatttctaagaagaaatagagccaaggctggcatccctaactctactctcctttagccaggctgctctatctatggcagtgtcccctacttccccaggccaggttaggagggaacaagagagtccaccccaactgctttaacaagcctgaaccgccaggtcaagagatgaagtaatcttccccctatacgaagaccagaggtggggatggacaaggtggccaaggcagcagctgaggctcaaggagcagatacactctcaagcctgctccctcctgctccagttcccagctcagcaggtgccactgaagggctcagttcttcagtctgcccctgcagagtgctctgcccttccatgttctctgacacctcttctattcactcacctaggacaactaagaaagtggcctccttggtgagtagagcttccacagcctctctcggggaaaaggaccagaagctgttggagttggccaaatgcttgaagttggcataaagtcaattggaaccatcacaatgagagtctgtgtgatcagcccaaaaggactgcacaactgattcatgttcagtgccaggaaatgcaacgggccattctggggttgggtcctcagttatttttggcaaagatgggtggtatgcaaaagggacttccttttttttttttttttttttttccagcacagagccacagaatgctgagcagtcaacagcatttcttgttccaagatcacccttctgagtacctctctggctgccaaattgccagggccttcacagtttgattccatttctcagctccaagcattaggtaaacccaccaagcaatcctagcctgtgatggcgtttgacgtcagctgcttcttttgggtggtgctgttttctgccggctgtaaagtcatcacctcctgggatcagatgtgcattgaggtgagtccaaactgtttgtctttatgcagattaaactgtctgaaaattttgagatttagcacgcagtccaatctgagccttggcatcccaatatctagtgtctttaaaaaggaaataaggtgtatatataattttttcattattgtgagaaaggagccaaagaactctgccaggggatcatctggtggcatcttaataggaagcaaagagaatttttctcctcttcaaacaattccacccaaataatcccaagtgggtcataagatattaatagggtctgtgtgcacaaagcagacccctaaacctgcctcaacctaggggagctgttggtttaacatccccactctcacatggcctctatcccaatgagtcctttggtctcctctcagggtgagaattagtaaagacagcgctgtgccaggttttcgagcattgaaaagatcactctgaatgagtctggctctctcttggacttggacagccttccatctgttttactaacccataggaggaaaatctgagaatagagccaaattgcaccttctgttttggaccatagcaatatttatcaacctgtgggaagttcttggaggggataatgagagaaaaaggagaagggcctccgtctcttgccatcctctaaaatgcttcaaacttcctcccactttctctgaccccacaagtgatcaataccacgtggcctgtcagacaagggctgcatacaggaggaaccatgagtcttggtggcttggtgagctgctggtctgggttgaggtaaaaagaagagtaagagccaggaatagc

SEQ ID NO: 10413 - DNA, 6000 bp, Homo sapiens
cagcttccacagcattccattctaagtaactgcacaggtacagcacaacctttactccacattctttactgtagttctctgcagatctgcgtatttttctagcctgttttctctaactcctgcttaaaacaatcaaccaaccaacccaggttaagccagacaattttttcaaaggtaccttatccccatcttttctgaatattttaaaaatgttatatagacagttgtactaccatttcctctaattttgttctatgtgggccctcaacagcagctaactgaaaactttctagtaccctctttcactatctaggattacatttgtatccctctgaccatatttggaaaatgaatttacagtaaaaatcagagcaggaggtagttctgagatcatttcccatggctatctaccatagttttcctaaggctaattctttagcttcctttcctctaccactttcaaacctctgtaataaattgtcctcaagccttgccttgaagatgccaaacacttgtgttcccacccttcagactgtttaactactttgcttctgttcagaacattactgacaataaaagatggtcttattacaggccatacacaactcaatggtacccggtatctgctatataatggaggaagtgggatgattttggagagtcactggataaattctgtttccctgcaactctttcattcttattacgtttactctttgctggttagtttcttcatgactatgtattataaactaggaattatgatatttattttatatagagagatatcttttaacttatttttcaatctgactttatttgaattgatagtggtattttggtaattaaaagcaagttgttattatctaatgtaaggcaattaaaaataaaatctggcttttactctctttcctgcaaaggttttctatctcttagatgtcttttcattgaaaaagacatatctcatgaccagtgtatgaacaccccattgaagattgccatctcctattaagggcatggaaataaactctgtaactaaaacagatgccttcgcccacagattctaaaatcagagggtattcataaaccgccctacaaattttcagagcacagtgggaaacaggaactgttaaaatctgaaactctactaaagtactttcttcctcttccggtaaaagaaaatatattactttctaggaagtttactattttaaaaaacatacaaaaaaatcagggttgggaattcacaactaaaatttgggttacatcagctcatcttaggagaaaagatatttatttacttacagatggaaagccatggaatgcctctctgactcctcttaaaactgtattggaattgtttcaagcagggagaaaaggctatttttttctgagaagacatgccatattacataaaatgtttcaaagttttacatattcttttgactacatggacacatgtacttactgatcctgatcccatataagctggcaagaaattcatacctataagtaataaattataggtagaattttctagattgaggctgaagttaaataattgcataaactttgagtaattatatcacagtgcaccattcaatttatgtagaaaaaaagctgctctcaattttcagttgataaaagagcagctgagaagagacgatgtggttgtgaaaagtagaaactaacaaagggtcagcactctaaaggcaggaaagcagctgaaaagctgttttgacagttgggtaaagatgaggggaaaaaagactgtaaatgagaggaagttgtgatgaaagggtagaataaagtgtttgaaaatggtaaagtgagagctttaattaacatggagagaaagagcaggaaagagagaagttatttagttaggtaggaaattgtttgtagagaaattttagtagtgtaataacataatttgtattttaatttgccaagggatgacattattggaagaatgatagttttattgttttaacattttagatataagaagctccatttgtctgaaatacaaattggtacaagtttcgattaatatgataataatatacattagacaaattggcaagcagggatttgcctttcattaaccttttgttataaccttaaaacaaacaaacaaaaagcaaaacaaaaaaaaacgacgcggtcgggcgcagtgtctcaagtctgtaattccaacactttgggaggccgaggtgggcggatcacttgaggtcaggagtttgagaccagcctggccaacatggtgaaactccgtctctattaaaaatacaaaaattagccgggcgtggtggcaagtgcctgtagtcccagctactcaggagactgaaacaggagaatcacttgaacctgggaggtggagggtgcagtgagccaatatcgtgccactgcactccagcctagacagcagagcgagactccgcctcaaaaaacaaaacaaaacaaaacaacgtaaaaaactagggtgagcgctgtgggtaatgcctgtaatcccagcacactgggaggccgaggcgggtggatcacctgaggccaggagttcgagaccagcctggccaacacggcgaaaacccatctctattaaaaatacaaacattagccaggcgtggcggcgcgcgcctacaatcccaactacttaggaggccgaggcacgtgaattgcttgaacctgggaggcagaggttgcagtgagccgagatcgcgccactgcactccagcctgggcaacagagcgagactcagtctcaaaaaaaagacttaatatttcaaacttcaagcaagatcataattttataatgtgaagatgaccagagtgtttgaatcagttacaaatgggtcttttttgttgttggtggtgttctttaatcttggactcctaacttgagcaagaaaatgtaaatacagaaagctgcaaaaccaatgttccttaattaggaaccatgtgagtagtttaacattacaaacagtttctaaaagtcacacgtggtatacattctaacgagttttagcttcttttatttaaactgcgttgatattgatctataactttcctaataatcacttcataggttggtaatcctatgttttggattttccaggtcacttcagattcaaatattttttcctaacgtcaaatggtgtgtctagattttggtctggaaaacagggtcactaaatttgtagactaacttgaaacagtattggcctttggcaatacgcagcaattctatttcttggccatgcttatcaagttaagtaaaataaaatcaaagttcactatatgatttacctaattaaaaaattgttttaacctaattactttaaaataatttaaaaactctgtagtaatttacaatgtaaaaagcactcataatatggtgtttatagacacacatagctagtaaacctatagacagctactcacccttgccatacagaaaatgcaaaacacacttaagagatattgtaattacatattatgtggtcaaaactaaagaagacgaaaatatgcttgtgttaatgaaaaaggatttggtgctctttcttatttttaatttttaaattttaatttaaattccacagactgaaacccatatactttttctctttcttgttttactggctggagccaagtgtcatggaactcatattcttgatgaagagaaactgagaggacacactggcatttgctatacgtgaactaagattgactcattttcctatgtcaaaactgctattttgcaaataaaattactatcctttataacattatttcgtttgcttattgctctgctctttattctttcgtgtttcaggtaaccactaacaaaaagtttaaaagtcgactatgtccagaatggcactctataattgaaaatttaggtgatttttccgaagtcctgttggaagcacatctaccagcagtgtgatcaggctctccctcccacatttccctgctagtcaggacaagagaagcccgggggtgctgctgcaatagcggtgggagtgggagataggctattacccgcttgacactgcacttttgctacgaatgattcactcaggtttggcacatttgttgcaaggaaatctcctcctcccgccgcttccttgttcgagctcctctcgggctgtctcctgtgctttggcctttaaggagaagtgagagcaggtgggcacacaggagctcgccgagtcctcctccccctgctccttccctaatttagcagtacttccggccgcgtgacatcatcccccgcacctcggtgacgtgagctgcgggtgacgtgtgtgcggagagaagcgcgctgacgttgctatttaaaggtcctcctgcggggaggatggagacacagcgcgagcacctggtgtggggcgcggaggaggctgtggcggtcgggagcggggccaagagccagaggaggagcagagcgcacggccagccagccgccagcctctaggggaggggggaaaagaaggacgaacggactgagggcctgccgccggcccagctccccacgagggccgctcggccccccaccatcagcctctccgccgccttgcggctgctgctttctcccgcggcccgctgctcgcaaggcccgtcgggctcccgggaccagtccgcgccccagcccccggccgcggctccgcggcggccaccgcctcccgtcccttcccgcgagcagagggagggaccgccctcgctccccgttctctccgcccccttcccgccccccgcagcccactctgccgccgcgctagcttcacgccggcggcgctgaccgggaaagcagcaccctcttctctgccagccggccggccggcggaggcggaggcagcggcaggcttcaggccgccggggctggcgctgctctgcccggcggtagccggaggcgggcgctgatggaagtgtgaagaggcggcggcggggcccggggaatgtgaggcggcgcgtggcggcggcgcggagcgtgagagacgaggagtaggggtgggggcgctggagcggcggctgcgcttcggcttcgagcccagctctcctggccccaacgcgggcttagcctcccgccttggctcgggcaggcgcccgtcgacccttcggcccctttcgcccgccctggagctgggggcagggtgccagtggaagcgtggggcttggctctgtgattcattcattctccgccgacgggagcctcagacccgctgtgctctgaagagaggagggaagagggggcagccgcgaatgaagggccgggcaccagccgggctccattgtgctcggcggcggggggcgggaaggggctgagggaggtgggatcgggtcccctcctccagctctccggcgtgcgctgcgcccccagcctgctgccagcctggaaatggctccgtttattctcttcgggagaatgaatcgatcctgcctagccttctcttcgtcctccccacctcttctctgctccgagtcttaggaggagaaacatttaaaaagacagattccaatgtggagtgccgtgcaggttgcgagctgccgggtttgcacttcgaggagattttcctgtgtagtttttttcctaatgtgagcgcagggaagccgtggcattactgcttttgggatttttattcacgtgcacgtcgcgtttggttgctcgctccacccccggagacctggtgtggtggagaaatttgaacccgcagccttagctccgaaaaggccgagttacctggctctccctgagtgtcgaggaggacatgagtgaaatgaccagcgaactcattttttataggactcggtgaagccggattctgcatttccctacttgtagactcattttgtggaatagagttgatcgctgtctcctccgcaaagcattttaactcgaataagcaaatgccgcctctgtttgaacgttttggtatttacaagagagaaatcattttacctaagagaactaattgaattggcagcatccttgaaatac

SEQ ID NO: 10414 - DNA, 6000 bp, Homo sapiens
catttactccatcttattacactactgtaaaattaaataatgcctcagcacaacctctggcacatggttacttctccatttcatcatcatcatcatcatcagtctgcctccaagtatttttcttcaattagtctgtaaatgtgtatgtattgactctatggtctccttcatgtttgaaacctctaatactgtacgggggtacatagccgataccctgtaaggattaattgaactactcagaagaaatagaaatttttctcagttcccctttagatatgcaatctaacattattgttggtaatgcttcatgaaaaatgaccaaagaacatttaatttttatatttttgactcaattacaggtaaataacagaaaaaaataaatttttaaattaaaccacaaattaaataaaaaacagcaaaggacattataaacaatagtaaaaaaatacacagaagagtgatatctataactctcataattgacaaaggaatagaacaataatatataaagacctcctaaatatttctcaggaaaaggcaaataacacaatagaaaaaaaggccaataataaggtaaaatactcaactttggtagtaatcagggaaatccaaattaaaacattgagacttcataccaatcaaaaacaaaaaacaaaaagatcaagactcttggtatttcagcatcgtggatctctggagatcgtttacaagagtttggtgtgacaaaaattcttatacactgttggttgaattgtaaactagcctagttttgttgggatgcagtttggaaatacctagtaaaggtgaaggtgtgcatatcgtatgaccccacgattccattcctaggtattcatctttaaacaaatacatgcacatgtacaagaattataatagtttgataatagcaataaattagaaccaacttaaatgtccattaataggagagtggatacataaattgcaatgctgtacagcagttaaaatgaataaactaagcagaaccacatgtaaatcttaagaagataatgctaagcaaaaaaaaaaaaatttaaaggatctatacactattatatttgtataaagcttaaagcatgcaaattaatatcttgtttatggatattatgttatataatatgttgtacttgttatggatatgtgcatatctaataaaaagtattataaaagatatacagtaatgatataagccaactcaggagggcgtttacttttggagagagaagaagggatgggataggtaatgggataggtaaagacatatggaggcttcagatgtgtctattaatataatggtttacttcttccagaaaatcagaatcaaatttggcataattttaaatagaggcaaggagaatggaaggagggtgtcaacagagtaggaggtttaagttactaggatcagtgggcttagagaataaaatagagccaaacagacatcagtttgtcaacactgtataaattcagatcctcattagtcatactaaaagtcaaacagcccttactcttgcttcagactctaagcaccttcagctgtgtcatttttaaaaaggggttgaaactgtggaaatctaagggaatacaaaagcaggagatgtgatgagcatacctaagataatgtgaagattttgaagactagagcaagccaaaaaaagcaacaaaaggtttagattttgagttaattaggaaagcaattgttatgcccaattcagaagcctgaaatgtttcaatgagatgttaataaacaagtttgtttactctgatccaagactaaattaatgtaaagcatattattataaacattggactgttgatatatttgcagttgaataaatccaagctgtattttataaagccaataaaattgcttgcaggaggccaagaggaaaaaaaaaaaaaacacccaaagaccttggccagttttagaaggtacattggagattctaatgcagcttcctctctctgtctctctctgccctttctttttctcttttctgtctttggcattcactttaaccagactgaaaaactggagtattcattaaaaaattggggctggtaaagaatggagagtgggacagaaaagagcatcatcatttccattacattgttttaaaaaataataaaggagagtagtccacttagagtgagtacaatgtaccaaaatatggaaataaaaaatattaaaattttttttaaatgtaacatgttcttttcaaattacctaaagaatacattaattcatttttattttacaagatttatgcaggaggtaataaactgagcaaaacattgatctctctttgtcccccatcacttccttcagatccctttcccagacctaaccacgtgtccacagttggtgtgcagttttctgggcccttttctgtgaatatgcatataaaaaatgtatatactcataactgggataatatatttttctgcaatatgttatttctgcttaacatcttttagggagctatgcatctcagtgcatctagataacctgattctttaaaagaaaataactaggtagtattccttagtatgattaacccattatttatttaacgcttccaccgtttatggttccttacatggtttcctgttttgactactgtaattctccagtgaacattccagtatattcatcattgcagtagagggcaaatgtgacttaatgcataacagtatctggtaattacagtagtattatcaggaatctgcctttcacgtatttggctttgtttttctcttcatcagcctcatttttaggcaacctcttttagacaagttttagaccaccacttttagacaatgtggtagcagatacaacaaccaacagttctactcttaacattctacaaacttaacctctttctcaatgttagcaaaagtggagaggttggcatgcttactagaccagcgtgggtcacatgcccatccttgacccctgcgttgtagctctgtgcatagtatgcattgattttatgtttttgtaaataggagataaatagacatcctaatagtgtccaaatttacatcactgggattaaagtgttctaagtatttgctagagtaatgaaataagtatgttgtttcatagcattgcatatgagaatgaaacatgttatacatggaagatcattaatattctaaaaagtggacaatttctcaattcaagaaagtgttgcccagtgtatttgctggaaattcagtgatatgagaaacacatttcttaattttatattatttgccaaaccataacaaaaaaatccatattttattcatttattaaataattttttgattaaattctgctatgtattgatgaccatgtcaatagcctcctgaaagaaaattcctgccctcgggtttcttacattcttgttagagaccacagactataaataggtaaacaaatgaataaagaagaacatttcaaactgtgatgtactataaaggaaataaaaaagatcatccgatagaaagtaattggagaaggttacttcaggggaggtagtcagggaagaccttcctaaatgttctgaaaagagaatatttgaaccaccacctgaagactgaaaatgagccttgaaccctaggcctatgctattcaatatggtagccactagccatgtgtggctattgaacacttgcatatagctagctcaagtggaaatgtcacacaagtgcaaaacatacactagatctccaacactagtaccaaaatgataaaatatttaataattttattatgattacatattgaaatgatgatgttttagacatactagggtaaccattactaaaattaatgtttctttacttttttaatgtgactactaaaatattttaaattacatatatgcttcaccttatatgtctatttaacagccctgttctagttagtttcagcctacttactgttattaacatgggctttttcagctttttttccttgatgaggctgatggcaagtgaatttatgtagtagacttttctccaagcatctatgtctatatttattgactgaggtatctaaatataataattcaatatttgatcaagcttaatacagctcagtgttaagggataacatgtggtggagaaagcatgtaaaattgccacatttactagaggagttgtatcattagtcatgttcctttagaagggctcacagaacagataaaaggggaccctgagttggtgaggtaggcagagctagaagcacaaggtaatgacagcgtaggaaaggatttctgtgggaaacagcaacagcaaagcacgaagatctatttccattctctacttagtgaaggagattctattgtgttgtaaagcatgccacttcttgcatgttaaaatggaatttttttctacacattgtttttataccgatgggaatgttagtgactttagtgttccttttttttttagatgtctttctgggagatgttggcaagttctcacatccttaataacattaaattaattcactgcagagaacaagcagaatagttttctttgtgcagtgttgttattctcatttcctgttgtggcttttgccatgaggaagaggttgactactaacactgcatgtttgatttagcaggtgaagtttttagtatttaatgtgagtattttagaaccccagatatgatgtttgttatgtaatctgtactaacagttttgcaatgggaaactcttcccttactggtttgagagttgagtcatatcctgtgaatctaaagctacgttatttaaacatcacgggttcttcttactttcattccaagtcgctgctgtgcagagcagcaagtgctccgtgcagggctgttgctatcacttggaggtgaacagcctcttttgccggtattcagtgaagaaagcaagtctaaatatgcagttctctcactggagtgaaagatgttttgttcatttctaatcaactatgctagacagctgcaagctgaaaagtgcctgcaatttgccatttatttgtaataaggtaagtaacattttggtttactcactggattgtggtagccttaaattaatgtggcagtttaggtatatgattgttccttagaaaaatgccttctcacggggtattgaaggttgcatttgagattctaatacagataatttttaatttacagtataacctacttgtgagatacatagtgtaatacattgatattccttttatgatcattttttatgaaaaatatagtgcctgagaaatggaaacattgtggtagctttatattggtttgttttttttgttttgttttgttttcttgaaggatttagtagttaccaggttcttagtttcttatatttcttttgctaccctctgatctcagttaaaggtgaaacatatatcagatttatatgattatctttgaataattatagctcaatcattatatttttcaattgaaataaaaagtagtcttagtaattattagaaaatttaaagtggaaaattagtgaaagcctctggacctttcatatttggctttctatttaagtgaaagactagcatacttagaaacttctgattattctgtttgttttaaaattgtatgagtttgtttatcactgcctactttctcacttgctgttggaggcagtcatacaaattgcatggctagagaaacctgtggatagagaatgaatgagaggtttatttttcaaattctttaagcttgcttaaagctaattcaaaggttgggtgacacaggaatgttgtcttggcttcatattggttgaagcaataacatcaaatcagtgtttaaagtggtattgggtatccacagaactttgcatactcatatttaaggcctttaaattcctttcagctagaaaaggttaatttgatttcgagagctataactgaattagtaagatattaacgacttgaggttttcaaaaatgtgtctgctaacggttggcattatgaatactttcgtacttctt

SEQ ID NO: 10415 - DNA, 6000 bp, Homo sapiens
agcatctcccacacttaagaatattgccacaagctattaacaaagtgacatgcatacctgccatctttgagtaggtccagaccagaaaagtattctgcaatagagaaaagctagaaaaagtaaaagctgtaccaacctggcatattcttatacagaggtttgggtaatgggtaatgattctttgttatttatggcatagtggagaattatgcaacattaaaaaaaaaaactctgtttctagcatgttatttggccctggtatagaagaaatacttaaccataagaaattaagtggccatttgccctgcaaatcatgagctgagttctgtcagacccttcatgtcataagcaaggcaggcctagtagaaacacattgtaacatagaaatgatacatctaaaatcaggaatatgcagtggtccagacccttgtaacacccaccattggtgtaccagtccctctatatctgcctacatttataacaatataggaatttatcttgtccaactaatggaagttgagcttaatcagctgctgtactacaaccctaatcagtagtggtcctgaaaggtaataatgatagaaaatctacatggtaaagcctcagtcttaagaccacttgcagaagcagggatgataatttatcccacttcccttctttttgtaagtttatcttgaattatagactaataagcgtcacataaaatatgtgtgaaatttatcatagggtggaagtggactaagatagcacaaggggtgaaccatagtggatgctgtggtgcacaatccagagatctccttcagaactgtcaacagataatggttccctgctgaatccctctccatgaattgccttaagtcaaagagagctgcctgctcagggtaatatttgtaccctgaagaaacccaatctatgactgatcaataaaatgatatcaagacctgatccctgtgcttcgaggctggataacactgaaaggctttctcagattcagagttccttgtggatatgctaaggcttttgttaagactgaatcacagtttacattttctctgcccaaacttccttccttcaccccaacacagatattaatatcaaaggcactggtaaatcaactttcttcattcaagtcttcatctcacagtctgtttcctgtaccaaatataaggcataatccttacagaaaatcagagtatctttatcagctaacatattaatataatgattaattttaattcattccaatgcctaggccttaattggtcaacaggatgactcagacttgtttaaatctagaaaaacctgaagatttttagtacagtattagtaatacagaattgaagctggagttctgatcgagcgaaaagccattgtccctggcaatctctcctggatatctggagtacttcatttatgacagagcatggtgatcataattaagcataaagggagatttctggcacactaaaatatttgttggacacttatatttctccaggataatgccatttcccctcacaatataggatattgtgacctatttctagtctttccccaaccccagccatgcattcatagttctctaagaagatgaaaataatttccagctatcttgatctgtttgtattgctatagcaaaagaacatagatcataggttgggtagcttaaacaacaaacatttatttctccagttctggaggctgaggatttcaatatcaaggcaccagtagattccatgtctggtgaaggtctactttctggttcatatacagctatcttcttgctgtgttctaacatgatagaaagaactagtgagctctacgggtctcttttataagggtgctaataccactcatgtgggctccacccttatgatcttccaaaggccccacttcctaatatcatcatattggggaattaggattttagcatatgagtttgcgggatgcacatgttcaagtcataacaccagctcaaagaacttgccactctagaattcaggaggctttttgttttgtataaagtacattgttcatggtgcctataaattttatactgttgtattggactaatcttggtactatttttgcattatttcatgttgtctaaaagacattaagattggacactactacagctgatgctctcttgaaagcctacctcctggcaagaggccaactagcacaaaaaatagtgcactaaacaaccaaaactaaagaccttcacagagtccatttcacctgcctgttacttccaccagagcaaatgctgatattcatggctaagatacctgcagatcattcacatcacaagacactgtgcagatatcccccaggaccagactggaaacgggtagacctgctgggtggctagatccagaagagagataacaatcactacagcttagctctctggaagccacatccctaggacagggggagcatactacatcaagggaacaccttgtgggacaaaagaaactgaacagtagccttccttctgaaatagcctacccaaataagaaggaaacagaaacacaattctggtaatatgacaaaatagggttatttaacacccccaaaaatcacactagctcaccagcaatggatccaaaccaagaagaaatccctgatttacctgaaaaagaattcaggttagttattaagctaatcaaggaggtaccagagaaagatgaagttcaatgtaaggaaattgaaaaaaaaatgatagaagaaatgaggggagaaatcttcagtgaaatagatagcataaacagaaaacaatcacaacttcaggaaataaaggacacacttagagaaatgcaaaatgttctagaaagtctcagcattagaattgaacaagcaggagaaagaacttcagagcttgaaggcaaggtttttgaagtaacccaatccaaagacaaagaaaaaagaataagaaaaaaatgaacaaagcctccaggaagtttgggattatgttaagtgaccaaacaagaataactggtgttgctgaggaagaagagaaatccaagtgtttggaaaacatatttgggggaatagctgaggaaagcttccccagccttgcaagagacctagacatcccaatacaagaagctcaaagaacacctgggaaatttatcacaaaaagatcatcagctaggaacattgtcatcaggttatctaaagtcaagatgaaggaaagaatcttaagagatgtgaggcaaaagcaccaggtaatctataaaggaaaacatattagattaacagtagatttatcagcagaaaccctacgacctaaaagggattggagctccatctgcagtctcctcaaacaattatcagccaagaattctgtatccagcaaaactaatctttataaatgaaggaaagatacagtctcttttagacaaacaaatgctgagagaatatgccactaccaagacagcattataagaactgctaaaagcagctctaaatcttgaaacaaatcctgaaaacatatcaaaacagaatctctttcaagccataaatctcacaggacttataaaataaaaatacaaaaaaaaaccccacaaggtatacaggcaataaatagcacaattaatggaatagtacctcacatcttaataataatgttgaatgtaaatggcctaaatgctctgcttaaaaaatacagaattgcagaatgaaaataattcataaatcaactatctgcttccttcaagagactcacctaacacataagaactcacataaacttaaggtaaagtggtggaaaaagatattccatgcaaatggacaccaaaagcaagcaggactacctattcttatatcaaacaaaataaactttaaaacaacagcagttaaaaaagacaagagggacattatataatgataaaaggtcttgtacaaaaggaagatttaacaatcctaaatatacatgcctaacactggagctctcaaatgtatgatacacttactactagacctaagaaatgagatagacagcaacacaataatagtggggggcttcaatactccacctacagcactagacatgtcatcaagacagaaagtcaacaaagaaacaatgaacttcaagtatactctggaacaaatagacttaacagatatttatagaacattctacctaacaaccacagaaaatagattcttttcatcggtgcatgaaattttctccaagatagaccatatgataagccacaaaacaagttgaataagttaagaaaattgaagttatatcaagtactctctcagaccacagtgaaataaaaccggaaatcaactccaaaagaaaccttcaaaaccatgaaaatacatggacattaaataacctgctcctgaatgatcattgggtcaacaataaaatcaagatgaaaattaaaaaattcttcaaactgaatgataatagtgacacaacctattaaaaactctgggatacatcaaaagcagtgctaagagaaaagttcatagtcctaaatgcctatatcagaaagtctgaaagagcacaaatagacaatctaaggtcatgccccaaggaagtagagaaacaagaacaaaccaaacccaaacccagcagaagaaaggaaataactaacatcagagcagaactaaatgaaattgaaacaaagaaaaaatacaaaagataaatgaaacaaaaagctggttctttgaaaagataaataaaaatgatggactattagcaagattaaccaagaaaaaagagagaaaatccaaataagatcaattagaaatgaaacaggagatattaaaactaacaccatagaaatacaaaagataattcaaggctactgtgaacatatttgcacacataaactagaaaacctacaagagatgaataaattcctggaaagatacaaccctcctaacttatatcaggaagaattagataccctgaacataccaataacaagcagtgagattgaaaaggtaataaaaaaattaccaaaaaaaaaaatttggggaccagatggattcacagctgaattctactgggcattcaaagatgacttggtaccaatcctattgatactattccacaagatagagaaagaaataatcctccctaaatcattctatgaagctagtatcaccctaagaccaaaaccaagaaatgacataaccaaaaaacaaaacaaaacaaaacaaaaaaaactacagaccagtatccctgatgaatatagatgcaaaagttcttaacaaaatactagctaaccgactccaaaaacatatcaaaaagataatccactgagatcaagtgggtttcataccagggatggtttaacatatggaagtcaataaatgcgatacaccacatatacagaattaaaaatcacctgatcatctcaatagatgcagaaaagcatttgaaaaaatcaagcatccctttatgattaaaatcctcagcaaaattaccatagaagggacatacctcaatctaataaaagccatctatgacaaacccacagccaacacaatgctgaatgggaaaaatgtgaaaacattccctctgagaactggaataagacagggatgcccactctcaccacttcttttcaacatagtactagaagtcccagccagagcaatcagacaagagaaagaaataaagagcatccaaatgggtaaagaggaaatcaaattctcactattggctaatgatatgattttatacctagaaaatcctaaagactcatccaaaaagctcctagaactcataaattaattcagcaaagtttcaggatacaaaattaatgtacacaaatttgtagatcttctgtacactgacaatgaccaagcagagaatcaaatcaaaaattcaatctcttttacaatagctgcaaaaaaaaaaatacttaggaatatacttatccaagaaggtgaaagatccctacaaggaaaactacaaaacactgctgaaagaaatcatagacaacataaacatagaaacacatccta

SEQ ID NO: 10416 - DNA, 6000 bp, Homo sapiens
atagtaactcacctaaccatgatgagaactctgtgaaataggtactatttttatccttgttttacagatgagagaccagaagcacagagagcttatgcaacttgcccaaagtcacatagctaaatggtagagctgggatttagctcatacagactgaatccagagatagaactccacactatgcctcactatactgctttgcctcaccattggttgaatgcttgaagaaagaagaaatttggaatctatgtcaagagaaaattgaaaagagcaatatttacagaaagaaagccaagggctgggcacagtggctcacatctataatcccagcactttgtggggtcaaggtgggaggattgcttgagcccaagaggtcagggctccagtgagccatgatggtgccgctgcactccagccaggacaacagagtaagatcctgtcttgaaaaataaaaaaattaaaaaaaaaggaagaaaggaagaaatgcaaatgaacaatatgtttctagatattccatgcatagttaatgtagtacaaatgttgccactgcatgaaatgtagtgacaaaaacctaggttgatttggatacctaacttaaaaggattttgctcctttgctaaaataaataaataataaataaaacaatcaaattgtgaggctgggtgtagcggctcatgcctgtaatcctagcactttgggaggctgagatgggcggatcacttgagctcacaagtttgaggccagcctgggcaacatggcaaaactccatctctacaaaaaagtacaagaattagctgggtgtggtggtgcacacctgtagtcccagctacttggaaggctgaggtgggaggatggcgtaagcccaggaggtggaggtcagtgagccaacattgtgcactgcacttcagcctgggtgatacagtcaaaccttgtctaaaaaaaaaaaaaaaaaaaaaaaaaaatcaggaccggcactgtggccacctgtaatcccagcactttgggaggctgaggcaggcagatcacttgaggtcaggagttcaagaccagcctggccaacatggtgaaaccccatctctacaaaaaaatacaaaaattagccaggcgtggtggtgtgcacctgtagtcccagttactcaggaggctgatgcacgagaatcatttgaacctgggaggctgaggttgcggtgagccaagatcatgccactggactccagtctgggtgacagaggcagactccatctcaaaaaaaaaaaaaaaatcaaattatgaatcactttaagtattcaaaaacaaccccaacttaatatacatactgtactcagtaggaaattatacaaactcacaactggtttgaagtttacagttcagttattctgctaagcagctgtactagtttcctagggctgctgtaacagtctcacaaactgggtagcttaaataatagaaattgaggccaggtgcagtggctcatgcctgcagtcccagcactttgggaggccaagatggggagatcacttgaggtcaggagtttgagaccagtttggccagtgtggtgaaaccccatctctacaaaaaaaaaaaaaattagcttggcatggtggcacacacctgtagccccagctacttgggaggctgaggtggaagaattgcctgaacctgggaggtggaggttgcagtgagtggagattgtgtcactgcagtccagcctgggtgacccagtgagaccctgtctctaaataaataaataaaacagaaatttattatctcacagctctggaggctggaagtccaagatcaaggtctcagcaggattggttccttgtgagggttgtgagggaatgatctgttccaggactttcttcttggcttgtagatggccatcttctccctgtgtttcttcacagtcttccctttatatgcatctgtctccgtccaaatttcacccccccttttttttttgagacagagtctcgctctgttgcccaggccggagtgcattggcttgatctcggctcactgcaagctctgccttctgggttcacaccattctcctgcctcagcctcttgagtatctgggacaacaggtgcacgccaccacgcccggctaattttttgtatttttagtagaaatggggtttcaccgtgttagcaaggatagtctcgatctcctgacctcgtaatccacctgcctcggcctccaaagtgctaggattacaggtgtgagccaccgcgcctggccaaatttcccattttataaggacaacagtcacactggattgaggtccaccctaaggagttcatttgaatttgactacctctttgaagaccctattaccaaataagatcacactctgaggtactgtaggttaggattccaacatgtcttctttagggaggtagaatacaattcaacccataatagcaatgtaatataggggtaagagcctgattctgaattctagctctgccacttattgtgatatgggaactcactatgtctcattttttttttccttaaatgaggatgaaacaggtagcatcttcctcatgcagctgtgaggattaaatgaactagtccacgtaacacttggaatactgggtggtacaacacatgttagatattcattcattcattaattcaacaaatagttattgaacaactactaagtgccaggcactgttcaatgtgcttaaaatattgaagcaaataaaataagcaaaaatgtctaccctcacggagctcataatctagtgaggaaagaaagataatttaaaaatagaacatggtctggcatggtggtggctcatacctgtaatcccagaactttgggaggccaaggtgggcagatcacagagttcaagactggcctgggtaacatagtgaaaccccatctatactaaaaacagaaaaaattagccggacatggtggcacacggctatggtcccagctacttgggaggctgaggtgggaggatggcttgagcacagcaggaggtcgaggctgcggtgagctgtgaccacgcctctgtactccagcctgcgtgacagagtgagacagtctcaaaaaaaaaaaaaaaaaagtagaacataatgccagacagtaataaattctatggagaaaaatcaagctagagaccactgggggttgcaatttgagattaggggtaccatttgaacaaatatctgaataatggaaggggacagttaaatggttaactggggaaagatactttcagatagaggagggtttctggactgtcacattattgacatttggggctggataattctttgttgtgggggctgtcctgtgtgttacaggatgtttagcagcacccctagtctctaaccactagatgctagttgcacttgccacctcctgctctccttgtgtgacaatctgtttcacaacgaaagtatctctagacattgctactcctccccccaggaggaagaaggggagaggaagtgctcctggttgagaaccactgaaatagaagaaaagtgaacgaacgcccagaggcaggaatgggcttaccttgtctgaggcacagcaaggagggaggcagtaagggaagacatcagaaaggggagggatgaaccatgtcacctgtgaccctgatgccctccttcaggcagataggaagttgctggagggttgagaacaaaaacatagcacaacttgacgcacattttaaaacagattctactgtctgccacattgagaattaactgtaggtgaaaagacagaagtagacagcaggttgtttcacttgttcactgatttggctgggtggtggtaggaacagctgagaaagctgagctaagaagctctgaggaagaaaggaggaaggagaattagcataaaaggaaaaagctaggcgtgggcaagataactttttgcagaagtggaaggcagtagggtaattaagtagatttgaaagcacagaggggttgtgtaggaccaagacagaatgttcggggccagttgtgggcagggcattgaatgctctgccaaggaatgggagctctagtctgttaggataataatacggagcttcggacaaaaattctgcagcagtgtgcagaataggagtcaacaagagtaattttaggagtgtctggaagtcatatgggtgagataagaggagcctaggtttaggtggaggaagagcatggccaactcattctgaaggaagcaaaaatgagctcctgccctaaggcttggaccttagaatctccgtcttcttcagagtattttgactgtaggaagtgcagagtatattggctccacagagagaatttggacacttgccacagtatcagacaccaagacaacgcaagcccaccatgaaaagatttaatgcagtttttgcttggaaaaggtgtaccccagggaggatgtgttagatttcttcaagggtctttacaaggcaacgattgtctgtaggtgagaaaaactgccaagttaaggcaaagagggagaaagcaggactgcttccaaagagttctttcacgatgctcaaacatttcaattttttaggtcaaaaatgccttaggtttagcacagcaatgtaggtgccaaactcatcgcagtgaattgcaggcgggagcaacaaggacgcctgcctcctttctgcctgctttttgcaatagtccgatttgagaaggggacccacgagagacacaaaatgcacgcccccacgccacatcctttttaccccgcaatgggttaagactgtcaacaggcaggccacctcgcagcgtccgcggagttgcaggcccgcccccgccagggtgtggcgctgtccccctggcgctgggcgggggaggaggggcgcgcggcggccgaggaggggcgcgcggcggccgggcggggcgagcggaggcgagtggaggacgcgtagacgcgccgcggtccccgcctgccgctgctccgccgcagtcgccgctccagtctatccggcactaggaacagccccgagcggcgagacggtccccgccatgtctgcggccatgagggagaggttcgaccggttcctgcacgagaagaactgcatgactgaccttctggccaagctcgaggccaaaaccggcgtgaacaggagcttcatcgctcttggtgggtggccgggggtcgccgccgctggtagggccacgggagccgccgctgccccagctgctggggaaggaagcagggagaggactcgggaaaggtggagtcggagacagacgggacaagcagcatattcagggatcaggctggcctcccggaaagcgtgggcatcggaggaccccgcgggggctgcccaggctgagggtcgcggggctggagggcagctgcggcgccgggcgctggcagctggaagggccagcgctgacgtatgtctgccccgcggcccggcgccctattcctgctgtcctgcgcggtgggcgcggacggcggggcccctgcgggcgggcgcgttgacggaggtacccggtcctacccgaccctccgtggagctccgcccggagagggcgcctctcgggtgggcgggggctgctactgcagcgtgtgcgggagtccgggcctctcgggacgctccccgctgagcgcagcttcccaggctggagcgctgcccagcaggccctgcgagagggcggaagcgggtgcctgggaccgtcccgggcgccgggggttgctgcgcaaagcgccggggccccctgcgggaggtaggagaggcacaatggtggggctgcctggtatccccagacttcaaggcatagcccagcggacgcgcaggcccagctttcgtgtggtttgtttttctcgctcctttaatcgagtcgagaggaaaactcctacaacaggcccagcctcgcggtgtgggcggcggctgtcccgcgtgaacggctctcatgctgcccgacccacttctctccttgtggtccccaggtgtcatcggactggtggccttgtacctggtgttcggttatggagcctctctcctctg

SEQ ID NO: 10417 - DNA, 6000 bp, Homo sapiens
tctcattcaatcctttcagccacctacaattatcctgttctatagattaagaaactgtattagaaaggttaggtaatttgcccaaccctatgtattagtaggggatatgagacaatctagtctcaaagattacgtttgggtcaaaattcccatcgctgtgttttcactgtaaactgacaaaattatgggttatttttttccttgtaatactttgtagtccttagtaaaagtgtgtactttacataaagattatattaatttgtgtattttataaagctttctcacatatatgttctttctgatccttataataatccagggaagtaaaggaaaaaaaacaaaaaatctggaacaaaattaaattcatattctccagattatgaatcctccaagggcaagaatcttgtttagttcattttctgtctttatctggcagagtgaattgagtgcaaaaatgaacaaaattcttccctggccccatacccacctttgcaaagtgtctggtggatttgtattatattaagttagctaattcggagctactgtttcctagaattctattccttgcatagacaaaggtcagtgtatctgaagtaaggaagcagcagcgatattcttttttatgcctgaagtcttctgactcccaggccaggtatatgtttagttccatgaagaagaaagacagcttttcctgcagttcacctatcactgaaggttggggcttggaggcagtgaggaatggctgtacttgtggcccattctcacaggctctagtttctctttatttttccacttcacatccgtctttccttcttgactatggtcattatcttcagacttcaggctctagcaccagacacagaagcaacagcctcccacacactgtttaatcagctatataatagacatatatacaaagatatctatgtacttgtttatttatttatttagccttccagtgattctgcttctctagtgaaaccctgacagacataactcttccttatccctggaatctggactgaccttgtgacttctgtgacttctcattaatagaatgagacagaagtgacagggcctagtactgggcctagccctcaaggggcctttcacattctctctcctgaaatcctgggatcatcatatgactaatcccaggctagctcattagaggatgagagactcctacatggagaagagttcagttttcccagccaacaccatcctagaccagcctatagccagttgtcctgccaaaatatgaatgaagccagccaagatcagcaaagctgtctgtccaatccccagtggacctctgaggatgagtgagcccaggtgagaccagacccactcagctgacctgggctctaatgtgcggtaaactatgaatgcagattgttttaagctacaagttttgatgtgtttttctcacaataatgactaactactgatgcatccagtatattaaattttccttcttttgctgtgaaatatacatgcagaaaagtacataaaccatataataataagtaaatataaagtgaccatacatgtaaccaccacctatgtcaagaaaaagagcatcaccagcaccaaggaagccccccactttccccaccctgtgttgcctctcacttattactccatccttccctgctctcctgactattgagataatcattctcttgcttttttgtatagctttaccatgtattagggaaaatgggattgttcagttttgcttgttgtcagcctttatatgctgatttttttctgtcactttcttttgcatcatgcttgtaagattctccaatgttgtgctgtgtaggtataataatgttcactctcattgttatgttatgtcccatttttttaatatacctacatacacctacatttatagatatctggggtatttccagttgagactgttaccaggctttggattttagtagtcttgtatacatattctggtatacctgtgcatgagcttcttgaaagtagtgattctcgtactttttagcctcagaggttttttttgttttgttttgtttttttaaagacaggatctggttttatcactgaggctgaagtgcagtggtatgatcatagctcactacagcctcaaactcctaggctcaggcaatcctcctgccttagacttccaagtagctgggactataggcatatgccaccatgcccagctaatttttaaaaacttattatatagaggaagtatcactatgtttcccgggctggtcttgaatgcctgggctcaagcaatcttcccacctcagcctcctaaagtgctaggattacaggcgtgagccaccatgctcagctgggcctcagaatcgtaaaaattaaagattaaataaaaattttcaaattaaaaaatgtccaataaaggttattgagatctgagatatttaaaaatatttgataattcatttaaaataaacaataaacccattacatattgcattagtttcctgaggatcccgtcacaaattactacaaatgtgatggcttgaaacaacagaaattttttctctcagagctggagagtcaagaagtctgcaagtaaggtattgccaaggttgataccttctggaagctctgaaggagaaggtgttccaagccattctcctagtttcccatagcgatgggcaatccttggtgttccttgacttgtgaacatatcattcattccaatctgtatctttgtcttcagtatgccattcccctcccccaaccctgcccctgtatctttgtgtctgtgcatctcaaatcttccctcctcttataaggtgtgttagtccatgttcatactgctatgaagaaatacccaagacagggtaatttacaaagaataagttaaatgaattgatagttccacatggctggggaggcctcacaatcatggtggagggtgaaggcacagcaaaagcacgtcttacatggcagcaggcaagagagcgtgttcaggggaactgccctttataaaaccatgagatctcatgtagctaactacctgttataaaacatgaacaatgtttataaacatgaataatgcattatacgtgcattatatgtttataaacacaaataatgcattataaacacaatactgctttatgggaaacataaatgaatgggaagaacccgcccccatgattcagttacctcccaccaggtccctcccatgacacatggggattatgggaactacaataaaaccatcagatctcatgagacttattcactatcaccagaacagcatgggaaaaatctgcctccatgattcaattacctcccaccgggtcccttccgtgacatgtggggattatgggaactacaattcaagatgatatttgggtggagacacagccaaaccataccataaggataacagtctttagatttagggcccaccctaagtcccaggatgacctcatcttgagggccttaacttaattacatctgcaaaagccctatttccaaataaaatcatattcacaggggtggaggggttgaaacttggacatgtattttttagggggacacaattcaactcactgcacacatttacataaataacacatcttttaataaaaatattttcgaaataaaaatttagcaagaagagtgaccttatttttgtaaatctttcatatctagatttaaggaagaagctgggtgctcatttcctttgatattcaatctgttatgctgttttggttgaaatatataatgaaaatccagcttcatacagatcattacataccctctgaaagggtttcaggaggcttctggggacttcagagcaacacttgagaaccactgctctaaagcatatactccataaatatatgtaaaatggaatttccaggctgtggctacatattccaggctatatatatatatatatatatacatatatacacacacacacacacacactgtatataggtgtgtgtgttctgtgtgtgtatacatatattctactttattagataatggcacattgttttccaacttgattaaccaatttactttttcactagcagtgtataagaggttttgtggctctataagtcgaccaatatctgttattgttacacttaaaatttttgcctatcttgtggtatgtaatgtattgattgcactgtgacgtttaatttaacaaaagttcatctagtgcttgctatgtaccaaccacttctaggtactttttccaaatattggtactttgtaataattctctatggtaggtgctattatctccattctacagatacacactgaggcagagaatttaagcaagtggccggacgtcacacagccagtacgtggcaaagcagggattaagcactcctgcagtctgctcttagaattcgcgctccttgcccagctgcttcccccaaatatttattattacttatgagaaaactccgcaaattgcaaagcgctctaccaccaacgattagcaccctagggcaaaatgagccctttaccactccctagatgctccccagcgctaagttcccagcggaggttgcagtgagcgcagatcgcgccactgcactccagcctgggtgacagggcgagactcttgtctcaaaaaaaaaaaaaaaaaaacaacaaaaaaagccagtgattggagcgtaattaccctcgccaaccgcctgtaaccacggcggccgccacgccccgtttcctggtctcgcccctctccgcccacgactctggccccgcccctcgtcccaggctgcaacggaggcagagccaacgcctcgcgggcttccacgtacgcactccaacgcgtgttcccggagaagaacgcatccgggtcacgggagccggtgtctcaggctccgccccttcaccccccgaaaggctaatccccacttccgaccctctcaggccttttccgcttctcttttacctccccaggtccgcccgtctgcgcccctcacaggaagccggagggtcgctctgatcccgaatctcccacaggcgtgaacctgctctgctgtgtatctttgcggggtggcctgcgctgaggcctgccgcgcgcggtgagtccgcgcagacctgaccctgcgtctcgcagctcggttgaggccgccgccgccttctcgggatgccgcggccggggtccgcgcagcgctgggcggccgtcgcgggccgttgggggtgcaggctgctcgcactgctgctactggtgcctggacccggcggcgcctctgagatcaccttcgagcttcctgacaacgccaagcagtgcttctacgaggacatcgctcagggcaccaagtgcaccctggagttccaggtatcaggggcctagcagtccctgggccccaactcgcggctccaggattgggggtgtaacttgagggatggcactttcctgtccgtgtttccccgttcttaggctaattcaaaaatcgcttctaggtagctgatgcccagcatttgactttcctctaataaaccttgggtgagagatgttaagaccgggtgttaaaatatatgaattccagaaatgctccctttagcatttctttccatctcatttttaaggcctattgaactttcttccttaaaagattcccttaaagaaaatcatttatactctgtagtacccagtgtcaaccctctactctctaatccacacctccaatttaattggatttggagtgctgccaatgtctaacttcattgcttttcagttttaccaatattaggactgttggttaatacggtccttgtcattggaagagctccattacaggttgaacggccatttgccaagggagttgtagaaagaattgctgtgataaatgagaggccccttctgatatttgggattatataaaaaagaaactttaacagaatgtggtttattcggttggttagaacagtctttactgagcttcaattttggttggtaggcgcatttaacatttgagtagctattgaatactaggtgcc

SEQ ID NO: 10418 - DNA, 6000 bp, Homo sapiens; identical to SEQ ID NO: 1158

SEQ ID NO: 10419 - DNA, 6000 bp, Homo sapiens
tattatagctcacggctacttttccctggcattcttacatgtgaatctgtcataatttggtgtattcataatcagtaatgatacaattcatttctaagggataatccagctttttcactcattggctggccagttattgttcccatactgctgtgtcaagggaactaactcccattaagtctaaaatctaagtgcctatcattagttattgctgtcatctctgtgaaattggtcataagtaccactgcagtttcccagataggaaactaagatatggaaggttgatgacgtgcccaaggtatcagaatgaatacattgcaaagctagtattagaatctgcagcttctgggccaggcacggtggctcacacttgtaatcccagcattttgggaggccaaggtaggtggatcacttgaggtcaggagctcaagaccagcctgaccaacatggcgaaaccctgtctctactgaaaatacaaaaattagctgggcctggcggcatgtgcctgttgtcccagctacttaggaggctgagacaggagaatcgcttgaaccagggagacagaggttgtagtgagctaagatcgcaccactgcactccagcgttagtgacagagcaagactctgtctcaaaaaaaaaaaaaaaaaaaaaacgaatctccagctttgattgcattgattgcatttctttgctaagatctttagctcaacctctttaaattgtgaacaactttctcagtaaatatatgttgagagaggtggtaggagccagggagaggaaaaaaatactatccatgtaagtaaaattttcctcaactctaggtctgcttctacaattcttcctgttctggtaactcattcctattacaccttcaaaaactttaggtaaccaaaacttttagaagctgtattcctccttaaagaataaagatggtttcctctcatttccacttaaatactgaaaggacaataatctaatgacattaaaataaatgggctgggcgtgatggctcacacctataatcccagcactttgggaggttgaggtgggcagatgacttgaggccaggagttggaaaccagcctgaccaacatggcaaaaccccgtctctactataaatacaaaaatgagccaggcgtggtggcccacgcctgtactcccaggtactcgggtggctgaggcaaaggaatcacctgaacttgggaggtggaggttgtagtgagccaagattgcaccactgcactccagcctgggtgacagagtgtgagtctgagaacgaaagagagaaagagggaaagagagagagagagagacaggaagggagggaggaaagggaaggaaggaggaaattgcacatgtaaatggaaagaaaaatgtaaattgcacatgtaaataggaattgttcataccacactattttcccatctcaacatcattttcatctcctttttagcaggcagtactactgtaaatgcaatgcatttgcagtgcttcataaccattgtcatgatgtcccctttatgcagctacacatagtgggccaattctgccactactgttttatggccaaagaaggaagagataacaaaggatgagtgactgccaggagcacccaccacagcagctgttaagattagaacccatggctcctaccaatcacatcctattgaaatttaggggattctaaaatactgttttagtgtcataaaggagtgacagtgcctgaagacaatcttaccatccacaaaagaacaagctttgcttccatggtcccacctgaatcttctcattcccaagccattccgtaaatttcttcatctctttgagtaaaagaaattttctttcacaaaatagattgggactaaataagtgacttctgcgttcagattttgatggttctctgtttgttccatacagatagtgtaagcatgggttattggagtagtaagagatctcattttcccttgtagaatatggggatggcccaaactcaagagattgttaggggctcttgttgaaaatcaattacaacaaaagatggtatggaaatatgaatatagtccgaatatgctgtcttttccatgtcttctggtctacaagggaaaatgagacctattacttgtccaagaacccatggatgatcttgtctgtctgaaacaaacagaaaaccttggaaatcaggacatgaaagtcacctaattctaacttgtttcatgacaggacatttcctttatttccatttttcatcacttaatgtaaatactaaagtaagtacagtcatgacctagtgtttggctcctattcccgaaatgattttaaaaataataatcagcatctatgaaaaccttcacagggtactaatatgataagcactgttggcaaatgttttctctagttatatcctgaagtgtggtaggaaaaaaaatccaaggaagtatatttcttccatgagcatttcctgataattctagtcaaagatgacgtttcatggcagcctccgtgaaagcaaacagaagagcacaattttaaaaacacatcaaagtggagttctgctggaatcaggttgggagtcaagtcttctctctctttggccttctctcctgtaaggcacctccagccatgtccttgcccaatccagacctgggcagaaacctggtgaatattccattcatgtggtctacatctaatactttatgggcaaaggccattctcctaggccagtcagcagcatgctaaggaacctctggaattgagtcagatggtcttccttgcctgtagcagtcctttggtccacaagatagaaaataaagaacttaaggctgggcgcagtggctcacgcctctaatcccagcactttgggaggccgaggcgggcggatcacaaggtcaggagatcgagaccatcctgattaacacggtgaaaccccgtctctactgaaaatacgaaaaattagccgggcgtagtggcgggcgcctgtagtcccagctacttgggaggctgaggcaggagaatggcgtgaacccaggaggcggagcttgcagtgagccaagccatagcactccagcctgggcgacagagtgagactctgcctcaaaaaaaaaagaaaagaaaagaaagaacttaaatatggacaatgtttgcattactgagcaatttttcagggtctgcaaagggctatccctgccctagtctcctgcccttctgacaaccttcctatggaccttttcccattgagaaatggagctgaggagacagaattgaaactcaaaccaggccagagctcacctaagaggggccatttcactccttttcagccaccagccctttacattccttctccctggtgacctcatcagaaccttctcatgagaggtcagctatgatgcaagaccttatagaggccagatggcattgaaataacaccttgcagctcccttacatgtgaataattgcccatactgagagactaaaacccttaggacttctgggacctgaatgaggcaatggtctgaagtgggcttgcgctggaagcaagacgtaagtggtgaaggtgagtatcagggcagcaggttgacccctttcttgttatgagcatgcattccttcattcttactaatacgggttaggtgcctacccatggcaagagcagttctaggcagggagaggcccctacccacccacagctgacggtctagggcttgtttacattctaggtttcagcgggaaagcaagaacacccaactccctgcttttgattctatgttagtagctcagcgcgcctgtgcgagcacgtgctgcagccagggtaggggctcagaaactggttgacaagatgagcagtggggtcctagggggttgggcgggaagggcccacaaggccatattccaggctgttcggctgcgagtgacccctgagaggtcgggatctccgagctcgtccgatgtctccatcccagccaggagcttgcgaaggggaaggagggcggaagcagagtgggacagatgtggttcgttctggggcttcctgtccacgaagatggataattctagcgacccgcctgggattttggaatcctggcggacccaaaagacagcagaagtcaccgcagaggatgccaccccgcacggcagcccgcccagagcgacggtctcacaggttccggcgccgtcgagcgcccaagcctcctgttggccgccagctgtgtccgcgacgcgctgggtcgggaggaggagacccgaggcgccggtaagtcccccgctgcaggtggcccggagggcaggggtgaggacggggacgtgtactgaactttgggaggtttgcggggctggagttttgtttcagagatagccagatcgagatcagaacgttttccagagagcccaggtttccacttgtggctgggcgacccggtccggaattcatcctttctcggccctcagcttcctccgggcggggttccgatggggcagctaagttccgcgcctcctgccggtgccagatactggcgtgtcgacccgcgctgcggttggcttcttgctccacagcgctatgcgcgcggcggctccgagggctcctggtctctctcagccaacggccttctggggccgccgcctccctctagagctgctcgggtcccattgcagagagtcccgcagcgcccgccggcagccacggcacttcgcaataaccaacttccccgccgccggcgcgtcccgccagcctgccctcggccgcaggcgactggacggcggttacggggcggtcccagcgccaccacgactggctgtcggctccgccagtcatgggctgatgacgccccggggctggctccgcccctagcggcagccccgcctcccctccagagcctggtcggcttagccctgctttccgcctcactcgttgagcaggtccgtgaattgtcagcgcgctgtgggcgactgtgtggccgcggcggccgccaggcttgccgcactccccctgaggtgcccgccggaaccaatgtgccctggtccactgggccgtgagcagccaccgactgggggcaacttggcacttagaaccgcagcagggacgtcggtttgctatcgggactcggcgaggacggtgagtggccgcgcgccgggctagcggctcctctcggcgcggttcggcggcggcgagaggggacgggacgcgtcctggcgctcggcggtccgttcgtccgagcgtgaccgctgtggggaggtcagggctgggcgggatttactccgtgccaatatccccactcccgaacttcttcttgtcaaagcatcccaactccgcccgggacgcggttccagtccgcaccaacttggcgtaattgacatgggtaggtggggccgggacgcgtcccctgcccctctgcggcaacgacatggagcgctggggcggcctccgcgcccgcggcgtgcggaccgcggttcctgaaaaattacccgcgctgtgcggtacggtaagacccggcgtccgcgtctggatctcaaggctgagcgagcgctcatcgggctcaaggtgggtctcagcgccagagaactggagtaccagccgggttctgtagcgggggcttcagtgctctgcagctactgagaggaattgagagcactgctgggctttgaactttctaaagtaattgctttctattagcacttgaatccatgaccctcctgaggtgctcggacctccacatccacccgcaaggggtgtccgaaggacttcgttaggaccaggcgggagctgctgtcggttctggtgcccagtgccttggagaatcctagaggctgcgaaagggattgccagcctggtcggttggtgtttgtttgagcacctgcgtgtttaagtgatgaagttgagtcaggaattgacagcagagaactcaaggttaaacctgacactccgtttgtgactcggtctgggttagattgttttccccccttaatggtaagggggtaaaagcagcttgtttttctgagaccaactacatg

SEQ ID NO: 10420 - DNA, 6000 bp, Homo sapiens
gcataaaaagaccttccccatccccagatggtgtaaacattaatctatattttcttcaagttggattcattttcagtctttaaaatgtagtttgtttcccattcaattctgacctcgtgtgagtgggagacatatgcacaggcatcccctcaggaacctggaggtgccagtgctaactcccagccagttgacgattgctaacttccagcccagtggactcaggacaacttctaagagctctatctttgcctttccatagctctggggaaatcccagaagcccttcagttatttaattggcatttttttttaaaacgaatctcattggttttgtctgtctggttggatcaacagagaattttcaattagaagaaaccctcccaaataagcggggttaattcatgcctgacagatggacaatggcatttccacagggcaagtgctctccatgcaggcagggaccttttgtttgtttactgctacatcctcaggacctagaacaatgccttgcacatagtggggactcagcatatacttgttagatgaatgaatgcgtgaatggctctcatgtattcattatttaaaatgcaaagaggtaataacatgggaaaaaaactcatgttaggtttttaaaaagcagcataagggccaggcatggtggctcatgcctgtaatcccagtacttccggaggccgaggtgggcagatcacctgaggtcaggagtttgagaccagtctggccaacttggcaaaaccccgtctctactaaaaatacaaaaattagctgggggtggaggcaggcgcttgtaatcccagctactcgggaggctgaggcaggaaaatcgcttgaacccaggaggcagaggttcagaggttgcagtgagccgagatcatgccactgcactctccaaaaaaaaaaagggggcaacataagatactgaataaacaatatccatcattcatttattcattcaacaagtatttcttgaactgcactacacatggggaaaagacagggttgatgtaaagattaaacaagttagcatattgtattaggctgctggagctgccataacaaaaataccacaaacttggtagcttaaacaacagaattttatttacttatgattctggaggctggaaatccaaggtcaaggtgatggtagagttggtgtctggtctgcaagacctctccttgtcttaaagatgactgccttctctctgcaataaagttatcacaataaactttctcgcaataaagttcaggtctttattcctgatgttactcttcttataaggacactagtcctattggattagtgctccacccttatgacctcatttatccttacttaccttaaagaccctgtctctaaatacagtcacattgaaggttagagcttccatatatgaactgggatgtgggggacacaattcggtccataacacatacgtaaagtgcttagaaataatgtctggctcatactaagccctgtgtaaatgttggatattattattgttgttagaaaatatacagaactgcattagttattattgcattctcattgggggatgaaattacaagtgattttatcttatacttttctatattttccaaaatttctatgttgaacaattttactaatctgagggggaaaaaacaccactactcagtaaaagacatggttgaatattgtttgcagctccccaaccattatatcatgtgttaaaagcctttgctccagattgggtagttatccttagtggattctttgttgagtttcaagtttttggttcaggtctccaaatatgtggttgtcagaatacagagaagcaaagacctggctcagcccacccagccccatcagtcagagcttccactaggagatgcagtaatggggacagaggatgcatcatgatgtgtgccagccccatatccacaccctctggagggcaggaaagaccttcagcagtgggatggtgagtggatcagtttgagttcttggctccaaactgactaaacaaagtctggactgactgttttaatcagaaaaagagtacattaaagaacatgttcacttctaaaaggctcaacttttggggcacttcaagaaacaggctcaaatttcagtttctgaaatgactcccagaatcatccaccatccatggcttctgttaccacccttgtgccagcaacgtagatgccatgtgcatgactttctttcactcatttctggcttttttatcgaaggctcatgagagtgtgtttcattggtacagtctaagtcactaatccactcctagctgcaaaggaagctggaaaagtgagttttctggattctaccggagacacttgcaacttgggaaactatcaaaatgtaggagagaatgaatgaaaaatgaataaatgggagtcaggagcccagaactgctgtgtgacctaagacagttgttcgcctttcccaacgtcagtcttctgctctgtcaaatgggataatatcctctgcattctttgggccagaccccaagccagggctgcaaatagatgattaggctcctgcctgccaacccacttagagatgctagtctgggaggagatatgtgtgaacatggctggccgctaaggtggctggatttgctggctaaggaccaagagggatatccaagggctccccagcctggcctgggcatttctgggccctgggttccatggatgccacacccatgcagtctagggcctgagtcacagcgtctacccatgcctgcagatggtccacagattgagactcacagagaaggaagaagaccttgggaactcaggacaggaaagaacaagtcccattactcagtggaaggaacaggcctagagaggagagagacctggccatgatcccacaaccaggctagggcctttctgtccccatctctcaggggaagccaagccatgctcagaggaaaacagaaaaatacttggctaagctagaatcagtcacagctccagtactggtttttgaattaaaatattcacaagtagcagagacatctgtagggagagtaacgggatgcgacatcctgctggaggccaagctaaatgtgtcccatgacatcactctgaagaggaggctgccagagccgcatagggcccggagtgctcctgcagctgagtgccgcagaggcctgaggcttgcagcctggctcctggccccctgctctgtgaagaaatgctctgttgaaccactggcctatggggaaattacctgaccacctccctagaccaatctggtctggggagatatgttctttctgcccaggcttctggttcccctgggtctcctcttcagtactagcagatctccagttactctgctgccagtgggagtgtatgggtggggtggggggattctcaaagccatgttacttgctgggaggagtcctgccatacagcctctgtcacaccctcttggaggagccctgccaagcttgagatcccagcaaagtccctgccaggctgtggctgagttcaagctggagcagctctcccaggagtccagatcctatgatggagaaggtgtaggatcctattgtaaagattggaagtgactcagaggcacacatctgcacacttgcaccactacaaggtgcacacaggcctgggcacacacatgccatgtactcgtactacagatacaggcccccccacacacccagctgctgagctgtgagcccacatgcactcatggctgatggtctctggtgggcctgaagagatctcatgctcttccactctctgcttcctgacttctgctctctggttttctatcctcttctttctgggctgtggctcagccagctcctggcctgggagggctgcgtatagagaaggcccggctgcctgagcgctgtcctcggtgctggagtcctggtgggctctgcatgcttgaggaaaacaagcaagggcattgggaagaggtgatcttgcttggaggtgcagatgttcatggggtgcccaccaggatgcctacccttattatttcagaaaatgtgcaactgggcttcctcctttcaatggcagacactgcaacaggtgtccaagccctcagcccagcagtgtgggcatctgtggctgtgtgtggctatatggccatttattgtggctatgaggggcttcttgagacctcgtgtgccacatacagttgtgtacgaagatcatgatttcctcatgagacacctgtgattccatgtggctgcctgtgaccatgttactactggtgaacacatatggcagcctgtgatcacactgagtctcctgtgaccttgcgtagcctcagacctgaactcgtgcgtccccagatgatctgggcactatctggtctagctgcctgatttgtcagagcctaggtgaacacttgccactccctcccctcactggtttgcagaggtggcacccggaggctccccatgtctgcaaactcgggtcctagggggcgttggtgtcagcgggcaacagcccacaggagtgtgcacctcctaggacaggtaaccgcgacccggctgccattcgagcctgcccagccataaaacccaggctgcgagtcgcgcgggggcagggtcgcgtgttgatggggtgggtggcggcggggtgggctcaatgtcacgctctggcgctcgtcgcccgtgctcccccttccagccggtttccgcagaatgccaggtactgacgttggagagcggggccggagagggctggttcgctctgcggccgggcccctcccccgcccgggagcttggcggttccgacaccgcggtcagtgcggggcaagccccagacccggccggccaggctgcagggcagggagtaaggctcggttgcgagtgcgcgccgcgccctcccccttgagccgtctccgcagcggcgcggggaggcgggagctgcggggccggagggcgggggctaaaaatacccggcagcggcggcggcggcgcggctactgctggggctgctgggctgcggggctgcggggctgcgggtcggggaggccgggccgggccgggccgggccccgctgaccgccatgctgaccttcttcctcgtgtcggggggctccctctggctattcgtaggtaagtgcccgtcctgtccgcgtcccggactcccatctcccgcaggctatgaggtcttcgcccgaggtggaggtgttacatctccgcggccgccgagcccccatcccctgctgctgagctgtcccgtcaaggtccccagggccgcctaagtacaccctccgcccccagttctcgcgggctccgggccgggtttggggagcacctgggtctgcggagggagatatagggcttgctctctgcgaccccaccacaaacccccgccgagttcttgcgtcccccttccctgatggcaaggaccatccgcggatcagattaggccctgagccaaggccaggaacagacattgcgtccttgtccatctcctgggaccagaaaccgagggtgttggtccccgaggtcccacagcaggtcagctatgtaacccggactgacctaggcttcctgatcccggcgaggggcttcctcacgacccctccctgcccgtccttcagccagagtacaagatttctgtaaggtagggttcacctggctcctctgctctgcccagggctgctgtgtctccactgtttccagacccctcccctccacctcacaggagtcagcttcaccactgcacttcttaggcggctacaaggacccctgctcgatcccgcctccgcgcttacctccctcaaccccccatacacccacacctggagtctcaccacaggcccttttatctgccagttctaccacctgcaccggctacttcccctctctgagcctggggtcctccagagtataataccactaaaggatctccacctccaccccaacccccatgtgcagattcagcctgataatttgtgtgcagtgcttgatccttaaattggccttaaacct

SEQ ID NO: 10421 - DNA, 6000 bp, Homo sapiens
atccttttttccagtgtggacataatgcttgatacttatttctggcagattctcaaaactaacttataaatcagccccactgtaaaaagacaaagaaataggaaaagtggtttgcaggtttcctctgcacagttggctaggccagtccacggcgtattatagttctagtgtataaccacttttgaaccctggaaatctaagactaccagctactccctgaatcaggttattccagggaatgtcagtttgttgtgtgcatctgtggatgtacatgcacactacacatgtgtgtacactatgaacatgaacatgtaagaccttaggttggattcaggattgaggtttcatttaaagggatgattgccaaagaagcttactgcatgctaccagtgctatagactaattgtaccaggggaacagtgagaggaaaaaggaaagtggggttccagaagtagatttgggtaggctctctgggcggtgggataattatagttgttttataagcccactgtagtatgcctgttggtcagatagtgctaagtaacaaggattgaagggccatgtagtttggaccctgctgataatacctggaacaggttctgaatttggtgttaatctttcttgtcatttctttcctccattcctcctcctttcctctccctcatttttctccctgcaggtattaaactgacactgtcagctcttctggatggcaagaacgtcaatgctggtggccacaagcttggtctaggactggaatttcaagcataaatgaatactgtacaattgtttaattttaaactattttgcagcatagctaccttcagaatttagtgtatcttttaatgttgtatgtctgggatgcaagtattgctaaatatgttagccctccaggttaaagttgattcagctttaagatgttacccttccagaggtacagaagaaacctatttccaaaaaaggtcctttcagtggtagactcggggagaacttggtggcccctttgagatgccaggtttcttttttatctagaaatggctgcaagtggaagcggataatatgtaggcactttgtaaattcatattgagtaaatgaatgaaattgtgatttcctgagaatcgaaccttggttccctaaccctaattgatgagaggctcgctgcttgatggtgtgtacaaactcacctgaatgggacttttttagacagatcttcatgacctgttcccaccccagttcatcatcatctcttttacaccaaaaggtctgcagggtgtggtaactgtttcttttgtgccattttggggtggagaaggtggatgtgatgaagccaataattcaggacttattccttcttgtgttgtgtttttttttggcccttgcaccagagtatgaaatagcttccaggagctccagctataagcttggaagtgtctgtgtgattgtaatcacatggtgacaacactcagaatctaaattggacttctgttgtattctcaccactcaatttgttttttagcagtttaatgggtacattttagagtcttccattttgttggaattagatcctccccttcaaatgctgtaattaacaacacttaaaaaacttgaataaaatattgaaacctcatccttcttctgttgtctttattaataaaatataaataaacagggcatttgtttagatttattttgtcttcatgctctgtgtattatatattattcgttttcactcactgtacaacagattaccatatgtttagcagcttaaaacaacactcatttatttcacagttctgcaggtcaaagcgaggcaggtgtgcatgcctacctggactgtgcttagcttctcacaatgctggaattagggtgtcgaccaggctgtcttctcattttatctgggggcttggcgtcctcttccaggctttcagggttgtggtggaattcagttattttcagttgtaggacagaggtccctatttctttgttggctgagccactctcagtgctcagaggatgccagcattccttgccatggggtcccctccatcgccaaagccagaaacagaaaaactccctcatgtgaaatccctctcacacttccagtctcctccaggtagagccccaactcttttaaggactcacctgattaggttaggcccaatgagggtaatctcccttcaagttaactgccaggtaaagtaacctaatcactggtaatatcctttcatgtttgtaggtccctccatatgggtcatgggaaggggtgattttggaattctcccatatatttatatgtttttaataacttgatggtggatttttttttttttgaggcggagtttcattcttgttgcccaggctggaatgcaatggcgcacaatgtctgctcactgcaagctccgcctcctgggttcaagcaattctcctgcctcagcctccccgcctcctgggttcaagcaattctcctgcctcagcctcccgagtagctaggattacaaacatttgccaccacacccggctaattttgtatttttagtagagatggggtttctccatgttggtcaggctggtctcaaactcctgacctcaggtgatctgctcaccttggcctccaaaagtgctgggattacaggcgtgagccaccacatccagcctattgtggaaacacaaatagtaataaactctatgcatgatccagcttcaacaaatatgaacatttttttccattcatgatttttcagcagaattccttttttttctatgtttgaaagtgacattcaaaacaggaaccatctattttagcattttatgcaactgatcacccaaaaactgtgggcctcagtatttgtcatactgtcttcagggacttgcagctatttctaagtgaatgttcatagaatttatccagagattatggcacatagtggttgctgggtacatctagtcagatgtcaggtacagtattaagatattttacttttagagacagtcttactctgtcacccagactgaagtgcactgtcatcatcatagctcactgcagccttgaactcctgggctcctgtgatcctcccatctcagcctcccgagtacttgggattacaggcataagcctggccctaaaatatttaaaaatgtataaagggttctcttgagtatgagggaatatttccctcactagttacttattgtctgcttgttgcatgcagcatgttggaatatcattgtgcaaaatgctttgagttcataatatctcaccagttaagagaattgagacaatctggtatgaggacacaaatggacaaagtggacaatgagtcagggaagaggactgcagtgtgtttattatagattaactttaaagtcaacaagcagaaactaagattgagaagctcatttgttgaactgagtggttttacagaaaacttaagtaccgctcagagaagggaagctcctgggggactgggaggactttgcaccttggctaaagtggagagtttgcaataaggacaccattcagtctaatacgggcttctgggggatttcgggaaatgtgcagatgaatgacttcttagttttcttaacacagagtttgtgtgtttctgagctgtcaccagggtgagataaaagcttaggggaaaccagattcaggagtagaacacaggccctttagagagacagctcagctgtgtctctgggggataacagcaatcttcgcagggaatcatagagaccagaatggtgaagctgtgggcacaataaatgtcttgcttaacgtcacattgattttcctgaaattgatcaaatggaacttttatgaattgaagcctgtatctgtttattaaggagacatttacagaacgtacacacagagcaaagtatggcgccagggccctaggtgaacttcttggaagtttgtaagtttgcatttttatacactggggatttcaagtaacaaaatttaaaaagagaagcttattttaggaaatctgaaagttattttcaatggcagcccctcacctctacttcctagctaccttcctttcttttcctccataattttttttttttttttgagacggagtctgtggcccaggctagagtgcagtggcatctcggctccctgcagcctccacctcccgggttacagcgattctcctacctcagcctcccgagtagctgcgattacaggcacgcgccaccacgcctggctaatttttgtatttttagtagagtcggggtttctccatgttggccaggctggtctccaactccggacctcaggtgatctgccctcctcggcctcccaaagtgctgggagccactgcactagggccggtccataatatctttatcatcttgtatagtgtgtattttacaccatattcgccctcacaagaaaataaactgccaaggcgggcgggggggtggggggttctttttgttcactgctgtatcttaaatagggagaggtgctaaatctttgttgaaaaaaaataaatgactgtcgggaaagatttttaaaaattacttataatcccatcaccgaaataggactacttaacatttgtgtttctttcgcctttgagagaggaagagcagttacttcgctttcgtgatcagtctgttctacagctggatcttcctttttaaaatggctaaaaacgctatttttggctgtatagtacccaatcatgcaggcggcagggaggggctcgctttggccctcttcagcacgtcacaccctacctttaatccgcagccaactgtgtggcggtccccactttcgcctagcggcaactccctcctccctgcaatccttccttcttattccggtttccagagcacgtctccaggcttcgacgtcaccacgctgggacgtatgtgccgagggccgcggcgtctgacctcatggcgtagagcctagcaacagcgcaggctcccagccgagtccgttatggccgctgccgtcccgaagaggatgagggggccagcacaagcgaaactgctgcccgggtcggccatccaagcccttgtggggttggcgcggccgctggtcttggcgctcctgcttgtgtccgccgctctatccagtggtaaaggggggcggcagtgtgggcttaggaaggctaggagggctcgggcgcagggcaggagacaggccgggccagggaaagggcgcttccaagtgtcaggagcagacggcggtgtctggttgggtcagggtctccgcgggcctgaggacggagggtatggtgtctgaaggggtccaaggtggtagggtctccaaggggcctgagaagcggggtccctgagagatgcaggaacccagggagcaggcagcagggtgtgtagatgggcggggagggaggagtggtgttagcgcctagagatcgttgaagaatgggctgccgcaaggaatggcggtggtggggtctccaaaatttcttggatcggaaagttaggagactctggaagagagggtggcgacaggggctgaggaggtggccggggctgggggtgtggtgtctggaaagggtcctgagtttgggggactcaggaatcttgcaggaccaaggaaaggtgggggttttccagaatgggagaggtcagtggtaaagaccgaggcgggcaggggcagtaatccagtgactggactgaaccaatggaatatttccgagagggaaagtgaaagggaaagagctgtcttagggtactggtgcatatttgaagactgggaggttctggtgtttgataaagattcagagtactggggcgttgggcccctgaaggcttgggaggcagagaggagtttggagacaagggagatcatgattcctcttccctgtgttccgagttaaccaggataaccctgcctcgttttaatgcatctgtaggatttgattgataaaatatttcatttcttgcaaatgttgcatggtgaaatcaagagattgaaggcttttattgagaaattaggaaatctgtaaaccagtgcct

SEQ ID NO: 10422 - DNA, 6000 bp, Homo sapiens
ggaggctgagacaggagaatcacttgaacctgagagctgggaggcggaggttgcagtgagccgagatcgcgccgttgcactccagcctgggcaacaagagcgaaactccgtctcaaaaaaaaaaaatggagttttgctcttgttgcccaggctggagtgcaatggcacaatcttggcttactgcaacctccgcctcccgggttcaagtgattctcctgtctcagcctcccaagtagctgggattacaggcgcctgccaccatgcctggctaatttttttgtatttttaatagagacagggtttcaccatgttggtcaagctagtcccaaactcctgacctcaggtgatccacctgccttggcttctcaaagtgctgggattacaggcatgagccactgcgtctggccttctacgaataatttttaaaaattagccaggtgtggtggtgtgcacctgtagtcccacctacttgagaggctgaagtgggaggatcactagagcatgtgaagttgaggctgtggtgagccatgattgcaccactgtgctccagcctgggcagtagagtgagaccctgtctcaaaaaaaaaaaaaaaaaaaggaagaaagaaaaagaaaaaaaatacctgagactgggtaattttttttttttttgagacagagtcttgctctgtcacccctgctggagtgcagtggcatgatctcagctcactgcaagctctgcctcctgggttcatgccattctcctgcctcagcctcccgagtagctgggactacaggtgcccgccaccacgtcaggctaatttttttttttcatttttagtagagatggggtttcaccgtgttagccaggatggtctcaatctcctgacctcatgatccgcccatctcggcctcccaaagtgctgggattacaggcgtgagccaccgcgcccggcttttttttttttttggagacagggtctcactgtgtcacccaggctatagtgtggtggcatgatcttggctcactgcaacctctgccttagcctcccaagtagctgggactacaggccgacaccaccatgcctggctgaccaccatgcttgcctgggagactgaacaatttataaggaaaagaagcttaattagctcatggttctgcaggctttatgggaagcatggtgttggcatctgctcagctcctgggtaggcctctggaagcttacaatcatgtcagaaggtgaaggagaagcagacatgtcacatatccagagcaggagcaagagagggagggagttatgggaggaggtgccacacacttttaaatgactggatctcttgtgaactcagtgacagctcacttatccccaagagaatggcccaagccattcatgaaggatccacccccatgatccagacacctccaccaggccccacctccaacattagggattacatttcatcatgagatttgggtggggacaaatatccaaactatattaaggaggaatatttccctttctttatcaggagtataaagtaggaggcatgggggattctctccctgttctgttcaggcataggttaaggaaacaccaattcctttaaacatatgcatctggagttgccaattctgagtatcacagttgttaaaatatgacacagtccctgccctcaagaaattgacaaggtagaaaaataaaaaatggctctttttgtttccatccctacaagcactctggtctagtagtatattcagcaaaaggagcaaaaagtgccacttccagctccaaatcagcaggtcgggtggtggggtctggccaagttcacacacagaataattaactcctgcatgctacctgggatgatatttattcgatgcttgctatatgccaggtataatgctacacctttttttttcttttctttttttttttttgagtcggagtctcgctctactgcccaggctggagtgcaatagcatgatcttggctcactgcaacctccgcctcctgggttcaagcaattcttctgccccactgagcctcccgagtagctgggaatacaggcatgtgccaccatgcccggctaatctttgtaattttagtagagatggggtttcatcatattggccaggctggtcttgaactcctgacctcgtgatccgcccaccttggcctcccaaagtgctgggattacaggcgtgagccaccgcgcccagcctacaccttcatttaaatactatactcatttaatcctcacaatgtgaaatagatactattatccttaattttacaggtgaagaaatggaagcacagaaaaattaagtgacttgcccaaggtcatccagctagtgtcggcatttgaatctaggcagtctgtaaagcttgtggtcttaactatttattatactgctaacatcctggattaggatagcagcaggaattaaagctcaatggagagagagaggacttgagagaaggtagaatccatgtaatctgaccataagaggagaaaattgagattacaagtgaaagtggaataagatacagggtctttgggcatttgagttgcaatcagtggattgtaacaccctccccgagcaggatttgtgtcttaatcattttgcacctagcataaagctgggctcataatcattctcaaaacacattattgaattgaatgatggatgagtaacatcatctctgtagaaaggactggctcatttgtcattgtccacaaggggcaatgctgcttatctagcaggtgttggcagtcacagaggacatggttggtggagagggtgtgctggagggctgtcaatattagtcttggagtcatatttatttgcagagcttctccaatcctcattaaaggcccaatgatatgaggctctccacccctgtacccagacagaaatatgcaccagacactttattttctctcatgaaaaggctggcctgttacaggtgggattggtcattgctcccagcccgtcagcttgatactgcattcttggtctattctgtggggacagccctggaatagacactgagtatctatcagagtaggcaccctgagcaaacttcctttcccaaaccctcttcctgcccataacatgatttggcttgggctggaggagggggagggcagaggagacaccccttgaccacctcacatctttgttggttcatgggtctcagccctttcctatcatcccaaagagcctgaaattgttacattttgctttataaattcctttcttaagtattgtcagtttcaaaaaaaaaaacccaaaaaacgattgtctgcctgtaatagcaggtgtgagagaaaatgaggtgcctggagcatatttctctctggcaatggggtagagggcctgacatcatggggcctttaatggtagccccccagcttcatgttccctcacctttctggagaggagggcttgggaaaggcacatggagatagggtggagctgggggaaaacaggccttgtacaaaagctgagtagccagatgttcacttttacagctcttctgtaaaactggcagggcagatatagattaaaacgaaggacaaactccatttaaagtgcattacagctcaggaaccagcaccccctgggcaggagaagggagggaagggcacagaggccacatcagtctccttccttatctagggccacatgtctctctcctagctttgccaagggtgatttacacccccagctggaatgactctctttctgggctgattacatcggcaaatgccccccagaggccacagcaggatggccatattcagaagcagcagccaataaatctcagaggtttatattgcgattctcagtactccctgctggccctctgccaggctggctgtggaagtaaggagggggtcaagttagagggttaggggatgaaaccctccacttcctttcatcaccctcttctccttctctctttctatgcgctgcttagttctcattcttccaagccattctgcttctggctttatcctgggatcttgtgggaatcaggcccaggcccaataaatacccttatccttatgggtagacgtcctgtgttctgggcacagatgtgtttctacctagttgtttaatcctgatagagtagcttgctctccgaaagtctcatcatgtgaaaaggatgggctcctaaatggtctctccaggcaccttcctcagtgagctttggtccaaggaaatctctgctatttagtggagagtttaatcttccatcttccctcacgacaccatcggggctgaattttggaatctaatgccccaggtctgctcccccagcaaagccattccacctgtctgcgacccatctttgcagcatcttgagcttaataaccacccaatcttaccctagaagacacttaggagaggaaaaaacgagatcatagatgtgcaaattctaagaaaaatactagaaatgcaagtgcccttgtgttggcttgttcaagttttgttacaaaatctcttttgtggtggtgtctgttctttgatgtgtgggtgagtgggatccagaaagtgagaaagggtgcttttcttggagaaatatttggttctcctagatggcgagtttccagcggcagcttccacaatgtcttgctagtcgaacttgtcagacagcaggtgggccgcctcggaaagagcaacctcttccgcaccaagcccggcggctcccggggcgccggccctcccccgcccccacccccgcggtccctcggaccagcgctggaggcgcgtggtgtggacgcgcgcttcggagttggagggcggcgcccaggaccctggtgggagagtgtgtgcgtcgcgctggagggcgggaggcgggggcgggaggtgccggtcgagggagccccgctctcagagctccaggggaggagcgaggggagcgcggagcccggcgcctacagctcgccatggtgcgccccctgaacccgcgaccgctgccgcccgtagtcctgatgttgctgctgctgctgccgccgtcgccgctgcctctcgcagccggtgagtgtcagagcgcgcaccggccgggggtacagtgggagggggaggtgaggtgtaggcgaggcccggggcacctgtccggagagggcgcagcagcctcccggtgcatccgagccgaacaaggggaactggagcaggaagcccagggtgcctgcaaggggctggggtcacacctaacacagtgtacgaactgagatagactgagtgccagcaatggcctggccacccaagcatctcctcctcgcccctttttcccccctcttccctcttttgaggtaggtctacacagtcacagaacaacccacagccaggtcactaccaagacagcgtctctaagaggcggggagaatcagatcagaaacagagtgtcatttgctccacgtgggctttaactcttccatctgctttaaggactgaggaagaaactaggtacaggtgaagaaaaagaagttcgttaaaactgacttgtttcataaccttctacaatagcaggccttgcaagccgtctagcacagtggcttgccccttggataataaataatccacaatagatgttttgtagatgtagttcaaggcctggttttagaaccaggccactcccccaaggaagaacagcctgggatccgagatccctggaaggcccatggccttcgtgagtggtatgggtgtgtggaatcttattatgcggctcctgcccagagactgaatggagggactcctgagacagagagaccaccacactgccctgagacctcagtccacaacgcagtgctgtagaaatgctgccttgagacagatatggaaggaaggaggaaaaaccctggtctgtccacctgccaacatcagtaagtcagggcagcaagacatcaccagtctgatttgactgcccaggaaatttcactaatcctaaaggttatggctgcatgtcaggatcaggggaaaacattaaacacctttctcattaaatggtt

SEQ ID NO: 10423 - DNA, 6000 bp, Homo sapiens
gagcctgggaggttacgccactgcactccaacctgggcaacacagtgagaccttgtctcaaaaacaaacgaacaaacacaaaaacttcaagatagagtctgttatttttgttttgatgtctataataggagaaataaaacatcttaatagtataaacgttcatctgtccaaacttctatggaagaccttccataacctaatgcccaacttagacgcattgctccaagatttcttgctgaactatctagccctgggcacaaaatacaagggaagcaggttgtcacatgattctgaccctgaaacttccccaacagcaacaactgccggagtgcacatgtatccaaaactagaaggatatgtcccaaaatgtgtaaggtgcatccaaagaaacactgcttaccattgttagtgtaatcagaatccccttctactgctttctcagttgtgtttactaacaagataacaaaaggactttaaaaatcaaaatcagctggcatggtggttgacacctgtaatcccagaaactttgggaggccaaggtgagaggatctcttgaagccaagagttcgagaccagcctaggcaacatagtgagaccctgtctccacgaaaaaaatttttttaattagctgggtatggtggcatgtgcttgtagtcctagctactctggaggatcacttgaaccaggagttcaaggttacagtgagctatgatcgtgcctctgcactccagcctgggtgaaagagtgaagacactgtctttttaaaaaaaaacaaaaaaaacacaacaacaaaataaaatcaacagaaggaagggatggagacaaggatccaggcagaaatggagattctggtagtctaatgtagacactctactattgaaagattcccttctctttcaaaaaaagacaagctagtaaaacccacttactctaatacaagtctggctacgacataagcctaagtatgtggttgccagttaacaccttaaaaggttcttggcagaggacataagacacacaacatctaggacctccaccctaaaaatggctttttttttttttttttttttttttaaagacggagtctcactctgtcacccaggctgccacctggttcaagcgattctcctgcctccgcttcctgagtagctaggattacaggctcctgtcaccgtgcccagctgatttttgtatgttcggtagagacgggatttcaccaccttggccaggctggtcttgaactcctgacctcgtgctccacccacttcagcctcctaaagtgctgggattacaggctaccactgtgcctggccagctatcatttttttaaaagcagggattgagactgccagcaacaaggtttattttaacatgctcctccaaaacacctctgggcaacactttggtgccagggcatacacaatttttggagctgggtatgatgaaagaaacatttgcctttttagcataaagcaaatataaagctccctctctaccctccctcccacagaagaacaggaaatttcatgaatatatctgtacatttgcttctccaagtaggggaataactctccctaatcagcaatacatatgaaaagcaaactctcatgtggaggaatgcagacaactacagccatctaagccctgccacttgactcagttaatttgcttaaaaccatttacagagaggagacaggttagattttacttctcctttgccttatcatgaacatctaaagcaatgaaaattgaaacagatcatatggacagtaccttccagaagtagtattgccactttaagtcaaagtcatatgtttgcggaaaaaagctgctctacagcaaaaccaagagaaagtttagaaaaatagatatgtagcccttttagctaaagaaagataaagaccaaaaaatgatacacaattccatcaatgggaactctgcactctaccaattttaaggcaaactccatgtcttctttggttccacagcctgaacctcttgaacccaaagagtgggcaggtgagaaagatggctggtgacctggaaggggctgtgctctctgggcaccatgatactgcaagcattagtgcccacttcctcagaggccttcaaaaaataattactcttgattgcactgatgcttctctgggcaattttccttgcccacaaatctgttataatagtactgagataatataatttaagtagtctccatttattagtatttaagaggtaggccaagcagactaaaaaccaagagtttaagggcacggagatgcttttccttctgcatgttaacacacaactcattcctaatcatggtggctctaatccaactgactaaaatgcttttctccccaaggaactaacgtagttacttgagagaagagtttaatccagcttctcctgcgtggcaaagggtttttttcatcagagggtagctgacttcaataagggcatttacaacatcccaagggcttattttcatttaagaaatttggccgggcgcggtggctcacgcctgtaatcccagcactttgggaggccgaggcgggtggatcatgaggtcaggtgatcgagaccatcctggctaacaaggtgaaaccccgtctctactaaaaatacaaaaaattagccgggcgtggtggcgggcgcctgtagtcccagctactcaggaggctgaggcaggagaatggcgtgaacccgggaagcggagcttgcagtgagccgagattgcgccactgcagtccgcagtccggcctgggcgacagagcgagactccgtctcaaaaaaaaaaaaaaaaagaaatttaagagaccactcctatgagactactgtccttagaacttttgggggcaagttcctgtagaacagcagctctgaaacctagggtgagagaccctgtaggaatcggactcaaccttatccacagaaaaatgaacaagcaaaaaaatttcacaagacagtttatggaaccaggttaagaagttctagcctattgagagagactataggaaggattaaggtcagagggggagtagcattccccgggtctaaaccaggacttgtttccttcccttctttaaccagcaagaaggaacaaagaggacgtactagtgcaggctcattactaaggactcaagagtctgttcactggcaactttggcttgggaatttccattcagcctacaaaatgtgtctaagaaccacaatgccaatctcatcttctttgcttcctctgtcccttcacaggtgtcagacctgccctgtggtacgaagactctcagagcattcctgctgccttctgtctccctttgtacttcgtaggcatttttgcctcttgtacttctaattctaccttgggatcacttctaggaggactcaaaccacacacctgcactgctgcagttttcatagcacctttacacagagccctaaggaagggaccttggagtctcacagctctcactccagcacaacactacaacagaaaaattttacccaagacaattacttcttagatctgcccagtgggatgaatccctcagaaccaaaaaggccaacgatgttcttgtttcacagacaccatcagtagttttaaagatgtctgtccttaggtctgagacaagacccacaaagggtaagtgccaatgatatgggagaaataggtatgttgggtcaaatcaataaggcaagatgtagaaaagggcttacctttgtcaggcctgaaaatataacatctagaaacatcttttgcatttatataacactaaacatggagctatacatccacaactgaggtctgaaaagtgaagacaccattcaacagggagaaactggagttagggcaagcaaaatcaagtcaaaacaaaaatcccagtccaaagcatgagtgaccttttgtattcacaagacaggttctaacaacagcagtaggctcagttaagtcagccacttggtggctgggaactagggtgcaaatgctctattatttcagtgtcacaaccaccaacctcagtaccagcggaggcttttagttatggagtaggtgagattctgaggtaaaatacaaggggccatgtcagaatccagctacacggtatcacttgtcctaaatcatctctgctttgctgttagggcatgtgcattaaaatgactgtatcaacctgccttgtcctcccaggaggacatttaaagatcaactcagcattattttttcaatcagtatggcgacaaaacattgttataaaataggagaaagagaaatctttttagagttcccctgaaattctcaaagaaaaaaataaccacatgctttgttttgcaagcttcccctccccctttattcttcgtttataatgttaagctcttgatgacaaacaagccaagcccacttagctagtttatcaacacatctaaagcaaatcatagtcatactttgattttaaccaagcatgacaacaaggcaactgaatagctttccaaactaccagtgcagcgacactaccttgcataggctggtgttaaatcagcacttcataaattgtgcaggcttctgcccatttagatgatctctctatgcagaatcggcagtctaacactggctctcacaagcattaaaaatcatcactctgctaacccaactcactgttcagatgggtcttcttgaatgcagcctttattacaacctcactgctgcttcctacactgaaggaatatcatgtttttaagtcaggagttcttctttctcgctttattgtaatcagggggtcctgcaacgaccccgatgctgttacaaagcatggtgctttataacagtaaagcttctggaaaacccaaacaaaagacacgtcatccggtgacgtcagcctatatacagttctgtgtggtcgcagcacataagcaaatccattcttgtgccgtttctcggaaaagcttttcagtaaatgcactcatgctgctccaggagctcttctctgcaacaagccacccatctgccatcaacaagttaagaccaagagaactaacggctgcggaaaggagactgaagctttgattaaccagctgagcagttagaggtggagaaatttaataacttatattcaaaactgatttagggatcagagcaatcacagaaaatgaaaccaatgctttccagagggatatcctaaggaaaaaacaactcgtcctggtggattcaattttacttggaaagcctgggacacagaaaacaggaaactggtcaaaggctcctacatgttagagccttttacagactcactgcgttgagtctaacaaccgcgactgaatgcagcctccaatgtgctcagaagaatgggtaagtctgtgcatttatatgtcttgtacattcaacaaggaatcacgcttttaaaataagctaccgaattcacattttatgagggaaatcaccatcatattttggattttgaggtttaggtaaaagcatatatcgatgatgacagagacatgttttatcttctttttaaatggcttaagttttggtccagtcataccaataaggttaatttttctgcagtaaatgaaaaataagttatatgcagtgaaatcttttgctataatgttggtggtggttgttttttttaaatagcccatatgttctgctgaaaaatatcctatcttcttgttttccttaaattatattctgcaggcttacatttcaagtggccattaggggcccctatgctggcagcaatatatgcaatgagtatggttttaaaaatgctgcctgccctgggtatggcgtgtccacccaaatgccgctgcgagaagctgctcttctactgcgactctcagggcttccactcagtgccaaacgccacagacaagggctctctgggcctgtccctgaggcacaatcacatcacagagctcgaaagagatcaatttgccagcttcagtcaacttacttggctccacttagatcacaatcaaatttcaacagtaaaagaagatgctttt

SEQ ID NO: 10424 - DNA, 6000 bp, Homo sapiens
gtgaccttgggccaggggctttccctctctgaattccacaaatgcccagcatgtccagcttgctgtggagatgggtctctccctggctgggctcctgccaaaactgtactcctctcctctccactgccaccagctacggagttcgagaagtggaccaagtgaaacgtctcacaggcccaggacttagcgaggggccagagccaagcatcagcgtgatggtcacagggggcccctggcctaccaggtgatgcccggggcttggggataggatgaagctcctggagccttggtttgccccactgtgggctgggcagcatctgaggctcctgctgggctcccctaggctctccaggacatgtttgcactacttgggggagtttggagaagaccagatctatgaagcccaccaacaaggccgaggggctctggaggcattgctatgtgggggaccccagggggcctgctcagagaaggtgtcagccacaagagaagagctctagtcctggactctaccctcctctgaaagaagctggggcttgctctgacggtctccactcccgtctgcaggcagccaggagggcaggaagcccttgctctgtgctgccatcctgcctccctcctccagcctcagggcactcgggcctgggtgggagtcaacgccttcccctctggactcaaataaaacccagtgacctcacttcttttctctgcaaaaggtgcttgtggggctgggagtgcagacattggtgtttctgctgatgtcccttgtgaaaaaaaaaaaaaaactctcaaaatcaattttttttttttgagacagtctcactctgtcacccaggctggagtgcagtgttcttggctcgatgcaacctccacctcccaggttcaggcgattctcccacctcagcctcctgagtagctgggattacaggcacccaccatcatgcccggctaatttttgtatttttagtagagacgggatttcaccatgttggccaggctggtcttgaactcctgacctcaggtgatccgctcgccttggcttcccaaagtgctgagattacaggcatgagccaccgcgcccggccttcaaaatgctttttctattctctcactcgacaacagcacagaagatggctgtgaccgaatgcgtgggggctttcccccacacaccaggcaagcaattctgcagctgacaccagctgggtgccctccaaaattcaattctggcactatctacctggagatagtgtcagatcccacaggctgagggctcagtccaccattctgtcccccattcagacaccagttccaactccaggcctctggagcttctggcctactggcttcaagatgaggttcccacaaccccctcttttgagttcaactaatttgctagagtggttcgcagagctcagagaaacgtttaccagtttattataaaggatgttacaaaggatacagatgcagagatgtgtagggcaaggtatggggaatgggctcggagcttccatgccctccatggatgcaacaccgtccaggaacctccacgtgttcagctatccagaagatctctgaaccctgcaattttgagtttctgtggataattcattacgtaggtatgattcattaagccattggccattggcgaacaacttaccctccaacctgtctgccctcccttgactggggatggggggtgaggggaggctgaaatcctgccttggtctctctggtgaccagcccctgtcctgaagctaccctaggggctgccagccatcagtcaatcattagcacacaagaagacatcattttggggattctaagattttagaaattgtactccaggaaacagaggtcaaagaccaaatatatatttcacaatattacatccctcctacagaaggccaaatttgcatccctacaacttccagaggtaagagggagccatcaatggtgtggtgatgtaatcgcccaaagggttcaccttgctcaagcctagacagagccgattgctcaagacaggggaattgcaataaagactaattaacgcagagctggctgtgcaggagaccagcgttttactattactcaaatcagtctccccaagcattcagggagcagagtttttaaggacaacttggtggatggcggggaagccagtgagccaggagtgctgattggtcaggactgaaatcatagggagttgaagctgtctccttgccttgagtcagttcctaggtggaggccacaagtcccaacgagccaatttatggatctgggtgatgccagctgatctatcaagtgcagggtctgcaaagtatctcaagcactgatcttaggagcagtttagagagggtcagaatcttgtaacctctagctgcatgactcctaaaccaaaatttctcatcttgtggctaatgttgctccatcctacaaaggcaatctagtcctcaggcaagaaggaggtctgctttgagaaagggctgttattgtctttgttttagactataaactaaaaactaagtttctcccaaggttagttcagcctacactcaggaatgaagaaagacaacttggaggttagaagcaagatggaactgattaagttagatctctttcactgtctcagtcataattttgcaaaggtggtttcagtgacatcccaggtcttcagagccttcatgagaaaagagaaccaaggaaaactgtgcacgcaggccaccttgtggcacacctattccagccactccatgctatctgcacccctccgagaacacacgtctcactgggtctacacccaatggctgttcattttccacactctgcctttgaccccagctggtatggatgggccctgggtttctgaccagccagattcaacattttggttctcagtcctgctttctctggaaattcttctggctggggcttttccttagtaaagaagccctggaccccacctaggtctgggaactggagatcggtggcaccagaactttcagtttcgtttgtgagtgtctctgatctggccaagccctgggagagagacagaacattctaaccctcatttttagaaatatttttattttgcacgagagccatgtgcaggaagacaatctaatccccctttgacagatgcagaaaccgaaacttagacaacagaaggggtttgggccaagtccctggctgagtagtagtagggctgggaggggattcagacttaggggaccggagaggcgggctgctgggggaatggaggtgcctggggcaggccctggccactccagcttccctgggagctgcactcagccccctccatccttcacctgttccaggacctgcctgaagccccaccatccgtggccttcactcaggagagaaaccctagacaccaggaggaaagtcagggcccaagaaacccactaagctttcaggacagggtgtggagccgggcacccatgacgtggacctgtgtttctgtggggtgattagagaggctgcatcagctctgggtgtgtgggccccttcatgctactgtggatctgggaccgtgttctccaccttgttctctatgcgtgttgtgtggtttgggttgaattgagtgtccatggagccgtatctgcagggggtcgggcttggtctccacagcaccctggggagttctgggaggagaagttggagagaaaagtgctggggagttgcagaggcttcaaactggtccagcaactttggaaattgggagcagtagccaagagggagaggagaggacaggcggacagaggaacagtgtggacaccggcaggcgggcggactcagtgctgtggcatgaagctgctgcccagctggagagcggtgctgccccttggcccttcaggcagggcctggccatgggcacagcgacccagaagtaggtgggctctagagtgctggggctggggcagcccagaggggaacagaatggggacctcaggcccagccctcaccagctgaggagcctgagttcttagggcccctccccatgtccccctctgccatctcaggccctagggccaggctgggctgggcctgccaggaggggagacaggctgggcataggactgccttcctgggctaggtgatgggcagtcacacagggcttggtgcatagaaaggccccacgctccatctaatgctcctgctatctttaaattctttatacttttggaataaaggcctcacattcttactttgcactgggtcccagaaattatgtggctgggaggggaaagggatctgtgccctgacacagagtgcagacccggctgggccagcctaggcagctctgcctgcagaggcccatctgctgcctgcctcagggaccctgaggggtgcagggtggtgagggcaaggcagctcagaccaacctgaattttaggattggtttctgcaaacttgctatctgcatggcttgggtcaaatcacatctactgaatctgtttccttcgctgttaaaggggttaataccgcccagcacaggggttacttgggacagtgcagatccatgtttcttggcacaaggccaaggccattcctcaataacgagaatgactatgatgatgatgataatgatgaactagttattaatcagtggggaagggcctcatacagggggttacataataagtgcctgtttccactccctctttctccgctcacctggggcttggtaaacttctggtcctcaccccctcgactctggccctctcttgggaaacaagaacaggtccagcgcccaggcgcagatgtgggcagggaagggcacatgtggcagaggcttgggtggcttttactgtcctagtgagagttaatacattacctctgcccgggcccccctttcgcaatccagagctgggcatctggttacagatttacttcaaacaatgcctgatatgtggagtaaagtcctcctccttggcctttgtcaagtcatcccctcttctcctcaggaactgctcaaacctgtgccccaaagatgagggcccaggaggacctcgagggccggacacaggtgctgggggctgggggtgggggctagggggggcagggggggtggggggctggagggcctgtgcaggccttcttcctggaggccagagataaacgttctgatgaacttgataagagtgactgtcccaaattgaatgtggcaactgggggatgggtggaggtgggggtgaaggagcctgcagctttgggactggctgactccaggttggggttcaggagaggcctaatctcccggccagtgacaccccaaggatctccagggggcagaggtgggaccggattggacttgtccacagtcttgagccctcttggccccctctcctgtggtctccaagacttctgacttaagggtccacttccctggctaaaatggcaggtcctgagggctctagaagctggcacagtagactcatccctgcgggaagcaatgcaaagtgggagaaaactgtggccaggccaagtggcacccgggtggatggactgttggggagggcgggaaccccgctctcagttgctgacaagccacttgggctgcctgattgattctggggcagaatggattttgcctgtccccatcacttcaccctaagctacttatctctgctgcctccagcatgaaaccaccagggacccctcgaccccgctacccacagagcctaagtttgacatgttgtacaagatcgaggacgtgccaccttggtacctgtgcatcctgctgggcttccaggtgggtcccccagggcctccccgccctcactctgcacactccccggggactccagcccctccctggccagcagggagtatcttgggtaacaggaagaaaaacctgaggtcagcacagtggctgtcagcaagcaggagtcgggaagaggctgaatcctgaaagaagatgaactccctgggggagtgtgacgcttgccaggtggggtgttggtgacagggagcagagcc

SEQ ID NO: 10425 - DNA, 6000 bp, Homo sapiens; identical to SEQ ID NO: 1168

SEQ ID NO: 10426 - DNA, 6000 bp, Homo sapiens; identical to SEQ ID NO: 1172

SEQ ID NO: 10427 - DNA, 6000 bp, Homo sapiens
ctaatggctaaaccatttccaaatatctgtttcatttgccattcagtgtttatttttagactacaggatgcttcgaaggcaaatttctaatttatattaggtgaccttgcaaaatctacataatatgttattatttaaataatttctgggctgagcacagtgccttattcctgtaatcccagcactttgggaggctgagatgggaggatcacttaagcccaggaatttgagaccagcctgggcaacatagtgagattctgtctctacaaaaaatttaaaaattagctgggtgtgatggtgcacacctctggcccagctacatgggaggctaaagtggaaggattgcttcagcctgagaggttgaggttacagtgagccatgattgtgccactgcattctggcctgggcagcagagcaagacaaaccaaaacaaaacccttttcccccgttccctttcctgaaagtgaaatcaaaacatagaaaaaaattcctcaaatatgacatgaaggatttaaaaatcctaatgaagttttctattttcaaattgcagattgttctcatcctttctgctttacctaagaggctgctaaataaaacaacagaaaggatttttaaaagatgttaacttctaaggacaaagagaataggaaatgagacaacagtggatgagagatgtcaacccattatctgaaggccaaaacagagaaatgataaatgaattcatagatcagaaaaagttacatgctaaatgtctgcaagtagttataccaaagagagacaaacccacttgacagagccttgtaagatgcaaaatttttgcaagcagaagattccagggaaggtgggaaggtgtagggttagagatgtgagattcattaaagtctgtgttcagagttgttgggtgtccaggatctctatcccactctatgaagccagataactctttccatcccacagaagatggaaattttattttctggataaattgaaccaaagaaggcccaaactcagagaaagtaggcacagtgtcaaataaggaaaaaattatgtgaaagtctgtatatttactccaggtgtgtcatccctcttcccctctcttgttctctttaaatcagtatctaggtttataacctacctctcccccaccacaccctgcacacacacagtcaaagctcatagagcattctctgaggaaactatgtggtaccagagaaaagaactgcaactgctgacatttgggcatttcccaaagaaaagcccagattactatttactacagtgaagactacctggtgacaaattatccatgcacaatttgctttttagtacctcattaaaaaatttttttttaaattttctcagagacctttgttctgaagtacctcacttttaattgacagccaaggataattagacaaggaaagttttctaaatgaaagagaatgctttcagcatactttcttccccccagattttgtttttactacccatggccgatgacggcttggaatgtaagcctggagagaattcattccaatgctgggattataaatatctgggaggaagaagtgtgtcctgacagtggtatcctcactaatgtccaaaaaacatcttgctttgaaagctagacatgtcatttgtatcccgaacttctacttctttttaaattgaatttcattttagattcaaggagtacatgtgcaggtgtgttacatgggtatgttgtgtaacgctgaggtttgggcttctagtgaacccgtcacccacatagtgaatgtagtacccaacaggtaggttttcaaccctcaatccctcccaccctccccacttttggattccccagtgtctgttattcccatctttatgtctttgtgtacccattgtttagctcccacttatataagtgagaacatgcagtatttgattttctggttctaagatatttcacctagaataacagcccccagctccatccatgttgtgagggacataatttcattcttttttatggctgcatagtattccgtggtatacatataccacattttctttatccaatcaactattgatgaacacttacattgattctgtgactttcctgttgtgaatagtgcttccataaacatatgagtgtagatgttttctggttttttttttggagacagggtcttgttttgccacccaggctggatcataactcactgcagcctccaactcagctcagtcaatcctcccatctccgcctcctgtgtagctgccactacaggggcatgccatcatgcatggctactttttgtatttttttgtagagatggcattttgccatgttgtccaggctggtctggagctcctgggctcaagcgatctacctggcttgggctcccaaaattctgggattacaggtgtaagtcactgtccccagcacaggtgtctttttgataaaatgatttcttttcctttgggtagatacctaatagtgggattgctgggttgaatgggtgttctatttttagttctttgagaaatctccatactgctttccataggggttgaactattttacattcccaccaacagtgtacaaacgacaaatttctacttctgcatgaggctgtgtgggtcctcaaagagaatctcaaaacttagaaagcatagtgctgagccacccagctcttttctatcaagtttcttagcaatgcagtatataaatactatccattttccaagttgattttatagtgccgtgttctatcttcagaaatgataaggactccacgttccaccagttcccagggctgcaaccccagatccttggggatgttgccatgtgatagcatttctccagctctgcaggaaagcagtagcacatctccagggctaaggattcccacagtgccctactcccctccttgccccccaggaaagtgaggagcgtgggcagatcgctgagggttttctgatcaaaagcagtcactgtctctcatgtagcaaccctcagatcgtttcgttaccggacaggggtcccgatccagacccaagagattgttcttggatctcatgcaagaaataatttggggcaagttcatagagtcaagtgaaagcaagtttattagagaagtaaagaagcaaaagaatggctactccataggcacagcagtggcctgggcggcttgactaaggatacttacagttttttattgaatgtaagctaaacaaggggtggattattcatgaggtttctgggaaaggggtccaaagttaccggaactgaggattcctccccctttttagaccacatagggtcacttcttattgttgccatggcatctgtaagtggacacggcgctggtgggcgtgtcttttagcatgctaatgcattataattggcgtataatgagcagtaaggacgaccagaggtcacttattatgccatcttgattctggtgggatttggctggcttctttactgaaacctgttttatcagcaaggtctttgtgacccgtatcttgtgccggcctcctatctcatcctgtgacttagaatgcctgtcttcctgggaatgcagtccagtaggtctcggccttattttactcagtccctagtcaagatggagttgctgtggttccagcgcctctgacagtttgtcttctctactttattttttgtagggggtaaggggtgtctcattttgctgcccaagctagccttgaactcctaggctcaaatgagcctccctccgcagcctctccaagtgttgggattacaggcatgagccaccacacctggcctgtcttatctactttaaagcagttttcttgtagattgaccctctgaattcagggtctattcaagtgagggcatcttcttttcgggttgtttgtttttgttttttgcatggtaagaagcgtgggataggccgggtgtggtggttcatgcttgtaagccccaacactttgggaggccagtgggtggattgcttgagttcaggagttcgagactagcctgggcaacatggcgaaaccccgtctgtacaatacaaaatttagccagatgtggtggcttgcgcctgtagtccctctagtctcagctactcaggaggctgaggtgagaggatcgcctgaggccaggagattggggctgcagtgagccaggatcgcgccactgaactccagcttaggcggccgagtgagaccctaagtcaaaaaaaaaaaaaagagagaaaagaaaagaagcagggctgactgattaggacagcatttcttttgccgccagctgaactgcggcgtctagagttcccggccataattgcaagaatttatcgaaaagctttacatgttttcttggttttggttttgttttgagacagagcctcaccctttcgcccaccctggagtgcagtgtgcgatcatagctcactgcagcatcgacctcccgggttcaagcgatcctcgcttcattctcctgaattgctgggaccacaggcgcgcgccatcgcgcccgggtattttttcgtttttgtagaaatggagtcttgccatattgcccaggctggtctcgatctcctgggctcaagcgatcctcccgcctcggcctcccaaagtgctgggatacaggagtgagccaccgcgcccagtcgcagtacactaaaagtatttattcggtccgcgtcccccgcctgcgggtgcagggatggcggctccaggctggaggcggctgggggcccggccagtgcgccaggagccgcaggaacgctagtgagccgcgcgctgggccggcagcagggggttattttagtgcgcggggagggggcggcccgcggcggagcgtagggttgagcggcttcccccgcactggggtgagagcccagaacaggcggtagagccaccccaccacccccaactccattccccgcgctcgctgcggctggacgtgaaaagccggtctcacgctctggggagttagtcgccttccactgggaccctcagacgagtgagcgaacatgaagtccggtcctggcatccaagccgccatcgacctcacagcgggggccgcaggggggacagcgtgtgtactgactgggcagcccttcgacacaataaaagtgaagatgcagacgttccctgacctgtacaagggcctcaccgactgcttcctgaagacatacgcccaagtgggtctccggggcttctacaagggcaccggcccggcacttatggcctacgtcgccgaaaactcggtcctcttcatgtgctacgggttctgccagcagtttgtcaggaaagtggctggaatggacaagcaggcaaagctgagtgatctccagactgcagccgcggggtccttcgcctctgcatttgctgcactggctctctgccccactgagcttgtgaagtgccggctacagaccatgtatgaaatggagatgtcagggaagatagcaaaaagccataatacaatttggtctgtcgtgaagggtatccttaaaaaggatggccccttgggcttctaccatggactctcgagtactctacttcaagaagtaccgggttatttctttttctttggtggctatgaactgagccgatcgttttttgcgtcagggagatcaaaagatgaactaggccctgtccatttgatgttaagtggtggagttgctggaatttgcctgtggcttgtcgtgttcccagtggattgtattaaatccagaattcaagttctttccatgtatgggaaacaggcaggatttattggtaccctcttaagtgttgtgagaaatgaaggaatagtagccttatattctggactgaaagctactatgattcgagcaatccctgccaatggggcactgtttgtggcctacgaatacagcaggaagatgatgatgaaacagttggaagcatactgaagtgtcttggtgaacctggatccgagtccatgagtttgaggactacagttcatcacagggttcagcagagtacaagaccactgtctaattttga

SEQ ID NO: 10428 - DNA, 6000 bp, Homo sapiens
tcagcggcggccaccgggtccccgggggctgcccagcctccagatcaaggagactctggtcagggagagtggggagctcttcggggaagaaaggaattccatggtccctttcttagagactagtgggccccggagaagagattcatctggatcaggcagttcctggtaaagaaggattttaagggggtggggagggaggaacccccactacctgtggcagggaaggggagattctgtgccccttcctcaggaggcagcaaagccagctaccaagcttttgctacctcttccccccactccacgctccatcccgcctggttccccaaatcggggtcccaccctcagtttgcatggggcagctccccgtttctctcggtcctttcatcgggggctgtccctaaggcttggtccctccttcctgctcctgtctcccctccgattcttgcactgcacagcctacccagtttctatggaaacaggctgggaaggcactgccaggaggccaaggccactacagctcttggggggaggggaagatagaaatggaaagagagacgcaggaggcgagttctggccattcccggaagcgggtggagatctgttgggagtgagccttcactgccagaggggtggggcagaaggagaggtgtgattaagtgatgtgactgagacagagttgaggggctcctcctcattcccccaattcccagtgctccagacatctagacaagcctcctcagaggggaaagtggtggatgaagaaggaaaagagacaggtagtaccaagagctctgcccatttctaacttatgtgaggctctatccttttacccctcctggggacatgcccacttgagaggaggtctccagggaactagaaggctcccaagaagtgggagggaaaattggagtgcggtgtgagtggtcagggatgttcaggaatctcccctaggaaggtgagctagaggtgggcagaggcctcggaatgtcagctacttttatggtacccctctctggcacctccactgaggagttggtagggggctggagactgtcagcttcctcccctctgttcatcccatcagaacgttgggctatgagaaaacaaaagtggcctagtgggggttgggtgcacagaaagggagataagcctaaggcaagaagggccagaagaggggtgggtgaatgagtgagtgcggatgcttgtggctagggcagggagggagcttcttagaagcttcatctgccagctcctgggaagtgatccccagccctcaccctctcccgatgctcccacctcaggcaaagctgccccttggacaggaactattggaaatctcagagtcctgggagattgtgctgtgggggattccttggaaaggggccttctaggttatcagaacgttcagcaaagcttccctgggggagaggggtagtgaaacaggtaccctggagcctagggtttcctggatctgagccatcggctctccctgaccatagtccccagaacagtcgtcttggtgtttgcttattttggttattttttgatcagatattttggcactgagcacactgcctcctgttgccatggcagccgtgacaggggctgaggcaccgtgagaaaaataccaaaattaatgagtgagcgaaagtgcagccgagagaaaaacaaggttaaaaaaagagttaaaacagtaatgaaaacaggctttccagctccacagcagagcagctgctgaggcctccccagagcagcagcccccacccagcctagagctcctggcatctcccagacctcaaggcaggactcacttggcttcccccacccagctcgtcactgacccagcaacagccacttggggaccaccctatgcacaacagtagatcagctccaacagtacatcagcttccatctcaggtagtatcctgcctcccagaacagcttgtcatctcctaaacaatagagtctcagccacagcccccacacaacaatggtccagcaaaattaccaggaaatggcctcctagctacacccaagctttaaagttatagctgcaggcatcccagctagagtccagcacacagtaacagcccaaccacaattctgagcaacagcatcttagctatagccaatccccagtatgctgtcatcacagctacagctccaggaccaatagcagctcagctacagtcctatacacaacagtagctctgctcctatcccaggtaacagcctgtctcccaggtacaggctcctcgcaacagcctctcatctcctaggacctaggcaatggatccagttacagtcccatctacatcatattaacagggaacagcttctcagctacagccagtctcaggtgtgccagcctcatatctatagcttcaggcccaacagcttatcagttacagttctccctcaacatgcacacacacacccatatacacacagcttggcgatagtttctcaggtaatcttattggctatagcctaggcacaccagcatcagagcactgcaacagtgtcctaagtacaatcagaggcagcagccttggtgttacagttccaggccctacagcatcctagttcacttagccacagcccatcccaggtacacggatatcacagcaagcaccccaaccattcccatacccagcatcaccctggttccaatccctggccacagtctcagctggaactcaggcaccatcagtttcaggagcctcccccagtgcttcacttgccaagcaggtcctcctcccactttggtacagggccagaagtctgacttctctcctcttcaaatgccacctcccttgctccccaaccatcctcccagtccctgcttgctcacctgccctctttcctggggaaaaaaggccccaattctcatatctacattgtccctgactcaggggcacagagcccagcctggcagctggggtaggaggggctggggagcagggagaagagtaggcacaccctggtgctgctgctgtggcccagttctgctcctaccacttggtgcagaatttgagtttgatggtggtggagcagggaggatggaggcgaacatctgggagattagcatttcctgcccagctctgcggctgctgatcctgctcagccctgagcaagggaggagaacagaggagcctttgaatggctcccagcaagcagactggggagggtttgctgcattgggcagcgggcacacgctgggggcagggagaccggggcagctcttctgtggaagatttcttctctctgggccactgattccctcctcggagctgtgctcaatgatgtggagagtatgagctttctagagacagaaagaagctacttacagaacagacccacccccctctttcaccagattaccccatctcccatctagagccctgcccctgggctcctggggctgagggatagagcagagcccaggtcagaaaaggagtccagttaagcagggctgctctgggagagatcttggacagactttgcttgccctcttagctaaccagagattccacttttaccctgaagagcatcccaccgagagaggccagagctgagaagagaaggaagtagaagaaagaggaaaggcacagaagagtggtaggaacaggaaaatggggaaggacagagatggggagtcagaggctatggcaaaaagaggcccaacaactggtcatcccataacaagagcctttcctcacccagcactaggcctggctagggataaccttcctcattcttttgacctagaacactctgcctgggcctgcaggcgaagaaggcaggaggtcctgttgaactgggacacttggtagcctgggttaccaaaccgcaagcgcaggagagggagttcccaagctactcagagacctctagatggcgccagagagccagagctgaatgggagaaaccgagtattggagtgtgtgagacactgcgtgtgacaccgtgtgtgatttggtgtgagtgtgatagggagcgtgtggcactgcgagggcgtgtgacacaggccgtgacactgcgcggcctcgcggggcagggacccggtgactgtataatgtaagtcactggcaaatacgtgtggccgcagcactacgccgtgcagagggcaggtgatcaggggaccctcgaatagcctaagctcaggagcagcacttcgtcttcacgcttgtgtatcttccccatcctcactctagagcccccgggtcccattagcctcctcctcccacggtcccctccatagccccacccccacggcttgctgcggccaccgaggctgaccgctctgcggcttcggccggagggggaggggtggactttccccgagcgcagcgggaagggagggccacacagggcgatcggggatctgggcgggaagagggtggatatggaggagcaggtgcccagggaagaaggcgctgtgggagacacttcccttgcctcgacttcccagggggcagacagagctggggacaggtgtttgagtagggtaaggaggggaatccaggagcggtcctagatggaggcttgggtgggataagtgtaaggtgaagctcagaggagggcacggcctgtgtactgggcctcgggcagtgaagagatggcagagggaggggtccaggctttggggagcggtgctcggggtcccctcccagccggaccggagcggtcccgagctccacctcccggccggagggggggcggggaggcgggcgggccgggagggaggggggagggagggggcgggccgggctgtgcgctccgctctctgctggctccgccgccgccgccgccgccgccgccgccgccgccgccgcctcacacactcggggagcgggagcgcggcgcggacgcaaagccgccgggctgctgcgcccagagccagccggagccggagccggagcccgaactgcagctccagccccagccgtgcggagccgcagcccaggccggggccggcggcggctcatggacagcggggcgggcggccggcgctgcccggaggcgggtaaggatccggcggcggtggaggcagcagcggcttggggcccgaagcggtcatggccggcgggagctgagggaggggcgctcggcggagcgaggccgcgggggcccaacacgagctcggcgcgagggggctgaggtgggggctgctgggagcccatagcaggggatgcggctgagggattccgtcctcccaggtccgcggcgagaagccgagggaggggagggggtgctgagcagaaccctagtccccgcgtcccaaacctgggcgcgctcggagagacggggataaggagactccaggagcgcgcggcgtggaggatgggtttggggaagcgcgcggcccccagtttggtgggggtctcccggaggacggagcaagcaaggaccgttgtccacaacacatacatacacacttgttgggcaactacctcggctcactcagccgcttccagcttctcgcgggcacccagagggccagaccgtggacatatatacacacatacatacatccctgcatatgtgcacacagacatacctcccgcacaccagcgcccactggggcaccgtcgccagctcagaatccgcttcagtgtctgcacgatcagcagcaccgacacacaacccgtggctttacagagcaataacacaaccgggtgtgacaccccgcgacgtggacacacaaacacaatctcgtgccctcatgtacgagtgtcacagccacagttcactagatgaaccctcaaaacctagccaccccccacattcctttaaggaacacaccctagcatatatcatcttacccacttcttggccagaacataggtacacagcacaggtctccttgcacccctctactgcacccacacaaacacacaacccagtatctcagcacacgcttgatggcacacactctaacacaggaattggcacctacagcagcgcctcacggtcacaaacacagaatccactgct

SEQ ID NO: 10429 - DNA, 6000 bp, Homo sapiens
caaagcaagccgaggttatgacatagctccaggtttgcagatgttggcactgtaccagactacatcgatatttcattccagtaggtggggactattcacatgtgaaccctgtgctcacacttcttataatagagatgcaactacacaccttctgttaaccattaatgactgttccacagcaatatttcagataattctgaatcagaaacgagggtaaagatgggatgcacttacctttggggtttgcacttaaaacttgtgaagccagaaaaccaagggttggaatggtgttgagtggcataaataagataagctcttcctcctcctagtcttataaggaaaaatcagattctgaatatatccgtgaagaaaaagaagctcaagggaatctgatagagctatatgttgctgcaattttacttttatgatggataaaatgttttgagtaattccagtggtttgagcttgtcatgcatggtcatgagagactattgagacatgcatttgtacctcacattggtagaagagtttgcttaactcctcgcccatcccttttccagaacttgccatgatctttttccgatgatctaggactgtttctccgaaggggattagtatggagggtataatttcttgtaccttagtccagatggtagagtacagcgtgactgtcattaaaacacactcacacccccaaacacatacacaccaggtcttaatggatttgaattggcagaatttttagaagtgacacaacttgtacctgagcataggagatgctctgagttgattgtgtttttaattagctaggcagtgttttgtgaagaagccagaaatataagtattcaagataaaagcactggttccttccacatccccctcaccctatgcaatcttcccagcaagagatgttcctataatcatggctctgattagttctccctggtgagtcctgcagaaaatagtcaggcataatcaattaatcaaattaggataggtactaatcatcaactcctccttcctctgttcctttctctctgataaaatgcatgctatctcactggtttgttgaaaggcaatcattttaaatttgctcattgggtttcagtgcaaaaaatgtaacaatctatatgctatgaatatacaagattttccttgtgttgtaacattttcacatgcagttttaatgatacaaactttaggttttaatggcttttaaagctgaaactgcccagcttttcttccttttaatctgcaaaacaatacaatattgattttattgtatattactcagcattcatttgcttgctgactggaacacaactcaaactggcttaaggaggcaaaaagaatttgttggctctagtaattaggacattcaagtgtaaaattatcttaagacactgctggatcttaagcctcaaattatgtagtcaggacactggcattccctgtgttgtggctctgccttcctttgggttagttttcttctcagacaagctcctcccatggggtggcaatgatggccactagcagcttcaaactgtctgacaacaccagaggaaatacagagtctttctagcaaaaattctaggactggctttccctggtccagccagtaagctaagggattcttgttgccaggaatggactattctgatcgaccagccctgcttatgtgttcatcactggagctagggattggagaagggaagaggtggttccagtaaggaaaatccagacattattctcagagaaagatgaaatagatggatggacagcagaaaattatagtggatgttcactttcatcaggatactctgttgctccagtgggaggacgtataataagatgacaagaatgatgtaagctaaagctcgagttttggaattcatagccgtgaattctattcccagattggtcaagtgctgctgtgtatgactttggcaattcaattaccctctctgaccctcagtctcttcatctataggatggaggttggactcggaggttggactcaaaggttggaggaggagaaaaagggcaatgtctggtacttattaacacgtagtaaagggcaactaattaagatataatacttttgctattctttaaattacaatattctattctgagatggtccccttcctcccagtgtgaaagtcaaaaactcctaagcctcagttttctcatttgcaaaactaatgaactacttagttgactcaataaatatctatgatgaggacacaatataccaggcatttctcgagggcactgaagatgtcacagtgatcaagacagtgtcctacgccctcttgaaatttatattctagtgagcaagacagatcacaaataaagaagcaattgactatatatatatatatatatatatatatactgggaagaaaaaaatagaacagagaaagaggatagacatttttagaaaatggggtgtgaaattgtagttaggtgttgagagaagacctgtctgaggaagtgatatttgagcggcacccctaaggaagtgagagagtaatctacatggtcacattccagggaaaagagacaaagtgaaaaggccctgagatgggaacctacggttacggcccaggaaagcagcaaaaccagtgagctggtgggtgggaaaggggaggggcatggctacagttgagtttggagaagagtgggggccagatcatgtaaggtctggttagctatgataaggaatttggattgtatgctaagtgtgataggaagccactagaattttatgcaagcaagaaatgacctgacttacatttaaaaaatatcattctggcaggagacagattgggggtgtgggtgagtaattcagagaaagaaattggtggcttggacccagatgctgggtccagaggtgatgagaagggtcaggagtaggaataattttcttcctttcttttactttttttctttctttctttttcttgagacagggtctcactttgtcacccaggctggagtacagtagcgtgatcttggctcacagcagcctcaacctcctgggctcaggtgatcctcccacctcagccccccaggtagctggaactacaggcatatatcaccacgcccatctaattttttgtggagatggggttttgccacgttgcccaggctggtctcaaactcctgggctcaagcgatccactcacctaggccccccaaagtgttgggattataggcatgagctactgcccccggccaggaatcattttcaaagtagagagaatgagtttgctgatggtttggtcttagggtatgagaagaagtttttctggtctgaaccactgggtaaatggtgggccatttactgagatagagaacactggggaagagcaggtttttgtgtcggagatgagaaaggaagagtttagtttgaaatgctttttaatcatccatcttgagatgctggatgggcactgtctacacctgggaaagtctcaacgtagggataaaattttgggagtctacagtgaatagtattgtaattgtactgtattttcagccaccagatggatgtgatcctctcaggaaaaattttagatagacaaggaaagaggattgagacctgtcacttcgatagttagggctttgtacttgtatatttccagcaaaatattattctacattcaaaatataaaacagacagatgtggacagagctactttccttcagattaggggagggggctcagagttctgcaggtggagcctttcccatgcctgccccaggcccagaaatgcccatgggagctcctgttaagtttagaggatctaagaaacaaacatcgaaaaacacagagagtcgaggtcctttccatatctagtgatctgccattctcttcgtggctgccagccacatctgtttagctcaccctggccaaggtgtccaagggcccaggctgagtttcatggttcttttatgtagataacagatttccaggttcttcttggtaagattcaactagaaaactagcaaacagaactatagaatatcagagctaggagtgaactcagagattatttttttccaatctcttctctttactgagaagtgaatgatgatgttcagaaggaaaagggacttgctcatggtgaccctagaagagacagccggaccctgcccctacacttactgattcatcatgctgtggaacagatgtgatgaagatataaaaatgcaaaaatggaactgaacaattagtaaagagggttgattttgtggagatcagtgaatgcccatccattaaagagtgtgaggtcttctgagggtctgtgatagaggaactttggtaatttgaagttaactctccttcgattgggaattcttagcctggggttcctggatgggcctgggattcctggattcctgagttcaaggaatcatggactctctggaaagtgtgcatgtgtgtgcatgcgtatctatttttttctgggcagacagttctcaagagtttactagattctcaaaagaatctgtgatttcctacccttaaaatgatttaaacatttttttaaaatcctcataggaacaaaatggccattttgggcaatatactattttaagcataagaatgtagctacctatcttcactaattactgtcctaatgcagatcataaaaataagccatgtttctggaaagaacataaataacaataaatggagcaaaaagaagcacccatatgttttaatcacaaagcgatcagtagggtgtaaataaaccttttgtgacactcggctgtaccatacgtcaatatgccaaaagctttttgctttagtattgtttattaaatatttccacaaaacaagtcataataggaagcaatagttatttgagttttttaaaacaaggacttgtatttttcaatgctgctttcttttataacatctttttacttcccccattttaggaccctgtgggcattgaaatccaactcactcatgcttatttcctgtaatggacaaacttgatgctaatgtgaggtatgttacctttctgtacatattgtgttgtaaactgagaacatttctgctatgaagactctaaaaatctgttgttgtagagttataaagttaatggatgtggattttctttgatgtttcatatataatcatgttcacagtactgtttgattattagtgttttgtcatttctgtttaaatgaaaaacgtaatatgactgtaaacatttccagcttcctatactaaaagtctgcattatggagatgatgtttgaaaatagatattcatctctgtaataggaagaaagatgtatttaagtaggggtaaaaatagcttaagaatatctatctgtatatctaaacttgagacaaattcacgttgctttttatagcaggttctagtttgtccacttcttttctcaactaggttattatattatgtgacataatggttgcatggtatagttacataaagctaaatggtttttgtttcgttttgatttgttttcctgtaattttctgcaagccttggagatgaaatagtagtctgactcctagggaagattttcttttcgaaaagattgctttatttggcacaatcaaatagtacaaagaaaagtgtattcaataaggcctcaatgttatgaattggcatttgaggctgagaattatccatagatatcagtagctggaatacatcctaaaaaatacattcttgctgtaatcacaagaactgtttttcattcacttgagacctctagaaaagtatatttcaggtatagatcaggggccttgtgcctctgcatttgacatagtagaaaactatcacaaaaggagctgtcaaatatcttgacagaaactctagtgtaatatgacttgagttgccaagatgtactgtcaccccaaccagggaatttcttgagggtagaatgtgtttcatgatccctggcaaaatccctggtacatggtgggtatttaataaagagatgttgatca

SEQ ID NO: 10430 - DNA, 6000 bp, Homo sapiens; identical to SEQ ID NO: 3433

SEQ ID NO: 10431 - DNA, 6000 bp, Homo sapiens
ctgcgtgtaccagatggacacactcaagttgcccacggtcctggggctgagagggaggccagcaagggggcaaggagaggctgaatgggcagtgtcttgaagcctttatctcctgggaccctggcagacctcggtggctacagtctggctcagtaagacagtcctaagaatctagggagggaatgtggcccaaggcccctgctggtcttttgcccactcagaaagccactacactgagtgtccaggaggtagggggacagttcccactctgtgcctctctggctccccagccacaggcacaaggatctacgtgctctgctcagggcatgcatgggtggaaggacactgagctggggatcaggagtcctgtattctagcttccctcagccccaccgtgaacctcagacaagtcccctccactctctgggcctcagtgtccatgccagcagaagggacatatcttagggtcctgacgtctaagatgactgtgtgagcgcctggggtatgtgtgctgcttcctcatcaccccccacccccaccccacaactctgcctggggagcctgggagtgggggcagagccaggagcgtgggagagccagatgtggtggccgctgccctgcctgagtgagggctgagcggcctcctgggaattctcccactcaggctccctttccggttccctccccctgccccactgagagcagcaacttccggctctgacaagcgtgggtgggggaggggggtcttagcacgggggtctgttcagcctggttccctcctctggggaagagcatgggcttatgagtctagacagaaagcctcggttccagtcccagtctgtggctgacacatcacaaggccttgcacaagttcctttccatcactggcctcagtcataccggctgtgtaatgagcatgttggtgagcttccctccagccctgatggtggacttctatgacagcagctcttggtaacacctgaggatcagtcacctttttttttttttttgagatggagtttcactcttgttgcccagactggagtgcaatggcgccatctcagctcaccacaacgtctgcctcccgggttcaagcaattctctggcctcagcctcccgagtagctgggattacaggcatgcaccaccacacccagctaattttgtatttttagtggagactgggtttctccatgttggccaggctggtctcaaactcctgacctcaggtgatccacccaccttggcctcccaaagtgctgggattatagacgtgagccaccgcgcccagctggatcagtcaccttttgtggcactttcttgttttgctcgaggcttgacaaaatgcctgtgggcatggcttattcaggtctctccacaaccctgtgaggtaggcacatgtgtccccatttcacagttgaaggtactgaggctcagagagctcaggtcatatcatctcccagcgtcacatggctgggaagtggtggagctgggttggagctgccaacatcagagtccagacatttaactcttgagtgtgccaccgtgctgtgggggaaggcagtgtggaaccctaaggcccagagcccccctctcccactgtaccccatcccagtccacttcaggcagggctccccacattccatgctctgcccacctactctcagcccaggcttccccaagacagcattgtccaaggctggactgggttcccagtatctgtgtaggtgtgaggatgttcatagcttgtcctgtccacagtggggctgggggccatgctgaccaccccagggtgatggtgctgcactgcccatgtgccccgtccattgccgctgaaggcagagtgcacaaggggaatccaagacccagaaaagggaggctccgcccaggaagacacagtgatggaatgctgctcgaatgaggaaactcactatttcagtaatagtgtacacttagtacacttcgaggcaatgtactaagtcctttgtacaaaccgaagagtcttatgaatcagtctttgacttgtctccattttccagaggaggaaaccaaggccaggagtttaagtgacttgcctaagctcatgtagcttgaaactggagcagctgggattcgaacccagctctatctctagctctccaacctcctctgtcaatcatgacaattttgccccttggtgagtgccctgggttgctccctgtagctctgcacctcccacccatatctcagttgagaggaggagtgacagtcctggtgcccaccaagggttaatggcagtaggggctaagtaattccagatgggcctcaggacggctgggctggccggaaactggaggccgccagcttcccaggggagccaccgccaactgcccctcccctttgtgctgcatctctggccccagctgtacccctgccctagggcccaccagcctcctctcccttgctagagtccagctctaagggaaattgcagacggaccatcccaagggccttgtagcacagtgagtccacaactgttatgtacaaatagggaaaccgaggctcaggcagggcaagggacttattcaagttctcctgataagtctgtggctgggtcttctgactcccagactagcttctttggggactagggggttggtgtgtctcgtggcctcccccaggctggcctggctgcagagggtcagccaaggattcagaggtgaatggcccaggcagatgctaggaggggagtcgtaaatttctgacggaatctttgggcacaagaaatccctgtgcaagcctgaccttgtggcctgtgggatcttttcacattcccctatttccctgttgccacaaagacctggccaggccccctctctcggggtactcttatggtccccaacccgtggctgggaaccagtctgagaacacttctccttctatgtggtccagcccagatgctctgctgggcaatcccgattgggactagaccaagaaatgcaagatagttgactgtggtgggcatggaatcccagctcacgcaaatcctctgctctgtgaacaggggtctgggggaagctgaggaggaaagacttagcggcgcagagggaaggagggcagagccagcctctacctgtgtcacctgggacagctttcttcaccctctggaattcagttgccctgtgggtgcagtagtgggagcaggggtggtaagcccactctatatgcccttctaaaataatgccctttgccatctgagggctaggagtctgtaactggagatgtcttctgatctgagaagctgagggtggaagaagagacccagctgggggaactggaggagtcttggcagaccctggtaggaaaggagagccagagaatggaaatggaacaaaacggatacttgaaagtatcttgttgaggctgggtgcggtggctcaagcctgtaatcccagcactttgggaggctgaggtgggtggatcatgaagtcaggggtttgagaccagcctggccaacatagtgaaacccggtctctacaaaaaatacaaaaatagccaggtgtggtggtgtgcgcctgtaatcccagctacttgggagtctgaggcaggagagtcacttgaacctgggaggcggaggttgcagtgagcctagactgcgccattgcactccagcctgggagacagagcaagactccatctcaaaaaaaaaaaaaaaaaaaaaaagaaagtatcttgttgagtgactgaatgaaagagccacagggggaacctaggaagaaagcagggcagggggttcatctacactggaataggggtctcgggtgggggtcagatgacttgtgtctcttccatcatgtgtctcatgagacctagttctgccccagctctgccattgctgcgtaagcttgggaagcttattttgctcctctgggcctcagtgtccccatctataaaatggggcaaataatcctctccttgcaccccaggggctttgagacgtgaaaaggaatgtatctgtcaatatccagagatatccaatctgtgctggatgaccttgaccaaatcacattccctctctgtgccaattcacccctgggccttggtttgtccttctgaaaaacggctgatcatcttggaggatctttccatctcctccatgtcacctcttctcagcagtgctctctgattctctcaggcttccgttaggggtccttctaaatgcactctcagcctcctgtctgccgaccgggcacctgcttgcccaatgaatatcttgctcactagcctggtgcttctgaggtcaggaccacgtcttgctactgtcccctgcacccagtacagtgttagaatgtagtaaatgctcagtatgcttgttcaatgaatgaaggttgactgaatcaaccacagagatgatcagagtctcctttacagatggggaaactgaggcactgagaaatgatctccctgggtgccatggcaaggggaggccgccacccgacatgggcatcgggaaagtggggccgaggccactctttgacaaaagtgactcagcagctggcggctggcgtgggctgtggaatttctaagcatcccctcacatcctgagcgaacgggcgatgggagggagtaagcagagtgaaaagaagaaaaacaagaaacttgggggaaaagaaagagagagggggaaaaaaactgaaattgaaaacagacgcacgcgtccaccctccctgccccgccgcccccccttctcccagctgggccaatcagaagccaccctgcagcctttcccccaaagtggcgggggaagtgggggggcatggaagcccatagtggtgtgagctcctgaggctgccagcagccagcagtgactgcccgccctatctgggacccaggatcgctctgtgagcaacttggagccagagaggagatcaacaaggaggaggagagagccggcccctcagccctgctgcccagcagcagcctgtgctcgccctgcccaacgcagacagccagacccagggcggcccctctggcggctctgctcctcccgaaggatgcttggggagtgaggcgaagctgggccgctcctctcccctacagcagcccccttcctccatccctctgttctcctgagccttcaggagcctgcaccagtcctgcctgtccttctactcagctgttacccactctgggaccagcagtctttctgataactgggagagggcagtaaggaggacttcctggagggggtgactgtccagagcctggaactgtgcccacaccagaagccatcagcagcaaggtaagtgctggaaaaagtgggaaccccagccccatgccctgtccctttgccctaacctgcatctcttcgagtaggtaaaaaaaaaaaaaaaaaaaaaaagggaagatatttttaacaaaacaagatgagaggaggctgggagactgtgggtgatgtcagggatggaggagccagttttctcctttcccctgctctggggtgagtggcctccacctcatcatccctgctgctcctgccttcatcaaacaatcctcaggggtttctgggtgctgactgggggcctccaaagcacagcacagtcaatggggagtggggagagctgggaagagcgggagaggggaattgggagaaggtaggcagggtacacagaaagcaggggactggggacctcaggaccatagccgctgttccttggcccaagccttgtttctaagaatcagtctggctttaggccagtcagccgccaggcaacctctggggatttaaatggatttgcaaattttctagattcttaagatatccttctaaacccccagcagctagaaaagtttgagggctaggaaagttcgagggtgatgggcggccatggcaaccccctagcggtcatgctgctgggtctgggggctgggacctggctgtcagatctgggggctcctctgtgaagaaggggtcagccactgggccatttcctttggtcccaggcagctgctcaggcctcct

SEQ ID NO: 10432 - DNA, 6000 bp, Homo sapiens
atgaccctatctgaagtcatcctccattgctttttcatttcatcttccttgtttcttccatagaactgatcacaacctgaaatgagctcacggcctgccttcacctattggaatgtaaagtgcaagagggcagagccttgtctgtcctatttattgctatatccccagtgcctgatgcaaagcacaataaagactgaatgaacgaacgaggtagctgatgtactgggggtgtacggagcctggatggcaggcacatgtggacatttcccaggcagtcccttgagttctaaggctgtggctggggtgctaggtcaggagggcaggatcagggtaaagtgagaagtgcctagaagagcatagctggagagtggttggagagggcagtgggcaggcagcagggaccccaatatactgatggattgctttacaagatgaaaagctgattcagcctaatgttggatcagcaacattcttgactcgggagaggggtgtatggtctgaagtccacgtatgtcagagctggagaggagttgagggggaagtagcgtgcagtagtcaagcacttgggctctggtgtcccttaaacctggatttgaatctctgatttaccatatacttggtgcataagcttgagcaaattattgatatgaacttcattttccacatttataaaatgggaataataacagttccagatttataagagttaagtcagacaatatatgcaaagagcttagcaggtgcttggcacatagtaggtgtttaataaatgctggctcttattactactattctgctgtccaacctattttataaatgaaaaggtgtagggtcaggtacaatggctcatgcttgtaatactagcacattgggaggccaaggcaggaggattgcttgaggccaggagttcaagaccagcctgggcaacctagcaagaccttgcctctattaacacaattaaaaagaaagaaagaaaaggtgtagttcagaggggcagggatgggcccaaagtcactcagtgactcaatagcagagtgggactcacacccaggtctatcacacctggctgcgttgtgcttctctcccttcctataaagcccttggcaggtggcaggaagaccagccttagtcctagtggtcttcctttctaggtcagagtcatccttgcttcagaggctcctgttgccccaggatgcttttttttttttttttttttttttttgccttttgaggtggagtttcactcttgttgcccaggctggagtgcaatggtgctatctcagctcactgcaacctccgcctcctgagttcaagcagttctgcctcagcttcccaagtagctgggattacaggcgtgagccaccaagcctggctaattttgtatttttagtagagacggggtttcactatgttggtcagcctggtcaccgaactcctgacctcaggtgatccacccacctctgcctcccaaagtgttgggattacaggtgtgagccactgcacccagccatgtgctcttatccttagatataaaacctaccaagttttctttctgggagtgattctggctcagggtgtccccacagagacctggaagtggccctcaggagggatctctcttccagagcttcagcccagccccaaccagacttccacttcctgaactgaaagccacatgggaacaccagccaaaaactgggaagagttccactggttcatcctcatcagaatcatcattttagtttatgaataaaaatacaaagcttctgctaattttagtcccataatgcctgggagctatagcaaccaatcctataaaaatatacatctgtccggatggcaaaacagatatgtggagagtccaccagcaccctgtattcagcagccaaaagcacttggcttttgaaccagggtgagaggccttggggggtctttatttatttatttagagacggagtcttgctctgtctccaaggctagagtgcaatggtgccatctcggctcactgcaacctccgcctcttgggttcaagcgattctcctgcctcagcctcccatgtagctgggattacaggcacgtgccatgatgcccaactaatttcttttgtatttctagtagagacagggttttgccatgttggccagcctggtgtcgaactcctgaccgcaggtgatctacctgcctcagcctcccaaagggctggaattacaggagtgagccaccatgcctggccttattattattattattattttattattattacagacagcatcttgctctgtcaccgaggctagtctcaggcttctggccttaagcaatcctcctgcttcagcctcagagtagctgggactccaggaacatactactgcacccggcccttgggggtcatttggagaagactccttcttgggtgtttgtggatttttctgcagagaaagttcattgcttcctttaggttctcaaaaggaccaaacaccctaacttttatattccactttagtggtttgagggtctcttgggtgtggggcagtgttccaggctggaaccctagtaaaagacaaccctctcttttttcagatgggcaagtcggaagttcatatatttattgaataaaatattgcaagccagctttgtgtggggcactggtcaacatgctgggaacaaagcagtaaacagacatgtgaagtccctgctctcaccaagcttctgtctagttggggaaacaaatggtttctgagaatgacaggtgatggggaggaaataaaacagtgtaaggcgatgaactgtgcctgtgagagaggcaagtagattgagtggccctaaggaggtgacattagaataggcacaggaaaatcaggtggaagagtgtctctggcagaggtaagagcaaatgcaaagatactgggcatggtggctcagacttgtaatcccaacacttagagaggccaaggcgggcggatcacttgtggtcaggagttcgagaccagtctggccaacatggtgaaaccctgtctctactaaaaatacaaaaattagcctggtgtggtggtgcatgcctgtaatcccagcttcttgagaggctgaggcagcagaatcacttgaacccaggaggtggaggttgcagtgagttgagattgcgccacagccctccagcctgggcaacaaagtgagagtctgtctcaaaaaaaaaaaaaaaatcctggggtgggagaagctttggggtagttgaaggactggaaggaagttggcatggctggagcagcgtgggcacagaggacagtggtaggaggagagaatggcaagagagacaggggccacagcggatggaagtgtatcatgagggtgttctctgccttcttcctttccatggtattcaaacccaacccatgcttccaggtccacctctttcaggaatccaccaatctgaagccctgggataagccttagagtctgtaccactcatgtaagtgggtgtatgtgtaaggcacaacctttcagcaagatccaaagctccttgaatagtgagttatctcgattgattgttcacagtcacagattgaattccttgtactttttttcccttctcagttctgcacttaactcgtctaaaaaaattaaaaaagaatttaagaaaccacaaagctaagctgggtgcggtggctcacgcctgtaatcctagcactttgggaagccaaggcattcggattgcccaagctcaggagttcgagaccagcctgggcaacatgttgaaaccccatttctactaaaaatacaataaattagctgggtgttgtggcatgtgcgcctgtaatcccagctactctggaggctgaggcgcgataattgcttgaacccgggaggcagaggttgcagtgagccgaaatcataccactgcactccagcctgggcgacagagtgagtgagactctgtctcaaaacaaaacaaaacaaacaaacaaaaaaaccggaaaccacaaaactttttgaggacaaggaccaggtatttattaattctcatacctcccagagtgttaggcacaaaataaacattcaaccaagacctgttgcactgagcagttcatatataacaggagtgacccaagttgaaacgtagaatcagccctctcataccactttttgccaggtgatcataggcaagttacttagcatctatgtttccttattattaaaatggtcataattacaatgcctaagataaggggttgctgtgaagattattaaatcctcagtaaactttggctattgttactcctatgattatcatcaatatcatcaattaccttatctgttcaatactggtggcacaggtccaccagctagatgtctaatcccttatgtgtctattagtggtacaagtggagtttgagtgggatttttttttttaagaccagttccaaatcatcaaggatgataccactagtagcagcttgtcttgtctgtacagtggtaagtcctggccttgcctttgtggcaaatacaacccccttgaattgcttggcccttctcagcattgcctaatattagggaggactcctgtaaagctcactggttagaagatcaagacacttgggcctggttctgcccctgggggccattgggtaattccttgcagtctccaggcctcacttgccctctgaacaagaaagaggctgttctgggtcatccctccaggcctgtccagccctggcactctgtgagtcggtttaggcagcagccccggaacagatgaggcaggcagggttgggacgtttggtcaggacagcccaccgcaaaaagaggaggaaagaaatgaaagacagagacagctttggctatgggagaaggaggaggccgggggaaggaggagacaggaggaggagggaccacggggtggaggggagatagacccagcccagagctctgagtggtttcctgttgcctgtctctaaacccctccacattcccgcggtccttcagactgcccggagagcgcgctctgcctgccgcctgcctgcctgccactgaggtatgtgtgacccccgcccagcctttcccttctatagttgcaccaaccccgacacccccgttcacgccgtcagctcgtgtgcaagggagggaagctctgctgaggatgcgcctctcctcccggctccatcacggctccccttaagagcatggccctcggtcctgtctgcctgttgcttttcagaaggtggactcactgtgtaactttgtcttcccttacaggtttacagaaaataatctcactatgtcttcgggggagcattttctcactctctgtttttctctgtgtctgtctctggtttcagaggctgcctgcctgtcctctttgctccctttgcaaatgtggcagcctcctcctttcctgggaatctgatcccatcacagctgccacagggacctggccagcaaccggagtctgtcctccagatctcggtcaggggttctgttttccaaaagggactttgcacgaacaatcagttgatctctgaaaggcaaagggggaggcttcaccattaatccacacctctgggaagccttctgttttcctctaattctcctcactcccaaacaccaccttccgtccccccaatacacaaatttcagcaccattctgcctgaaatggcaccatcacaacctcagtcttgggttaggtgttgttcctgtcctgagttccttgggatggtaaacacaggcagtagcccttagtttatctagatctgaaaacccagacatcagatatcgtcaaccaagacatgggtgtaatgggaggtggagtgtgctgggggagatattctcagaagggggaaagggggaagggaagagggagagaattccagggtccccttccgtaatccacccaagactagtgtccagcctgtcagggtgtcagttcttcttcagacaaatccactacctttcttcgccgccactggctccgtgaactggctgtcaagtggacttccttagggaaa

SEQ ID NO: 10433 - DNA, 6000 bp, Homo sapiens; identical to SEQ ID NO: 3821

SEQ ID NO: 10434 - DNA, 6000 bp, Homo sapiens
aataaaaagaaagacatccccatcatgaaattatcattattattcaattgcatatcccattattaaatacttatttaaatattatgttatttaaaataatttacactgaatattttaccaggaacgatttaattctcctagaaatcctgtaaagcaatactgctattttactcattttgctgatggagtaactgaggcttacagagtttaattatgttccttatggtcacatagctagtaggaggcagaaccaagatttgaatcccaaagctacgctgcagtccgtgcctttattacttctatagcatctccctgcattgagcctgctactacattctgtactagacatcatcctttttgattagacctaccctgtcacaatgtggaaatgcctttgaattttagatttgttgcctcatatattaagaaatattggctgggcacggtggctcacacctgtaatctcagcactttgggaggccaaggtgggtggatcatttgaggacatgagttcaagaccagcttggccaacatggcgaaactccatctctactaaaaatatacaaattagccaggcatgcctgtagtgtgcatgcctgtagtcccagcctgtagtcccagctacttgggagctactgtggtacatgcctgtagtcccagctacttgggagttactgtggtgcatgcctgtagtcccagctacttgggaggctgaagcaggagaatcactcgaacccaggaggcagagattgcagtgagtcgagattgcaccactgcactgtagcctgggcaacaaagtgagaatctgtctcaaaaaaaactacagaactacaaaacactgctgaaagaaatcatcaatgacacaaacaaatgaaaacacatcccatgctcatggagaacagaatcaatactgtgaaaatgaccatactgcctaaagcaatctataaattcaatgcaatcctcatcaaaataccaccatcattcttcacagaattagaaaaaacaattctaaagttcataaggaacgaaaaaagagccacatagccaaagagaggctaagcaaaaagaataaatctggaggcatcacactacttgagttcaaactacactataaggccatagtcaccaaaacagcatggcactggtataaaaataggcacaaagaccaaaagaacagaatcgaaaatccagacataaacctaaatacttatggccaactgatcttcaacaaagcaaacaaaaacataaagtgggggaaaggactcccttttcaacaaatggtgctgggacaattggctagccacatgtaggagaataaaactggatcctcatctctcaccttatacaaaaatcaactaagatggattaagggcttaaacctaagacctgaaactataaaaattctagacgataacattggaaaaacccttctagacattggcttaggcaagaaattcatgaccaaaaacccaaaagcaattgcaataaaaacaaagataaatagctgggagctaattaaactaaagagctttttcatggcaaaaggaacagtcagcagagtaaacagacaacccacagagtgggagaaaatcttcacaatctatacatctgacaaagaactaatacccagaatctacaacaaactcaaacaaatcagtaagaaaaaaaaatcccatcaaaaagtgggctaagaacaggaatagacaattctcaaaagaagatatacaaatgaccaacaaacatatggaaaaatgctcaacatcactaataatcagggaaaggcaaatcaaaatcacagtgcgataccaccttactcctgcaagaatggccataatcaaagcatcaaaaatcagtagatgttggtgtggatgcggtgatcaggcaacacttctacactgctggtgggaatgtaaactagtactgccactatggaaaatagtgtggagattccttaaagaactaaaagtagatctaccatttgatccagcaatcccactactgggtgtctgaggaaaagaagtcattattcgaaaaaaatacttgcacatgcctgtttatagcagcacaattcgcaacagtaaaattgtggaaccaacctaaatgcccatcaatcagtgagtggataaagaaactctgatatatattgatatatatggatatatcatatatggatatcctatatatccatatatatggatatatcatatataaatactatataatatatattatatataatattatatataatatatcttatatatattatatataatatatataatatacaatataatataatatataatataatataatataaatataatatataaatatatatccatatatggatatataatatataaatatatttccatacatatatatgaatactacacagccataaaaaggaatgaattaacagcatttgcaatgacctgggtgagattaaagactattattctaagtggagtaactcaggaatggacaaccaaacatcatatgttctcactgatatgtgggagctaaggtgtgaagatgcaaacgcataagaatgatacaatggactttggggactttaggggaagagagggaggcaggtgagggataaaagacaacaaatatggtgcagtgtatactgcttgggtgatgggtgcaccaggttctcacaaatctctactaaagaacttacttgtgtaaccaaataccacctgtaccccagtaacttatggaaaaatatttttgttaaagaaagaaatattttccatcttcctcagcgctaagtttatagtctgccactgtgcacccttataacgatccttacatctaaatgagatattctcattaaacttttcctatttcattagaaaaatacgttaaagtttgtaaatagtgattttaacatcaaaacttgcctttaactagagggccctaattctggctctgcaatacctattacatgtctgtaattattattaatgttattgatcaatttttcctacttttccatcttctgtgcacatgctaagacagcacttcctgaccctgctgtagtcgaatgggtacatatgattaaccttggtcaatgagctgtgagaaaaactggcaatgagttacttacttttgggctagagcctataattacctacttaagaccatccagagctctcttttcctctatcacaatgataatcaaaattccagagagtgaccactgcatcagcctaggtttatgagtgagcatagcatgagacagaccctcaatacatttgaagtacaagagaaataaatctgtattgtttaaaaccaccaagatatgtcaatcatttgttacagcagcgtaaactatcttaacttgagagatgacttattcttggacaagtcactttccctctctaatttttaacgtcataatctgatttaacaaataaagggaaaaaattaacatttagtgagcatctcttaagtataagttgcttcgttatatataatttaatttagtcttctcaatgaccataaaaggtattatctcctgcaaaaatattcctaaatccaaagaaatctctcaactccactgctcatagaatccaagccactactatgtcttactagcctcttacctaccttctgttaaaatttctccctcgttaattctccagtgcaaaatcttttaaagacttctccctgccatttgaatcagagctaaactctcttccatggcctataagagtttacatgaacctgtacctgccagccacttcaatctaagcattcatactttgctgaccacttattaaattccagttattctggtcttcctgatatttttaaaacctatccagcttgtttctgcctcaggacctttgcacttgctattacttttgctgagtaatacacttcccttagctctttcatgactgacttcatcattcagacctcagctaaagtgacatctcctgagataagttttctttcaccatccttgataaataattatttatcaattactatctgaaattatattattaatttattcatttgcttgtgtgttttcagaattccctactgcaagaaaagctccactagggcagagaccttgtcttgcttgtacactagtgtttctacaaagcttagaacattccctggcaaatagtgaatcctcaagaagttattgtggaacgcaatcgaattaatgatgcagataaggaaataagcctctaagagtttgggtaactgtgccaactttcctaaatttctatgagtgttcctaattctgaagtccatttgccttttgcttacagcaaagctctgctgagactgaagagtcagttagcagtcagggctaggcactgtgcatgcgccctttcaggcttcggattctatcgttgatgcagttaaaaccaaaaagtcacattaatcatgttatcacattaatccccagagaaccctgaatttccagtggaacaagataacttgagaaatctattgatctcctattttcatcatgctgtacggctgacaagggttagtggagattggtattcttttgcccatggccctgcaactttaatttctatgtctacccagattcccacaactttgcaacctgcattgctcaaagtgcccatccatgaagttcgagtggcttcttttgtgtcagctctgccttcccagctccttcccattcagggagaggtctctgcctcctcccctgcttcctgactcgaagccagcacccctctcctccagtgcagcctaacacactctcattggccctcagcctgtcaaggggaggggcttgtgtctccggggctcttcaaaagggatcggcggtccaggcagcctaacctggagggtgaaacactcactctctcccagccttccttacgaagcctgtgactttcgtgactgctttctcttttttgttttccttttttcttttttttttttttttcctggctcagcttgaaacagagcctcgtaccaggggaggctcaggccttggattttaatgtcagggatggaaaaacttcagaatgcttcctggatctaccagcagaaactagaagatccattccagaaacacctgaacagcaccgaggagtatctggccttcctctgcggacctcggcgcagccacttcttcctccccgtgtctgtggtgtatgtgccaatttttgtggtgggggtcattggcaatgtcctggtgtgcctggtgattctgcagcaccaggctatgaagacgcccaccaactactacctcttcagcctggcggtctctgacctcctggtcctgctccttggaatgcccctggaggtctatgagatgtggcgcaactaccctttcttgttcgggcccgtgggctgctacttcaagacggccctctttgagaccgtgtgcttcgcctccatcctcagcatcaccaccgtcagcgtggagcgctacgtggccatcctacacccgttccgcgccaaactgcagagcacccggcgccgggccctcaggatcctcggcatcgtctggggcttctccgtgctcttctccctgcccaacaccagcatccatggcatcaagttccactacttccccaatgggtccctggtcccaggttcggccacctgtacggtcatcaagcccatgtggatctacaatttcatcatccaggtcacctccttcctattctacctcctccccatgactgtcatcagtgtcctctactacctcatggcactcagagtgagtatctaggctggggtggcctgaggcagcatcccttcttttttcacaggctcaaagttcagagaaaaacttagaattggggaaattcagaaatggaagggaacagagggaaaatagaatgagctcagatgggaaattgagacttaaaaggacttgcctcaaatgagatgaatggtaaccacaactatttatcatttcctttagctcgtcttctatttttcttccctctattcttggggttctcgtatctaaatgtt

SEQ ID NO: 10435 - DNA, 6000 bp, Homo sapiens
accacacccagctaatttttgtatttttagtagagacagggttttgccatgttggccaggctggtctcaaactcctggccccaagtgatctgcctacctcggcctcccaaagtactgggattacaggcatgagccaccatacccggcctcaatatatgcatttttaatagtcaagttgtaaaaggtttataactaaaaaaatagtgaatttctttcccacttttttgcattaaactcttttgagcttgttcttctggtttttaccttcatattactcacagcgtgtttatgctggtattgtctgattgaccaatttgagacactatttgttgactccctgtaaaggtgaatagactttggctttcttacacccccaccccgcttcctctctaccaatttttccagtgtagtcaaatcaaaatatgtgttaagttggggcacagtggctcatttctgtaatcccagcactttgggaggctgaggcaggcagaccacttgaggccaggagttcaagaccagcctggccaacatggtgaaatcccatctctactaaaaatacaaaaattagccgggcattgtggtgcatgactgtaatctcagctacttgggaggctgaggcatgaatcacttgcaccctggaggcagagatttatccgaagtattccatgcagtgagccaagatcgcaccactgcactccagcttgggtgacagagtgagaccctgtgtcaaaaaaataaataaataaaaataaaaatggtgtattaagccagtagccagattttacattattaccagcatgtaactattaatatctttcacacttagcaaatgcaccataattacatttcttttctcgtacaaaattttatctttcctggttgtaataattatctcattttttgtttgtttgtttgtttgtttgttattttgagacggagtctcgctctgtcaccccagctggagtgcagtggcatgatcttgactcactgcaaccaccacctccctggttcaagggattctcccacctcagcctcccaagtaactgggattacaggcatgtgccactgcactcagcaactttttgtatttttggtagagatggggtttctccatgttggccaggctggtctggaactcctgacctcaagtgatccaactgcctctgcctcccaaagtgctgggattacaggcgtgagccactgcacccagccttcattgtgtttttttcttaatttcccaagtatccatcaaaaattcatcccatggctgtgggcagtggctcatgcctataatcccagcactttgggaggctgagatgggaggatcacttgagaccaggagtttgagaccagcctgggcaacatggcaagaccctgcctctacaaaaatttaaacaaattagctgggtgtggaggcacacctgtggttccagctacttgggagactggggcaacaggattgcttgagcctggaggttgaggctttactaagccatgttcataccagtgcactccggtctgggcaacagagcaagaccctgtctcaaaaaaaaaaaaaaaaaaattcatcccaagtattccatcatatctgccaaacacctatcaaagttattttcaaattacctaagtacatgagcttattcgtgacactcactaccaccaccccaaggcttattcctctgctcttctgccccagcctgaggtggttattaaagtaattattctccaaagatgcttcccctaccactccaatgaaccacacttcctcgcattcacatccttgtattgctccctccacttgaattctctgggatggccttataatttgccttttgaccaataaaatactgtaaaaatgatactgaatgttacctaaggctaggtcataagaacctttgtggattattcctgagcatgttggaatgctaatttttgagaaagccagatcctatgtaaaaaatccaactactctgagaccaccatactgtaaggaagcccaagcttccatgtagaaaggtcatgtggagagagacagttgtcagtccagcccctatctcttctagtcattctattaatttgctagacatacaagtccagctagaagtgtcattttggatgatcagtcatgtgagtgagaaagttatcttggacaaatagtccaatctagtcttgagatagccactgtcactgggtgagagctacccagctgaacactgtcatcccagggaatcatgaaaagtacattgacattgttcaggcactaggttttggggtggtttgtgatgcagtgaaacagttcccctctaggtctgttctgcagttttctttgtgaaatttttcttccctggagttagatgtcatgttttctggaccccatgactttctgtttcctggttatttctcccgttttgctacagatttctcttccataacttctaggaaaggaagtatagtaagtaaattttgaatctatgtccaaaaaggcctttattatgatcttacatttgagaaatagattgtctgcgagtaggattctaggttgaaattaaatttctcctctggatttttttttttttttttggacacaggttctctgtctgttttccaggctggagtgcagtggcacaatctcagctcactacaaccttcacctcccgggctcaagcaatcctcccacctcagcctctggagtagctaggaccacaggtgcgcatcaccacactcggccaattttttgtatttttggcagatatagattttcttttcctctttttttttttttttttgatggagtctccttctgtcacccaggctggagtgcagtagcatgatctcagctcactgcaacatctgcctcctgggttcaagtgattctcctgcctcagcctcccaagtagctaggattacaggcatgcaccaccacacccagctaatttttgtatttttagtagcgaccagttttgccatgttgctgggacttgtcttgaactcctgacctcaaatgatctgcccgtcttggcctcccaaagtgctgggattacaggcgtgagccgccacgcccggctgatacaggtttttaccatgttgcccaggctattctggaactcctggactcaagtgatccacccactttggcctcttaaaatgctgggattacagatgtgagccaccacactcggccttccctctgaattttgaaggcattcgtgcattattttctagctttgttgtttggaacaacaatgccattctatttccaaatccattcagtgcaatatgttgttctttctctctggagtcttttcgtatcttttctttatgtctgatgttctcatattacatgataatgtcttgctttttggggatatttttattcattgagtttagcatttgattgacccgctcaatactgagagtcatctcctttagttacgagagtctttcctttattatttctttagtaatttcctctcctctattttcttttttaatgttctgaaacaatcctagtcctttgactttgtagatggttataatttctaacaaattttcttaactttatttttcaaaacttccataaaattcgggacatttttataatgtctatgttctttttcatgaatgtaaaatctttctttctgagaaaatattagctttttaaaaagtttttgaagttctctttagctctccctgttatttttgtctcttttttatgttaaatgctttcctcaaatgtctgatgatccctggttatctgttcatatctgaaagggacactaaagactcattaacagttctgcatgcatggctgaggctcatgcactgatgaacttattgaaggagggttgagtggttttgttggggaacactcaaaactataaatatctgaaaatgttttattgggaccacttagtttatccagagattaaatcctccagtttcctgggatagaatggggaaaggatcccttggttctgtgggcattcagtgggaagattcactctgaatcccgttattttcatccctgctcatgttagtctggcttctctgggtctagaacctcacctgatatttagatttttcactgataccttcagtagaagcaatgttgaatgtttgaggtttgctggctgtttacaatcaattaaggatttttaaaaatctagaacatttgtgaattcttatattttcttcctggtactaagtaggagctagccacaggtaggcctcatcatatggatacattacccaaacggtcacaggtcaaaggacaatgtagtgattaaccataagctttggaatcaggaagttctgggcttcagtgtcttcctaaaacttaaaaaaaaatttaatttttttattaaacttttttttaaataaaaaattgagatggggtttcgccatgttgatcaggctggtctcaaactcctggcctcaagcgatcctcccatctcggcctccctaagtgctaggattacaggtgtgagccactgtgcctgtcctcacttttctttctccattattagggcaaggaggccaggggacagggtgagggagaacctagaatgggaatggaggcaactttcagtctaactatgctttggccccatgaggaatctacatgtaaacacttgccagtatggagagtcaattgcactttgtgacaggctgtacagcagttgggacaactgtggcacatgcacaggttatacaggcatatttgcaccagcacatgcatggatgcttgtgcacatataggaaacccactatacacatggacaaagaagcacaagtatgtccacgccatccctccacacacacactagtcaccaggagaaaagggctcagcacatttcatcatgcatcgcccattgggggaagccatgtaggacaggagaaagggaagattatgaggcaaaaagagaaatgaaactaaagagtcccaccctgtcagcattaactgggatataagaggttgggctttggatagatagacagactcctgggtccggtcaaccgtcaaaatgtccaaagaacctctcattctctggctgatgattgagttttggtggctttacctgagtaagtgttctgaaaccttctatgtagaagtttccagaggacttgctattgtgtgatggatttccatgcactggtttgggcctcagtgaagcagaagctcacttcatttctgcatccctcccctctccctaccaggcttccttctgtggagggtctctgtcctgccttgttacacagaggtttatccagagactggtctgggggttttaggctggggtaatttgggcttatattggaaacagcaactgaagaagagacacagaaataagtggtcagataaattggggaaaagagatttcctctatgggtgttattcatataatcaataagccaggagaatttgttctggtgagaattgtgataattcttatcattccctctgtttttagaagtgtttgctttttgttttgttttgctggggtgaggctttatgtaaggtttcttttctgcacgttgtttttgggttttggatgatgcaagtgtacacactcagttttggccagtgaagttctttgcatcctggtggtatagagccaagtgttctggcctgagctgcagctgcgtctcgggcactaactgttgacactgggaatatgtctaaattgctctggctctcccatatttgaaatgagagacctggctttttaaatgaccagttgtcacaatctgtgcttctaggacaagataatattgaatggcccttgcagttttacaaaagtccattttttttttaaatggatacaaaataactatacatatttatgggctacatatgtgttattttgatatatacatacaatgtacaatgatcgaatcagggtagttgggatattcatttcttgaaacatttaaatttctttgtgctgagaacatttcaaatgttctcttctagttattttgaaatacacaagaaattat

SEQ ID NO: 10436 - DNA, 6000 bp, Homo sapiens
ctgttgcagtcacgctggcctctcttgccctgtaaacacaccaggcaccctcctgccttagggcctttgcccttcttgtctgtctccatggaaagcgtttgctgtcttggctaacttccttgtcctttgtcttagttcaaataatcaccttcttggtgaaagtaatagagactattcaaacctgaccaccttgtttaaaattgcaactcagtgcctcctcaaccctccactcccaaccaccttcaccctgctcttgtgtatccttttgccttttttgcattagcattcctcaacttgtaatatgctgataaattacattttagtgatgttttaaaaatctgtatatttatttttcagttaaaagttagttacatgaggccaggagtggtgctcacgcctataatcccagcactttgggaggccaaggcgggcagatcacttgaggtcaggagttcgtgaccagcctaaccaacatggtgaaaccccgtctctgctaaaattacaaaaattagccggtgtggtgatgcatgcctgtaatcccagcttcttgggaggctgaggtaggagaatcgcttgaacccaggaggcagagtttgcagtgagctgagatcgtgccattgccctccagcctgggcaaaaaaagcgaagctccatctcaaaaaaaaaaaaaaaaatgtaagttacatgaggccaggggtctttggttcattggtacattccagatgaataggatcatttctaacatatcgcagatcatcaacaaataattgttaaatgagtacacttttggtatttttatatattttctttctttctttctttctttctttttttttttgagacagaatctcgctctgtcacccaggctggagtgcagtggtgtgtgatctcagctcactgcaacctccacctcccaggttcaagcgattctcttgcctcagcctccctagtatctgagactacaggcacgcgccaccacgcctggctaatttttgtagttttagtagagacaggggtttgccatattggccaggctggtcttgaactcctaacctcaagtgatcctcctgccttggcctcccaaagtgctgggattacaggtgtgagccaccatacttgggcttttatgtattttctatggtaaacataggtggtaccctgtaatttttatatctttgtaaaagatataaaaaaaagaagcattatattacttgttatgaaatcagaggagtaagtgaaggaaaataactagcttagggcagtgggcagggcaggaagagaactgaaaggtaggaagacagttttggagggaattgcagaagtctggattatagaggcctaatataaagtgatggggatgagggagagactgacaggtacaatgatgtggagttggtgagtccctagttgtggagggggcctaagaagatcttgctgtggtgaaagcatggggaatatgaacagctgaactgttttgcaggaggctggagctggaggtacgatgtgcgctgagatagcagggaagtaagtggtgattgcaagaaagaacagtgaattattttcttttctgaattctttcttttttttgagacagggtgtcaatctgttgtccaggctggagtgcagtggcacgatctcagctcactgcaacctccacctcccgggttcgagcaattctcctgcctcagcctcccaagtagctgggattacaggcacccaccaccgtgcccggcccatgttctgaatcatttcaattcactgccgttaatcttggtttatacagatgcagctccctagtgagcagctggaaattcagctttggtgcccaagtattgtcacttccagctttaccctacaactgggatgcatccttcaggggggtcatgaagtttgccctaaagagtagtgatccctggaggttgtatagctcattaaaaaaatccactgtgctatattgtttgggagtctttagaacacaggcgtctctcatgggagatggtcctgtgtcagaaaattcaaccctatggaattgtacagttatgtaacatctcagagccttggctccacatccctgtcctggctctctctggctcatcatttcctccagttgaaacaccctccacccattcttctcacatgtcactttttaagaaattcttcccaccccccacattccgtcatcaaaatgaatggtctttccctatgggtttgtgtttccatttgtttatctattcaattaataacttttttttttttgagaagtctcactctgtggcccaggccagagtgcagtggcatgatctccgctcagggtaaattctgcctcccgggttcaggcgattctcttgcctcagcctcctgagtagctgggattacaggcacccgccaccacgcctggctaatttttgcatttttggtagagttgggtttcaccatgttggccaggctggtttggaacccctgacctcaagtgatcctcccacctcggcctcctttggattacaggtgtgagcaaccatgcctggcttcaacacttaaattgccttaaaggagtttatggtctggagttgggtgccacacaacacagtcactatgtgtgacaatttaaattttatttttttgtttttaattaatttatttttttgaaagctctgtcatctaaggcttgagtgcagtggtgccatctcaactccccgaagactgtctcctgggctcaagcaatctgaaattttaattaaaatgaaattaaataaaaatttttaggccaggcatggcggctcacacctgtaattccagcacttttggaagttgagatgagcgtatcacttgaggccaggagttccagcccagcctggccaacatggtgaaactccacctctgctaaaaatacaaaaattagccaggcatggtggcgcgtgtctgtagtcccagctactcaggagactgtggcaagagaatcacttaaacccaggagatggaggttgcactgagctgagattgtgacactgcactccagcctgggtgacagagtcaggctctgtcttggaaaaaaaaaaaattaaaaatgccttggttgccttagccacatttcaagtgctcaatagtcatatgtggctagtggctgctgtagtgcacgacactcacacagaataactctgtaaccaatattctactggagacagaatcgatcctatggaattcaaattcaaatcctatggaattgtacagttatgtaacatctcagagcactggctccacatccctgtcttggctctctgtggctcatcagttccagaataactccgttaccagaataactccattactaaaattctaccgggcagcactctataggagggaatagagacagacaccacatatattgcacacacagataaaatggattaaggaaaacaagataataatagtgagagggactggttggctactttagattgaaggacctgtgaaaaatgtccagggaggtcatatttaagccgggataaaaatgaaaaggaaaaaagtgaaaatggtggggctggggagctagatggagaacacagccacggaaaaggccttagggttgaggcaagttggaaagaaagctctagtagctggggctgagtcagcaggggagagagtggtagaagaaatctatggggtaggtcagggccagaccaccagggcttcagtaatttgagtaaagatttaggaattattattattattattattattatttttctgagagagttatgagagggttataagtgggggaatgatgtagtctgattatatatttacctttacctcacttatcctgatttcattagttgcttacttacccatgtccctgcccgattgcacaagtctggatttttgacgtccctagtatattgagtcatgtcccatcagctcaatatgttagtaataactggttgaattgaattagcttttttttttcaatctttttttccttaagaaacagggtcttgctctgtcaccccggctggtgtgcagtggcacaatcatagcctccaactgctgggctcaagcaaccctcctgcctcagcctcctgagtagctgggactacggtcaggtacacaaggcctgactatattttttgttcgttttttttgcagagagggagtcttgctatgttgcccaggttggtctcaaactccttacctcaggtgatccacttgccttggcctcccaaagtgttgggattacaggcgtgagccactgtgcctggcaagaaatgaatttttatttttatttttgagatggagttttgttcttgttgtccaggctagagtgcaatggcttgatctcggctcactgcaacctccaccttccaggttcaagcaattcttctacctcagcctcctaagtagctgggattacaggcgcccgccaccacccccagctaatttttgtatttttagtagagtcggggtttcaccgtgttagccaggctggtcttgaactcccgacctcaggtgactggcctactcggcctcccaaagtgctggggttacaggcacgagccaccatgcccggtcaagaaatgaatttttaaacgctgccatacaaaacactatgctgagatcatccacttccccatgaaccctgtcatgagctgcaagatacagaccaccactgcctccttggaagttactgaattcttagaccagaagaggagttaatgaagtactaggcaagcttactcatgtttgtatggtttaatgattaacagcagaagtcaacagcccgatttaacgcatgtgggtgcttgacacagagcctgctatatagtattctccaaaaacctcagctagtgctattactgcatatgatgtaggtttagttttccaagttcttccgtggccctttttgcttattatatcaatccttggtgggagatagaggaagcatttttagtgctattttacaactgaggaaatagaggtttgaagagaactcaggaactctcagggttacccagcattgtgagtgacagagcctggatctgaacgtaagtctgctccagacttctgtttcctgaagcattctcttgaagtcccttggtaaggaggtgtagtctgaagcatgttgtacaggagcatgaaaggttaggcacagtgattcacattcactctcaatttctcttgctaatggcaaacttggcaatatgactgttaaggctagggataagtcgttgtggccactgagtaggaaaagctccacgtccaccagaggcccagtttactctgaaaagcaagtgcatctctgccactggaaggctggcatttgctctcgtgctgccattgagccacgctggttctctgcttccagtttccttttcttttctttttttttgttttgttttttgagacggagtcttgctctgtcgcccaggctggagtgcagtggcgcgatctcggctcaccgcaagctccgcctcccgcgggttcacgccattctcctgcctcagcctcccgagtagctgggactacaggcgccagtgaccacgcccggctaattttttgtatttttagtagagacggggtttcacccttttagccaggatggtctcgatctcctgacttcgtgatctgcccgccttggcctcccaaagtgctaggattacaggtttgagccaccgcgcccggccctgtttcctttttgtttgttcccctgataccctgtatcaggaccaggagtcagtttggcggttatgtgtggggaagaagctgggaagtcaggggctgtttctgtggacagctttccctgtcctttggaaggcacagagctctcagctgcagggaactaacagagctctgaagccgttatatgtggtcttctctcatttccagcagagcaggctcatatgaatcaaccaactgggtgaaaagataagttgcaatctgagatttaagacttgatcagataccatctggtggagggtaccaaccagcctgtctgctcattttcct

SEQ ID NO: 10437 - DNA, 6000 bp, Homo sapiens
ctatgtagctgtaataaaaaaatgaggacattcggccaggcgcggtggctcacgcctgtaatcccagcactttgggaggccaaggcgggcggatcatgaggtcagaagatcgagaccatcctggctaacacgatgaaacccagtctctactaaaaatacaaaaaactagccgggcgtggtggcaggcacctgtagtcccagctactcgggaggctgaggctggagaatggcatgaatctgggaggcagagcttgcagtgagccgagatcgcgccattgcactccagcctggggacagagcgaaaaaataaaaaagaatgaggacattctacatgagctgaaacaaaagattttaggctgggcgcggttgctcatgcctgtaatcccagaactttgggaggccgaggtagttggatcacttaaggtcaggagttcgagaccagcctggtcaacatggtgaaaccttgtccctactaaaaatacaaaaaatttgctgggcatggtggctcgtgtttgtaatcccagctactcaggaggctgaggcaggagaactgcttgaggcagagtttacagtgaaccgagtttgcaccattgtgctctgacctgggtgatggagcaagacttcgtctcaaaaaaaaaaaaaaaaaatttaaatacatttaaaaaagaaggttgcatgctgtggagcaaccagacaattgtgatgaaatgtgaagcacaaggcaccagctgtgacgtgtttttgccaagaagtcaaaccacgttccaactaaacctctagagcaaactttcattttcagcaaattcgaagaaaagaggaataatgtaaatgaccccacagggaaacagacaaaccctgaatgtggagcatttcacaggacaaaacctggtttgtataactggtttgtataaccaatggcaagggggtggagggcagactgtcttcgattaaaagagacttgagggacatagcaaacaaatgcaatgctgggacttgtttggatctggatttaaacaaactgattgaaaaaagacatttttgagataatcagggagatttggctatagactgaagtactaggtgcttctaaggcatcattaaatttgttatgtgcgataatgatattatgattatattagcagaatgtccatttttgtttgttggttggtttgttttgagacgaaattttgcgcttgttgtccaggctggaatgcagtggcacaatctcggctcactgcaacctctgcctccctggttcaagcgattctcctgcctcagcctcccaagtagctgcgattacaggcacccaccaccatgcctggctaattttttgtatttttagtagagatggggttttcaccgtgttagccaggctggtctcgatcttctgacctcaggtgatccacctgcctcggcctcccaaagtgctgggattacagccgtgagtcaccacacccggcttcagaatgcccattttttaaaaaggaagattgcacactaaagtacgtaaaagtgaaatagcacgatgtctgggattcgtttaaaaatatttcagcagactcggcatggtggctcacacctgtaatcccagcactttgggaggctgaggcaggaggatcccttgagcccaggagtttgagaccagcctgggtaacctagtgagacccttgtctctaaaaataaattaaaacaaatttaaaaaaaaataaagggccaggtgcggcggctcctgcctgtaatcagcaatttggaatgctgggacgggcagatcacctgaggtcaggaatttgagaccagcctggccaacatggtaaaaccctgtctctactaaaaatacaaaaattaaccgggcatggtgacaggtgcctataatcccagctacttgggaggctgaggggaggcagaggttgcagtaagccgagatagcaccattgcactccagcctgagagacaagagtgaaactccatctcaaaaaataaataaataaataaataaaaataaaataaataaaataaataaaattttaaaaataaatatttcagcaaataacaataggaaaatgcaagtttcaaaaaaggtatatggtattttgtctaagaaaagagagtatgagaatatatattttattttcttgggtttgcattgggagtatacacaagaaacttatgaaaatgaaaacctggtcgggtgcagtggctcaagcctgtaatcccagcactttgggaggctgaagtgggcagattgcaaggtcaggagttcgagatcagcctgaccaacatggtgaaaacccatctctactaaaaatacaaaaattagctgggcacggtggcaggtgcctataatctcagctactcaggaggctgaggcaggagaatcgcttgaacttgggagtcgcaggttgcagtgagctgagatcgtgacgctgcactccagcctgggtgacagggcgagactctatgtcaaaaaaaaaaaaaaaagaaaacctatagcataggtgggagaaatgggggtaaacatggaaggatgggatcatgggatcaaggcttcttgagctttttatattccttttactttttaactatttgaatgtattatctaaagtttttaagaaaataaacaggaaataaaagttaagtgaacatgaaaatgttcagaaccagctccctacacacacaagagagttaaaggagatctctagaccccttcatatctagactttaatgaactaataaattgttaatgttttataaagctggtctcagtagcaattctagaaatgagcagaaaacaaagtggtaaaaacaaaacatcgctgggcacggtggctcatgcctgtaatcccagcattttgagaggccgaggcaggtagatcacctgaggtcagaagttcgagaccagcctgaccaatatggtgaaaccctgtctctactaaaaatacaaaaattagccgggcatggtggtgtgcgctcttagtcccagctacttgggaggctgagacaggagaattgcttgaacacaggaggcggagtttgcagtgagccgagatcgcgccactgcactccagcctgggcgacagagcaagactctgtctcaaaacaaaaacaaaaacaaaacaaaacaaaacacagaaactgagggctgatgcttttaagagccttgaccaagttcatgctgctaataaaaataaccccagaccccatatttaatctattctaccttatgcttgaatatggtcatttgctggttattagttatgtgggaagacaaacattaaattaataaaacataatttatagtggaaaaaatctgtcacttagggggcttatgctctcattctaaatcaccaatcatgtgcctttcggcaaatcaattttctgaagtctcagattccttgtctataaaatgagaaattggccgggcgcggtggctatgcctgtaaacccagcactttgggaggccgaggcgggtggatcgcctgaggtcgggagttcaagaacagcctgaccaacatggagaaaccccgtctctactaaaaatacaaaattatccggggtggtggcacatgcctgtaatcccagctactcaggaggctgaggcaggagaatcacttgaacccgggaggcagaggttgcagtgagccgagatcatgccattgcactccagcctggacaaaaagagcgaaactccatctcaaaaaaataaataaataaataaaaataaaataaaataaaatgagaaattgattatgatctcttgagtaactgccactctgcaatgctatgggaagtacacacattgaacaagttgcatatttatattaaatgccatttgtttatattgaacaaatttggtatttatacccaatgcatttaatggcataaatgtgaatgacaaagaaactcaggaaggcaagacatagaggaaggccactggcttttcagaaaccactcagcctgtgagctcacttcccttttataaaaaaaagcttttgcttttaaggtgtccagataaaggtcacactcccagagctgaggctacgtgagtctaagctgttacctcagttatgggagtgtggctggaactcaacactttctgatcattcatggccaaagcctcttggggtaggggagagggggcaccttgtatgcatgagatgaaacaggataccaagatccccttaattctactcagagtagaggaaaggaactgttgccaaaaggaacatgttttttctaaattgaagagttggaagtttgaaggtcaaagtcagaatattagaacagagagccatgcatgtattatctaatacaattttctcattttataaattatataaatgaggaaactgagactcagcaaggttataggatacaacctaatctgtgttagaagaaggatgagagtgaggcttatgctgggagttgctatggtctgtaaatgtgaggataaggaacatgccattcactgttgtgttccacttcctagtccagtgcctggtgcaaagtaggggcttcataaactttggtcacaggcctgatgaagggactgatttgagtgaatgaatccatggatgatgcatctgtactttgtgttccccgctagtcagatggactcggacatgctccatttcaggtgtatctcatctgagacattattagagggttctctttatgtgccatgactgagtagcgttttcttccactgaagtattgcttcctctttgttgatatcacaggacagacatcagaacacttacaggatgtgtgtagtgtggcatgacagagaactttggtttcctttaatgtgactgtagacctggcagtgttactataagaatcactggcaatcagacacccgggtgtgctgagctagcactcagtgggggcggctactgctcatgtgattgtggagtagacagttggaagaagtacccagtccatttggagagttaaaactgtgcctaacagaggtgtcctctgacttttcttctgcaagctccatgttttcacatcttccctttgactgtgtcctgctgctgctgctgctactacttacaagtaagtctcggcatggatatttacaatgacataatggtgctgtacagaggacaagggagagatacaaggatggccattgtaatgttgtttgtaatagcaaaagcttggaagcaacctaaatgtccgtcgatgagggagtgggtaaataaatgtgatataatcatgatacaaacagtgagtctgacaaaacatactggtatagaatgtctcaaaattataatgttattaaagaaaaaaagttgcagaataatgcatatattaggcttctatttgtgtgtgtgcattgtcggggagcaggaatatgtggacatttcttaatgtataagctctaggaaaaggaaccagggaatggtaaagagttgggagagtaaggcatatttttcttttcttttctttcctttttttctttttcttttctttctttttctttttttcaattgagatggagtctcactctattgcccaggctggagtgcagtggtggcaccattttggctcactgcaatctccgcctcccaggttcaagtgattctcctgccttaggcaccggagtagctgggatcacaggcgtgcaccaccacacccagctaatgtttttaatttttagtagagacagggttttaccatgttggtcaggctggtctcaaactcatggcctcaagtaatctgcccatctcagcctcccaaagtgctgggattacaggcgtgacccaccgtgtgcccggccactttttcatacacctttgatagtgtttgaatgtttttactgtagttgagtcatatgaaaacaaaggggacataaaaaatcaaaagaaaatatataatgaatgttttatcatatataaaatatatatagtttttttttaatggaattaactttgtcatttgaggaaaatgaggagacaagtctcaatcattttaggagatttgtttgccaaagtt

SEQ ID NO: 10438 - DNA, 6000 bp, Homo sapiens
attgctttgaaggactgttgatggaagtgtagatgttaaaggcgattctggccagggctcaggaagacaggaggagagctatagagaaagcttctgtcatcttagggaatgcatatatcaccaggaacagaatattagtagaaatatgaatattaagagctattctggtgaggtctacgatggaaatgaggaacatgttattggaaactggaggaaaggtgattcttgtgcaggggctaagggaaaacttcccctttgccctctgaagtttcagcaaaaaatcaactcacaaaaggcagattaactggagacaatgcatacaaatttattagcatgcatgggagagaatcacagagtgattgtccaatatcccattggggtatggacgtttatataccctacttcttaggggaaagggagataggggagtgcggatgatttttgggggatagtacttgatttttaggggaattcagtgggcttgaagaacatacaatggcctaggacagagtcttttggcccacagacctgacaatggtttgtgacaaaagtctgttcaggtgtattgacagacttcagtcttcctgcgatatgaatgcagttaatgaaaacacagggaaggcacccgagactgttgtcttctttggcaggtccagactttaggcacataagggaacttcagagaacaacttcatgctgtgctttgggagagacaaaggattgagagacaggagagtgtgggggaaggtcaaagagaccttaagacttctttagtttaatgtgtcaaagtgccatatcttgggatattggtttctgaaccccaatactacttacaacgtggcaaagggttcagctgaattgctgtgatattatgatacatatgtatattggttttaatccacggttcctggctcatatctcccatagcccttgttatagtcttttgttatgatgttggggcactttaggcctcagaaacaggtgtcaggaaacagaatctgaccttcttctgcccttctttcacctgcctacagcaggactataatctaattgtgagtcatagaccctcattgcagagatgatcctggcctatactctttattttttacttttaaagtatagaatgcatcatgaattttcatgtcatccttgcacaggagccagggtaatctctgtatctttccaatttaatagacgtagtgctgaagcaagctgccacatactgttgaggaaggaatgttgcacagagaggtcaagaagaatctgaagacacaggccttgctgggttcatgttaacaagtgcttctccgagttctgtgagctgctctggtaaactaattgaacccaaagaggtgtcctgggaaccccaactggaagccagttggtcagaagttctggaagaacacacgtctggtgtctgaagggggcccagtcttggaaactgagacctcaacctgtgggatctgatgctatctatagtgtctaaattcactgctgcttggtgtgtggggaaagcccccacatctttgatcacagaagtcttctctgttgattgttgttgtgttgagtgagagaagaggaaaaagcactttgagtttgtgttttctccaccaccaattgtgttctagtgttttgtggaaagtagaaattgcaagtgatgaacttaaatatttagctgcagagatttccaaagtgttgaagatgaggcctggcttctcctcggtacttatgtaaaatgtgagtggatggagataaatggaaggaattgctaagcaaaaaggaaacagaacttgaagatttggaaaattattggcctattcatattgcaaaaaataaaaaaggattttctggagaggacactaagggtgtggctggacaataacccatggagctagtcagccatctcattagaagtcagaaatagagatgggttttaccagcaaagacattgccaatttagaccaaaaggaataaagacaggatgaaacaaaggaaggcttttagaattttgttctacgggacaggacaatacagctcgcttcattctttaagaaaaatgattcacagatcatcagggttgccactcccaccacagcgggctgttggggaggcagggagtgaaagggtggagtctccttctcttgagcaggccaggctgcccctgcccagtgccttggggtgggggactgtgacaaagagctatggtgctggccactgcctggtgctgtgggggtgacactgctgacccagtgggcctacagggcagaatatccagccaaagaagattgttgtagagcattaagatctgatggaatttgccttgctaggttttgcacttttggggactgtcaccttgttcttttcagtatctctcttttggaatcagcacgtctatcctatgcctttcccaccacattgtatttggaagctgagaggaattttgcctcaggatgaaacaaacttcaagtctcacccatatctaatacagatgaaatttagatgacacttcagacttggaattaatgctggaatgagtgaagacatttgggctgctgggatggggtggatatattctgcacgcgagaagtgtgaaaggaaaataaatcttaggactcccaaatcactaagccaaggaaaaagtcaagctgggaacaatgtcaggcaaacctgtcccccattttattcttttcttctttttttttttttttttgaaatagagtctcactctgtcgcccaggctggagtgcagtggcgtgatcttggctcactgcaacctccccttccgaggtttaagcgatctcctgcctcagcctcctgagtagctgggattacaggtgtgccaccacgcctggctaattttttttgtatttttagtagagacagggtttcgccacattggtcagactggtctcgaattcctgacctcaggtgatctgcccgccttggcctcccaaagtgctgggattacaggcctaagccacaatgccaggccaccatcctattcttaaataagatagctacaaagagaaacagctacataccttcctcacaattttcacacaaggaaattccttgtggacaaaggacagacagaatttaaagccatccctctgaggctcaccggaaacaaatgcatatctgattgcttcttctgccctattgtttatgtaaaaatgtagattcactgagctagactaaattgtgtattcagtggaaggttgatcaaggactcaaaagaatgtaacctcttctgtttcttatctacttataacctggaagcaccaccctttctgcagcttggagttgtcttgccttaccggaccggaagcaatgtacatcctacacatattgattgatgtctcatgtctccccaaaatatataaaaggaggctacacccccaccaccctgggcacatgttgggacctcctgaggctgtgtcatgagcacgttcttaagcttggcaaaattaaccttctaaattgactgagacctatctcagatatttcgggttcacagaaagatacgaattttacagcagctggagactaacggagtcccaaacgacattaatggccagaaccacttatttgatttccctcatgggtgcccatgagtagggtttgatagacctacctacccatcatcttcaggagtgcctcgccctctccaacacttagcacttctctagtcaacctgggtttgactaaagaggctcagaaaaaggaacagatggacgaggtttgaggctgggattctacaacgaggctttgctaaaacttgctgagggatcttaggcaagtcatttctctctcattatcagtttctccacctggaaaataaggtgtgttgcatcaggctctggagttatacggatgtgggtttgaatctaggcactgacattagctgtgtaatcttgggcaagtggtttagcctctcaggtttgatttcctcatttctaaaacagggatagtactagtacctaccccatgggattactgggctaatgaaaagagataatgtatgcagagtccctggctcataaaagttattttctccgattaattaaataagtgaatatgtgtaaagtgctgaagacagcgtttgacacttagcgttttatcagtcttagctatcatgattttcttattctagtacatagaaagtcctcaataagtaacagtagttattattatttttggtcacatgtccctgtgtttccctccaaaaccctaaccatccccaattctggttttctccccgcatgcagcccaagggttttcacgtcccagtgcgattgtctgggctgtttcctccgcctgatgttccatttctcctcctcccgatctcagatggcttctcctctgggattcctctggtcttcatcactccctcctcccaggcagaaggaatggctcctggatttgtgtcctgcttaaaaaaaaaaaaaaaaaaaaaaaaaaaaaaaaaaaaagaagtccatatagcacttagttctttgtgcctggcggttgggttaactctttctgagcctgtctccgagagtggcggcccccgggggacggcgctgggtgaatcacctctgagtgtcacccaaggcgtctggcacagtgcgggacagtaaacgggccgctgtgcggagaggggtccagtttaactcctagaagcccgagtccccgaccctctacaggccgcgtccaccacaaatccctcctcctggggggctcggattctcccttccccgcggtctccctcacctgagccagccccgctcccccgagtctcgccagctcctccccggcccctccctccagccccctccgggctggagcctcccctcctccatcccctggcggaggcccgcggggctggaggcggagcgtctcggcagagggctgggagccgggtggggaggcgcggggcgagccggggggttccagacgcgcctccaccgccgggcagtgggcaggtatggctgagggcgtgtgagcgccgagcgctaagggccgccgccaccatgccagggggcgcaggcgccgcccggctctgcttgctggcgtttgccctgcagcccctccggccgcgggcggcgcgggagcctggatggacaagtaagtggccaggcgcggggggatggaggctgggtggcccggagacctgggagtagccttgcgggtccggagcgctgggaccgcgacccctgcgcctcccgcaactccgcggggcctgcgcccccgccgtccccagcctgggagcccgggctttgttcccacgttctgcgccctgggaggtggcagaggtcggggaaacccggcgcagccagaaaacagccggtccgctcactggctagccttcccttctcgccttctccttcctctgtttttctgcttttggcttctctttccgccgttctcggggcttatcctcctccgttttctcacggtccctcgtgtccgctccgcctctctctctgtctttctctctaccgcccgctgcactcgccaacgccgagcatcccgagcgccctgcccgtgtggcctgggagcggcttcctgggaccaggctcggtgcctgccacactggtggggtaggacataaaatgcccgcggcagactgtggtagccttggctaggggatggctcgctgggtatctgcagccacacacttcggatccccgagctggcaggagccctactgaaggccaagtcaaacgcacccatttcacagatggggaaaccgaggcccacaaaagggaaaggacttgcccaaggccacgccacgggttgaggtccgcggtggcactggaaaccagggctctctttccacgccaacccgacggccgccttctttggtcctcagtttccccttctgtgaagcgaaggggtctgactcgatgtttccagctaagatgccgggtgatgtccgtgtttctcaggactagtttcccagacaccaatcccctccccggctccatccctcgggggctataagcagatttcgcg

SEQ ID NO: 10439 - DNA, 6000 bp, Homo sapiens
aaaagttacatttattgtctgaaacatgcattctagttacttagtcaggtcggccaaactttatcttcttttcactaacatcgtaagctaatcattttgtgtataaagtccgctttaataatcccaaagagtcttaaatacatcatttgatatacttgaccgttctgttgctttatttagtcttttatgagattaagcttccctttgatagtgtgccttctgtattcactgacttttatatactccaaataaagatttgttgaaaagcatcattttgacatcctcctcttcgcagtgcataaatcacccacagtagagcttaaaagacacactaaattgggaaacaaaggtgcttttgtgttgggtttacattctcagcatgatctaatacctgattgcatttacatttgtgttcttgaggtttgtgggggagatttttatagaacaaaatagaaggctttgtttcaccgtagcttcaaataagaaaataggaaaaactccaaacctctagcaaaactgtaagttcctctgaaattcacactctgtgcaaagtgaaacactgagatttcagctccattttactctttcctgttctctcagcaatgacgttcaaaagccagtgacctatgtctgttaggaaggaatctcaggcagtgagttatagaatgatagacaaactggtccaaccctctggttttcctggtgatcttaaacaaaatcacctccttggttattctcaggttctctccttctctacctgttagtcgtttttgctttgctggctgggtttctgagccttttttgtatgttatgatgtctagtctgttttctgctactgtaacagaataccaccaactgggtaaattataaacaatgtaagtttatttggctcatagttcctggaggctgggaagtctcagatcgtggggtggcatcataacttggcagaagaagagactacacaagaggcagggagggaatggaggctgaacttatccttttatcaggagctctctccagcagtaactaacccactccagagataacgagataatggcattagtccacccaggagggcagaaccctttggcctaatcacctcttaaaggtcccaactcttaatcctgtcacaatggcaattaaatttcaacatgagttttggcagagacattcaaaccatagcatatgggtagggaggagatttaatattgaaatgacagaaatttacttgtggtcaagaaatagctctcaatcactaccaaaatggtatgtgttgatttgatcacctggacttgtcagataaatgggttgagagaaaaagataaaggtcagtatgggctagtttgaaataatttaggtgatttttcaagcaaaacaaaaaggttttttgagcagctggtgggcttgagagaaatgagaatatgaagtatgttatgaatgttcctttgaacaaaattttgattaatatttaaatgttgtgtcaaatattttcccactgttaaactgctgttttcttgagcatgataccacctgaagcccaggtgttgtgctgtgtttgtcatccttgttttttaattacaagagcagtggcattgttgttggctctgagaagacttgggaattgggggcacttctgaaaggcagtcattagacagaaattttatccctcaaattggccttatccttacctccagagtctgctatctcgattttggggtggcagggcaggtagtgtgttcttttgaggttacttcctgaagtacattttcttgccatatggaatattcctatggagtcctgctttgcccagtccaattccactggctcattatcccacagatcaggatcctacccgttcctgctttccaaggttaatgctgaatttctcctacctattttatttctgggtagtttcagtggaaaattgcagatgccagggtagaatgtcaggagttaaatgctcaggcttacatgacaagtctcgaaccagaaacatatctttaatttgtgtttattagtaaaagggaaagaaagaaaatgaaacaaagtcaagaagtttggagaatgacggccttggggaaagtgatctgaaagtgttacgttaagcgtgacttagggctctacagaaatgcagttcttggggaatgtgtgtggcaacaattgcgtctctgacccccagtctgttggacgctgtgtgtgacggcgaggccatgggtgggaggagacagctgtaagcacaggcaccggagggtctgtgccagcaatatggtcctttcatcttaagccaaggtgccaaaggccgggcgcgatggctcacgcttgtaatcccagcacttggggaggccaaggccggtggatcacctgaggtcaggagttcaagaccaggctggccaacatggtgaaaccccatctctactaaaaatacaaaaaattagccggatgtggtggcagacatctgtaatcccagctacttgggcggctgaggcaggagaagcgcttgaaccctggagacggaggttgcagtgagctaagatagcaccattacactccagcctgggcgacagagcaagactctgtctctaaataaacaaacaaccaaagtacagtttgtgctggcgaactaaatggaattattactttggtttagggttttttttttttttcccagagaaaattcttgcttctgatatggtgcatggctgttgtggagattggactgttagtttttttttttttttttttttgagacggggtctcgctctgtcgcccaggctggggtgcagtggcgcgatctcggctcactgcaagctccgtctaccgggttcacgccattctcctgcctcagcctcccgagtagctgggactacaggtgcctgccaccacgcccggctaattttgttttgtatttttgccgttttagccaggatggtctcgatctcctgacctcatgatccgccctcctcggcctcccaaagtgctgggattacaggcgtgagccaccgcgcttggcctggactgttggtttgttaatgggtcccaggggttcctgcctatggagggctgacggggtcctaggtttggtgccaagccctctggaaacaccgtctcagttaatagttatgacaatcctgttatgtcctcaccgtttcacagaggaagaacccgagctcagagaggagagagtgcacatgcagccgacagtggcagggcaggaccaggaagtcaggcagtgtgacttgggggatccatgcttattctcctcccacctttcggaaggcacaggaaggcaccacagtgtcgcaatttatgcacaattagtgcaaagtctcacctgtgagcttgcctggggcaaccaggggaggctgggggctccttctccaccaggccccgctgcctccatatgactcttccctgtattttagccctgtaggtaattttccagtttgtgggctcctgtaccacatgcggtgagttaaaagaacaggtgggcagcggcgcggctcccgcgtgagctgtgtgactttgagcaggccccactacctttccgagccgcatttccacctgggcgaagcgggttgagccggcctggcggggaaagattcttttaacgggggaacaacgtaaggcgtgcaccggggaacacggatgctgctgagtcaatgcccgctctgccgttctctttgagagtaaggcttgcgtctcgcctgctctagcgccccaggtttgaacgcagtgggcgcgcaggaggaaacatagattcacgaatgcaatgccagcaaagtaaaatttttcacccttgtccgtttttcagggtgtttcaagcggaggagtcctgagtggagaagattccgcttccctgttttcaggttctggcagtcatggaccgggaagagcgagtcggggcgcgggtccctggcggtcgctggaacccttgtgagtgaggttggtgcccgcgagggcacagcgggcgctcgggaagtcgcagccgccggcagagggcgccccgggcacacggagcgcgcggcgctggggttggggcgctcgggaggtgcggggcaccggctggagtccggcgttgaccgcagccgggacgcgcccgccacctgggcggggaaggagtgagtcccctcggggcgcagcggcgcgcgctggcccggatcccagctgcgccgcgccctccctgcgagcggtgagtacaggcgcccacgggcatctccaaccctagttaggggacacttggagacaacgcaggtcggacgtccgccggccgttctaggagttggtgtgcggggaatggggggtgctcccgctcgcttagggctttgggtccggctaggggttgaccccaagaggcgctggatgtcggggctgagctttgctttcaggggactcaagcttacttgaggttctgacattggatttgcctcgcgggccctgcgcgtgctgcgcggggatccggagactggcgaggtaaccagggagggcaagcactcaccggggcgtcctccgcccacctcgcccgcagaaccatccagggggaccacgtgcggctgtcgcccgcaactctgcctgtcaagcgaggaccgcccccagggcaggggaggggacgcgcgggcggggtgggctgtgccccgcgggaaccccgccggcctgtgcgcttgctggtgccagctcggctcgctgcctcgcattgccacaggctcctgagaggtcgcgggcagtgcctgcggggaggcgcggggccctgctctgtagggctgaaggccgcccgaggttcgccaaggctctgggctctcgaaaggaagccaagaaaagaagctgcccaggtgaccagtcctgggagtgctctctcccaaggaagctccgagcgcccaggagcccttagccggggtctagtgccctttgaacaatctccagctcttcaaggaagtgggctgccgccgcctctcttgggacctggcctgggatcctttccccaaacgcaccccggcgatttttgcgcaccgggagccgaacccctgctgcgcgcagctggctgggctcaggcgcgcttcctcaacgtttcggagccgctgcccccagcgaagtccacattccaagctccaggggctttgagagagacgaccccaaggcaaggtaggtggctcggacgggctcgccctgggaattattaggttgggcttgacgtgagtaatgatgccatctgcttaagtcttggagaaagaccgtgtgttttccttttgctttttaaggcgtttggagagctgctgaggagccaggggcttggaggagcgagaagacatgtattttcagctgagtctcagaaggggagaatctcctgtcaccaccagaaaagcaacagccccgaaatgtgattgcaactgactagcagagcagaggcccaggagtcactggattgatgatttagaatatgctaaaaagccagtgctttatttggggaattcaggggctttctggtgcccaagacagtgacctgcagcaagggagtcagaagacagatgtagaaatcaagagtgaccatccacgggattgacttggattgccactcaagcggtcctctcatggaatgttggtgaggccctctgccagggaagcaatctggctgtgcaaagtgctgcctggtggggaggactcctggaaatctgactgacccctattccctgcttgggaacttgaggggtgtcagagcccctgatgtgctttctcttaggaagatgaggactctgaacacctctgccatggacgggactgggctggtggtggagagggacttctctgttcgtatcctcactgcctgtttcctgtcgctgctcatcctgtccacgctcctggggaacacgctggtctgtgctgccgttatcaggttccgacacctgcggtccaaggtgaccaacttctttgtcatctccttggctgtgtcagatctcttggtggccgtcctggtcatgccctggaaggcagtggctgagattgctggct

SEQ ID NO: 10440 - DNA, 6000 bp, Homo sapiens; identical to SEQ ID NO: 3435

SEQ ID NO: 10441 - DNA, 6000 bp, Homo sapiens
atgaactccagttttaaaaattttagctagggtccttggtttgcctctttctcacacatgcgtgtccccactgcaaggacttatattttcttctaagcgtgggctcactaagacccctcaacttgcccaccattctgatttgagctcctctttctctctttttctttcttttcttttctttacttttttttttttttttttgagacagagtcctgctctgttactcacccaggctggagtgtagtggcaggatctaggctcactgcagccctgacctcctgggctcaagcaatcctcccacctcagccttccaagtagctgggaccacaggtgcatgtcaacgtgactgtgtaatttttttttttgtagagatgtctcctatgttgcccagactggtctcaaactcctgggctcaagcaatccacccaccttagcctcccaaagtgctgggattacaagtgtgagccatcgtgtccagcctcagctagtctttctgcagggacaaggtgatagccacttctccatattctaccctctgccccactgccccttctagggctgtgacctgaactcttcagtggcagaaactgaatagctcttcaccacaaattcatgtccttttttcctgggcacgtggctaactttactttcccaggttcccttgcagtcagatgtggacatgtgaccacttcttgccaattgaaaatgtgtgggatgacatgtgtcatttttgagccaaggctttgaagaagtaagtgtgtgccctgcaccctccctctttctccttcagctggatggatagagaagatgaggaggcccaggggattgtggaaccacaagaaggaaaaagcagggtctgtgtatcagtgcctgaaggcaagccacccatcaacctggaaaccagcttcagaccattatgtaagtgggaagtaaaattttttgagcctcctgacagatgcacaaaccttgtaaaaatagttaaaaaaaaaagaaacatcaaaaaaattttcaggtcattatatacattagggcctatttgttatagcagctagcactgccctagttaacacacttcttctcccagcactgcctcacctctctccagacaccttgcttcaggccacacagacagagagattcagtcagacttgatgtgtgaaaggggttacggtggaggttgcttttgggcctggaccattgccaatggtggtcttaataaggtgtgtgactgtttcaatgtgcctgtgggggttgtagggtgtgtgatatgggtgaagacttcctgtctgctgtgccatggatctgggccatttcctaggtggctttacagtcctagtcctcacaaccactttgtgaatggtgcttattattaccatttcacagatcaggaaactgaggctcagagagaagtgagttgcccaaggctatacatcctcttagagatctgctaagctgtgagtgtgcttggggtgcctggaactgggctttggccaccacagatgcccacagctcatcttcttcctgccaaaggacagtcacagtctctgcctgggactccctttgaagttcatactctcctgcagagacacctcttcccttctctccaccatggatgccagttctagctctgaccacatcttcaccacagctagccctggctgttcccatctcttagcccttatctagtcttctccatgccatgagagtggtggagtacctccacccacaaagcaccatcctcgacttctcccttcctggctgcccacagggcatcagttcctgatttagtctctggctgggacttcagatccttcttctctgtgaagacctccttggcttaggcctcaccctctctcccccgatcatgatgaatccagtctccctattatccccgctccaatctcttctcctcaccatagctagaggaatccacattggtcactcccatgcttagaaatatcccattgagttctgggaaaaggccatgttccttacttgggaattgaaggccctttgagttttggcttcagctcccccgcagcccccaactccaacttctcagccattccaaactacttgtatttcatctgctctcacacatccctccctagattgcagctcctcttctctctgctgagaatgcctttacctttcccggaaaactcctactcattcttcatgacccaattccaggttctagaacaaatattcattctttcaccagttacttattaatcacctcctatgtgacaagcactattctagatgccagggattcagtagtgaccatagctgacaaaaatcccagccccatgaaggtcccatggaatgtgcatgtttttgtttgtatgggtgcagataaatctctggaaggggacactccttgcgaggggagtggcagaagacttttgttgtgtcttttcttttcttttcttttctttttttgagatggagtttcactcttgttgcccaggctggagtgcaatggcacaattttggctcactgcaacctccgcttcctgggttcgagtgattctcctgcctcagcctcctgagtagctgggattataggtacccgccaccatggccggctaattttttgtatttttagtagaaacagggtttcacaatgttggccagggtagtctcgaactcctgacctcaagtgatccacctgccttggcctcccaaagtgctgggattacaggtgtgagccaccatgcctggcttgttgtgtcttgtatgtctgttctctctctgtttccatacacaccacaagaatgtgtgacttttttgagacagagtctcactctgtcactcaggctggagtgcagtggcaagatcttggctcactgcaacctccacctcccaggtgcaagtgatgctcgtgcctcagcctcctgagtagctgggattacaagtgtgcaccaccacacccagctaattttttgtagagacagggtttcgctatgttggccaggctggtctcgaactcctagcctcaagtgatccacccacctcggcctcccaaactactgggattacaggtgtgagccaccgtgcctgaccagaatgtgtgactttaataataaaaaagcgaacgaaaaatatatgaccaagaaaagattcagcactcaatcctgaataagtccattcattcaagagggcagtttctaaaaggagcaagcaaccaacatccctccctgtgatctacaacaggagtcattgattcaaatgtctggaggagccaggcaagtgctgtaaacgagtgaccaggtggggaccagcttagaagaggaaggcattggtggaggggcagtcccattcagctccagcctattgttctgttgtgggaatgtgtgcctagatcttttgctgctgcttctttttttttttttttgggtaaaaaaacggaagtctggatttcttttcttcttcttcttcttctttttttttttttttgtagagacagagtcttgctctgtcgccccggctggaatgcaatggcgtgatctctgctcactgcaacctctgcctcctgggttcaagcaattctcctgcctcagcctcccgagtagctgggactacaggtgtccgccaccacgccgttaatttcttttgtattttagtagagacggggtttcaccgtgttgcccaggctggtctgaaactcctgagctcaggtaatctgctcgcctctgcctcccaaagtgctaggattacaggcctcagccactgagctcagccggaagtctggatttctgatgtgaatgtacatattccgactttgtgtgtgtgtgtgtgtgtgtgtgtgtgtgtgtgtgtgtgtgtgacagagtctcgctctgtcgcccaggctggagtgcagtgacgcgatttcggctcactgcaagctctgcctcctgggttcaagccattctcctggctcagcctcccgagtagctgggactacagacacctgccaccacgcccggctaattttttgtattttttagtagagacggggtttcaccgtgctagccaggatggtctcgatctcccgatctcgtgatccgccggcctcagcctcccaaagtgctgggattacaggcgtgagccaccacgcccagcctctatattctgactttaaaatactggtagttaagccatttattagaatattggcaggtaaaacagagctctattcagctgcaggccaccagttttcgacctctgattcacagctttcctgggccttccatggacgttacttgctgtaccaggcactgcgctcttttgcatagggatgagttccagtcatcactggggtcccaggccaggatctgtgtctgttcctcttgcttcaacccgactaggcctgaggagttgagggtagtggaggccctcaaataattgggaattctgagtctccaaaggcgcgaagctggggcgcctgacggcaggcacggcttaaaggcttgcccagggccacccggggaggacaagggttggaatgcaggactccgccttcaattcagagctcctttctccaggactagaaaaggttattccagagacgggacttgcggccagaagcccaagacgtcctagtcttcgcgaatccgccccattagagcgaccgacaaaaactacaaattccagcatgccccgagtcgcggacggccctcgcgctcccgccggctccaaccatccctctgctcctcattggctcgcaagcctaacgtgctgttccgtgactggttacagctcttgtcgctcgaaagaacccattgctggggctggccggcgtgtgccttggagcctctaaggagatgaaactgcactcaaccaggatgagaggctgcccggccaatgcagctgccgccccgtctgctgcggaggctttgctttttgactccctggcgacagtaaagttgaagagcttccggccggaggccaatagatgggacccccggaaggcggaagttctagggcggaagtggccgagaggagaggagaatggcggcggaaggctggatttggcgttggggctggggccggcggtgcctgggaaggcctgggcttctcggccccggccctggccccactacacctctctttcttcttttgttgttggggtctgtgactgcggatataactgacggcaacagtgaacatctcaagcgggagcattcgctcattaagccctaccaaggtgaagcccttggggcgggaatgagtgaagagtgagggcgaggctgaacagggctaggggaaggcgtgccctttctcctgagcagagcatctctgtgggtttcctgcctctggtgaggccagtcctggcgtggcctcttagcacctgtctcttcccacaggggtcggttccagctctatgcccctctgggacttccagggcagcactatgctcacgagccagtacgtacgtctgacccctgacgagcgcagcaaagagggctctatctggaaccaccaggtgagtggttctcaagaggataggcgtactgtgcggttggctgctagtccctgcctcccgagcagctgagaccccagcttcgtttataggtttgcacctccgtccctggccttttcctcatctcggtcacacccaccaataataagaggcgatgggtattgggtacttactatgtgtcaggagctgcgcttgacactttacatcctcctcactttaaaagccatgcgagatgagtaatgttatctccattttacccactgagaagctaagactcaggtttgaaagggccttacccaaagttacatagccagaaagtagtggaactgtcaggctgtctgccttgaaccccctcagtaatgggaagaaccgagcgaactggatctttattgggtgttttgctgtgtattaggcactgaccttgccatgccttattgcatttaattttcaaacaagctgtttgaaatagatggctttcatgactatacaaagataacccagctagcaaatgtcataaacagtatttaaac

SEQ ID NO: 10442 - DNA, 6000 bp, Homo sapiens; identical to SEQ ID NO: 1185

SEQ ID NO: 10443 - DNA, 6000 bp, Homo sapiens; identical to SEQ ID NO: 1192

SEQ ID NO: 10444 - DNA, 6000 bp, Homo sapiens
ccagacaatgatgctggaccgttcattcatcatgactgcttccttgcccctccttagtttttgttttgttacacattgtttcatttcttccttgctatgtaaagccctggttttagttggtcagggagatggatttgtcagccacagcacctgattaaaacgttcctccttgacaatacttgtctcctctgtcattggctttctgtatggtgggcggccggacctagacggaacctgtgatgttttggtgacagtatcagtacaaaaatagacaaagctgagaaaatgaaccattccgtgtagatcgttaatgtatgactgagggggagctagagaaaagtgtagaaagcatgaccttctcatcatggtcatgagatagcaagataccttttttttttttttttttgagacggactctcactccgtgacccaggctggagtgcagtggtgcaatctctgctcactgcaagctccgcctcccaggttcacgccatcctcctgcctcagcctcccgagtagctgggactacaggcctccgccaccacacctagctaacttttttgtattttttggtagagacggggtttcaccatgttcgctaggatggtctcgatctcctgacctcgtgatctgcccacctcggcctcccagagtgctgggattacaggcgtgagccacagcgcccggccagtagcaagatatctttacggggtgaaagacagaaactcgacacatgcacctactttacgctacacagagaaggcaattccagggcccgcaggtctaaatatgaaagagaaaataaaacattaaaatttataagtgataaaaaatagtaaatatcttcatgacatcaagataaaggtttctttaaaagaacacaaggccgggcgcagtggctcacgcctgtaatcccagcactttgggaggccgaggtgggcggatcacctgaggtcaagagttcatgaccagcctggccaacatgacgaaaccccatctctactaaaaatacaaaatttagccaggcatggtggcacacgcatgtagtcccagctactcgggaggctgaggcaggagaatcgcttgaacccgggaggcggaggttgcagtgaaccgagatcttgccactgcactccagcctgggcaacagagcacggctccatcgcaaacaaaaaataatagtaataaaataatgagataacacaagtaacaccagccataaggaaaccaatttgtaagcgtgctgtgttaaaatgaaaatcttctgtcttcatcctgcctcccaaaaagagagcattacggaagtgaaaattcagaccccgaatgagaggagatgtgtagcacaatgtacccaagttccttttccacagatggccttggcagtgtctgccatcccacatgctcttctgcatgtgaccttgcctctctctaataattgtggggaacatgtcccctaggcaggctgtgacttcttcgagactatctagtttccacctagttctcttggatagtcactctggggaagccacctgctacacaagaacttcaactaatgtgggattgtcatgctggaaagacaccgaatgggcgcactggttggcagccccagctgagcttctggacaacagccagcaccgaccaccaggcatccaacccagctaagtaagcccttgtcaaattcctgactctcaaaagcatgagcaaaacgaaatagctgctgctttgccccacaacatcttggagtacttcattatacagcaataataaaggaactgataaaagactcatatgcagaatatataaagaactacaaatcaataagaaaaagacagatggggagtcgtaaagagcaaaagacttgaaatctaaatggccaattataaaaatgtgctcaaccgcaatggtaattaaggaaaagctaatagatcaggcatggtggctcacctccgttaatcccagcacttcgggtgactgaggcgggtggattacccgaggtcaggagtttgaggccagcatggctaacatggtgaaatcccgtctccactaaaaatacaaaaattagctgggcatggtggcgtatgcctgtaatcccagcttctccaggggctgaggcaggagaattgcttgaacctgggaggtggaagttgcagcgagccaggatcgcgccattgcactccagcctgggaacagagcaaggctctgtctcaaaaaaaaaaaaaaaaaaaaaaaatagctaatgaaaccgcaatgagatgccaatgcaaaccaactagaatggccacattttaaaaaccaaaactgacaatactgtgggtaaaggtgtgcggcagcggtaactgcttacgctgccatgatcatgcaaaatggtacaaatcacttgaaaaaatacttggcactggctaccaaagttgaagacagcatgtgtacaccaggaaacacatacaagagtgttgtggcaaaagttggaaactggtaaccactcaaacttccattaatagtagatggacaaattgtggtgtatcctactgtggaaaactatgcagttacgaaaatgagcaaagtatagatcatcacagcaatatagatgaatctcactaatggtgttgagcaaaagaatataaatggtatgaaggcactgagataaagtggaaaaaaaaaacaacaagcaaaatgtgagctaaactgtagggacacaaacacacagagaggagtaatagacactggagactccaaaagcagggagggagggcaagaggtaaggactgaaaaatcaccttttgggtagagtgtccactgtacaggtgacgcgtacactaaaagcccagacttcacctgtacacaatatatgaattaagaaatctgcacttatgtcctctaagtatactttaaaattttaaaagcacattctggctggatgcggcggctcatccctgtcatcccagcattctgggaggctgaggcaggtggatcacttgagcccaggagttcaagaccagcttgggcaacgtggcgaaaacccagctatgcaaaaaagtcactgggtgtggtggcgcacatctgtggtcccagctacttgggaggctgaggtgggaggatcatttgagcccggggggtgctgaggctgcggtgagcagatatcatgtcactgcactccagcctgggtgacaaagtgagaccctgtctaaaacaacaacaacaacaaaaaaaaaacaagtatattctgggcggggcacagtggctcatgcctataatcccagcactttgggaggctgaggttggcagatcaggaagtcaggagtttgagaccagcctggtcaacatggttaaacccccatctctactaaaaatacaaaaattagccgggcatggtgccgggtgcctggaatcacagctactcaggaggctgaggcgggagaattgcttgaccccaggaggcagaggttgcattgcagtgcagtgagatcgtcccactgcactccagcctgggcaacaaaagagagactttgagaaaaaaaaaaaaaagtacattctgaaaaaaaaagcaaaacatatattttgatgataaaatgataaacaaaagcagggaaatgataatgccagggtagtgggcatcttctggggttggtgaggggtttgtgatgggaagtgaggggatgtggggatgtcattctacatcccttggcctggagaatggaaacacaggtatttgttgctttaaaattcaggtttataatatgctgatatattatgtactttccataagtgtgttacatctcataatctttcaaagctaaaaaaaatcaatatatgattgataaatacctaacttcatgtatcgcttggttacctagtttccccaaccttatttgttaaattatctacactatccgcactgatttgtgattccagcttaataatatagccacttcttacctggattggagagagctggtagtggttattgaaaatctactcttgctttttggcgaggatgaaagggctttggggggcgggggtggggggatggaaaatgtgaatgaaacgaaaagcagggaaggaggttgagacagtcatggtcatgggcttcattattaaacaggaaaattctagagacaaactgaaaagagaacggaagtctgtaagagggttgccaagtcagaaagcaaaagcaaagtgtcgctttattaaaaaggtgggggcgggtcctgattgagctgagaacaaaacatctgggggagttctaaagctaggaggccaggcctgcagggagggggtcggtcatcccgggtgtcccgctcacgggtgcggcttccgtcgacactgtccgtcgacactgtgcaggtaaacactgctgaacgggttttgtttttgcttttttttttttttttttggctcccagactggagtgcagtggcgcgatctcggctcactgcaacctccttctcccgggttcaagcgattctcctgcctcagcccccccgagaagctgggattacaggcgcgcacaaccaagctcggcgtattattttatttatttgcttgtttatttttgagactgggtctccctatgttacgccggctggtgccactattttcaaagatgtaacatactatttttacaaggattgctttcttgtttagtctagattttaccgatggaaagaaaggacggaaaagagcgcgtgccgcattttgctcccctttgcccaccaggctccatcacctccggagcgcatcgcgagaccgtctgcgttacccgcgtccccgcgcccggagccgcccaggagggggcccggaccctgtggtgcggagcgcgcactgctcgggtgcaccggacgccccgcggcgggctgggagggacggggggaggggggcgcggggagcggcctgaatcccgggcccgcctccggcccccgccccgccccgccccgccccaggccagccggcgcccgcgcggacactttcagccccgagccgcggccgctcgggtcggacccacgcgcagcggccggagatgcagcggggcgccgcgctgtgcctgcgactgtggctctgcctgggactcctggacggtgagcgcggcgaacgggccacccgcccgagcgtggggctggccggggagggggtaccgcgcacctggggcgggcgctgagaccgctccgccgggtacgggcgggggacacggtggccctggtgcgcggacgcctgaggggagcacggcgcttggggcgcgggacctcgggatgaggaaggggcgggcggggaccgcagccgggtcagggccagggcggccgggccgcgcctcggcgcaggggtagctctcccggcccctgaatccgcgtctccgtcggtggctccgcgtcctcggagccgggccctgccgggctgcgcgctgagcccggatccttcgcgcccttactcgcttccccgcggggtccccgcgccgcgccgtcccgacccacgcgcgccggagatccatcccggccgggccccggacttgggtgcgcacttcccgacgcccagcgcctccgctcgcggtcggtcccccagagggcgctcgaggcgggcttccccctccccgtggccggcgacggcggggacaggggccggggaccaccgcgcgcccgaggcggacgggtgcaggtgcacgctggcacttgagacgaatcttgaggaggcgaatcgcgggctgtcagcgccgcagaaggggcggaaggccaggggtccccggatttgaggggacaggggcctcgaaggccagctgaggagcagaggcccccgcgggagggtcccctgcacaggagaggcggggttcggtttgtgttgggatgtggctctggcggggagagacgcagacctgaagcggaggcggaggggttggaaagagggactgtgggggatgagcgggcggcagagggagtggatggagatgtcagggaggaagctgagaagatgagctgggagtccccacggagctggtgtccctggaaatcaaagggt

SEQ ID NO: 10445 - DNA, 6000 bp, Homo sapiens
ggtgaatagatccaaggagaacttggattgaaggagtcttgcagatactgcattggcccttatggctctccagtccaatttcagtgtgcccctttgaggtagctgattaaagagggggtggaaggatgcttaagccttgagggcaggtgtctggctaggcacttttcttggagtgagtggtggtctttaccttcctgtgccatatgctagttatctctcccgctccttaagatgacgtttttttccagacatctcttcgccctttgtattttctcaggctgtattccctataaaagcagccctgtttgtctttatcttctcacttcctgtctgctccctccttcaattccaatttacctgtgccaagatgcctgcttttcccagggacaacacacagcagaaaggaggggtagagcacagtgttgggaattttgagagacagtagggtatggtggcctgggcaaagggcaggaggcctggcttctggcatgtctctgcctctccctagctcagtaacacctaggcctcacatgttccttgaggatgggtgacagtgaggtcatctgcaaactgaaaatcctgtacttatgccttactttccatgttaaatttttttcttccatccccttccccagtctttccttttttgccacaggagttttcctcactccctccagcggcttgagaggtgggcagtggcctgggtggagctgctgctcccgagctgtactttctcctctggtctggtgcctggggcagcccctttgaggccaggctgctcctttataaggtgtgggtctcaagatgggtgtaccaccttccccagcttcacccagcaaatttctgttgccagtctttgcttagacacaggggtcacagtgatccctcggggatacgtgatgccacggtgcctcctcagccatctctggtatcccaggtaccagggagttgcgtatttgcgtaatgcttctatcacgtgatccagtcaatctgttttgtctgttttccctcaccactttgttgtgaggagaacagagcagggattcttttcccagtttgaggggaagctacggaagccctgagtgggaagggtttgcctaagggtagagcggtaggcactgaaatcacctcccagtgctgtgctgtttccacagcatctgacctgaccaggccatctgggttctgctgcaaacctccagggagagaagctctgtgccctgccagacagcctctctggtagaacgtttcctccttagagtgagcaagcattcctctccctgaccttcccaccctcctgccctgcacctgacccttccatgagacagtcccttcaagacaaccattggctttttcacatgggcaccaggatgccaaggcatagcactcagcaggtgtcaggctacttagccaggagcagtgatagacttaaccagactgtgtgtgcattttttttttgagacagagtcttgctctgtcgccaggctggagtgcagtggtgcgatctcggctcactgaaacctccacctcctgggttcaagctattcccctgcctcagcctcccaagtagctgggactacaggcacacgccaccacgcccggctaattttttgtattttagtagagatgaggtttcaccatgttggccaggatggtctcaatctcctgaccttgtgatctgtctgccttagcttcccaaagtgctgggattataggcatgagccacggtgcccggccgtgtgtgtattttaactcaattaattatttatatccttctttattccaaaaagaattgtaggtggctaaccaaaagttacatttcacagacattgtttagtgattattatgttaatctttcctctttgacctggatgagatgaatttctgggtctccattgtggggtgagggagaggggcaagcagagatattaggaggcagggagaagggaaacaaaacactgatttaaaaaatttgcttttactttttttttttgagatggaatctcactctgtcacccaggctggagtgcagtggcatggtctctgctcactgcaacctccgcttcccaggttcaagcaattctcctgcctcagcctcccgagtagctgggactacaggtgcatgccaccacacttggctaatttttgtatttttagtagagacgatgtttcactatgttggccaggctggtctcaaactcctgacctcgtgatccgcctgcgttggtctcctaaagtgctgggattacaggcgtgagccactgcgcccagcctgcttttacttttactgatgttttcaagccaacatatgttttaatttaagggcatgaattctttccaaattgtaaaaagtgtcagggatcttgggcatggtttatgggagggcagtttcctggaacagttttcacttccttttcatcttttcagttctcttttgtcagtggtggagtgggcaggggagagtattgttcctctgcctaatcttgtgactgtttatcctcctggataatctggtctaatcttgtgactgtttatcctcctgttttttccttttgcacataatccaatcccaggcccacccccagaatcctggccccttgtttctatccttcttactccagtcactgctccccatgtaacctctatcaagagctcagagcctcttttccccaggtcagtttggcactcatttaccctggtttcttgcctctcagaccaagtgcttgcttttgcctccatgaagcccattctgattccctaaccaggccctttctttttgggatggtctcttgcagtccgggaatttctccttttggatcttcctgtgagccttgggatttcagccaagggtggtagagatggggtgtgcgttacagtgcacgaacagccgccatcctgtttccccttcacctgccttagatggagaagtatcagggtcagtggtgggaatctgatcttcccccacctttcagcaccccctgatgtctgtcctttctcctggaaggtgattttggctcctcatgtcttggatctacaaaccagtgtttcccagccttttcacttttaggaaacacaattgttttttcctttacgccttgacacctagtgtgagtgtgcagagcccccaggcccctgactcctccattaggcaaacatagggcagaggtgacagacactggcctctgactggcatatccgcctgggttcgaggctcctgccacagtgcgcgcagtcagctaaagtggaagccacgggcttcccgcacatcgcacactgcacacggcggcctcggtgggcctgcccttctcccactccacctccaggtctgggctctggccacttaagcggaggcttcacggcagcgcctgagaggagacagagccctctcaaagcactggcgctggaggatgtgtgcgggggtgttggggggcgcacaggagtgcccggtctaaaacctggctatgctccccaccaggtctggtggcttgcagcacgtttgcacttaccctgagcctcaaactagttatctgtagaatggggatgataacgctcactccgcagagctgctgaggcttgaaggacaggccgagggagggtttggcccgtgaggcccctcaccatgcctggtgaccccttagcagttttgatttaggtcctcgcctccacgcaggggcctgcgggtgcgcgcggccctttgtttctctagaaccctgcacgattcgtggtttcatgtagaaacaagttagtgagcagtcagtcagtaaccacaggccgcagagttccgggctgctccgtgctctggaacacgggggaggggttgatgtcaggggcgtgggtcctgatcacatggcagcagcccttcttggggaagtcagctacccagcagcctgtagtcctcggctacccaccctcaccgcctggggtcccatggtgagacagctgggtgggcatcaggcttctgcagagggccaggccggagggagctgggcgagggagtggggctggctcctggcttgcaccggcctcgtggaatccaggcctcagacctgatcgctggcgaaactggctctgtgcgctggagcccctggtcttctgcgtctgtcctcctcccggccagactttactcctggctcagcgacaggtatttgctatggaagagctgtccctccctcccctcggtgggcctgggtccacctccacctcctcttcaggtccgcaccttcctcccctttaaaacaccagccgggcgcagacccgttctaggcttttccatggtgcttccgccaaagcttgtgaccgagtccttcccgcctagggctggtgggcctcccctgctggtaggtctctcttcgctttctttactcagaactgaagctctcattccccacccaccaaggaaaaacaaaagggaagaagccacagctggccccggcttgctttggcacaggtgtttccccccggccccccgtcgggcaccctggttcctgttctgtccctgccccacgcgaccctggggctcccacccgggctcctcagcctcccctgggttggggtggggggactggctcccagcccttggcctagggtttggtgaacgcctttcctggactgcgggcccacttcaggcgcggctccaggctgggcagctgcgctggagggccgagggcaggggtggggtcgggcgtccaccctcagggttgcgccagggagccggaaagccgactcccgaagttggggtcctgggaaaacttgggtcctgggttgactgagaagcggcggggaaaggaggcgggccaggaggagggggcctggcggacgccggccggggggcggggcgcggcggggctgtcggtcacgcccctcagtccgccccgccccgccccgcctgccggggaagggccacgttgcccgcccggccgtccggccccggcgcgccgcagaaagggctggcgagtcgaaaggcgaggcggccgcggcagcgcttgggacgcgcctgggcaccgggctcgctccctgcgccccggagcaggccaagttcggggccaggacgtcgggaggacctggtgagtaggtgtccggggacggaggtcagaccgggggaggcctcgcgggcgccgagagggagcccaagggacgtcgggtcgccccaaagccccggtgcccatgagtgctagcgagagggggcttggctggggagcggcccggtccgacccggtgccagctgcgcgttagtcccttcccgagccgagaggttggaactccgccttctgctttcggaatcccgggcctccagctgttagaggaagggcgggctccgcggactggggaggatgttgtgaaactcggccccgggcgtccgtgcgtgcggggcagggagggggtgggattggggagtggcctttcccccctaacctcactccagcatcctttccccaagttaatagaggctgattctcctcagcagaaaggaaatgttgattcagtgttgaaatatatatataataagttggcaagaaaacttttcttcctgtttgctaacgtgtgtggagtagagagccccgggacgtgcagtgcccgcgtctgataaactctgaagtagagggactgtggctggccggctccctgaaggctgaagcttcactttggttaacccttgctgctgtagtgggtctgccgttttgttttagaacatcactggctgagatgttgcccagctttattttcagtcatttacggtattttttcaggccgtgtagcctttgctcttacgtgctcacatcatccaggatctgccttccatcagcaatcactgcgtcctggtccttcccaattctggggaccattgagctcacccatttccctgcttctgtgtctcattctcactgttagaagcactgcggtatgcctgacctcagtggcctgtgttaacaagggaaactcattactgttcggggcagtagggaaattgtcactgtcgtcagtatccaggcagtgggaccttgt

SEQ ID NO: 10446 - DNA, 6000 bp, Homo sapiens
gaattgagtactatgggagttaggtacatgggagttaggcattatgagggttaggtactgtgggagttgggtactgtgggagttgggtactgtgggtgtttggtactattgtagttgagtactgtaggagttgggtgctgtgggggttgggtactgtgggagttggctactattgtatttggctactgtgggatttgggtactgcaggagttgggtactgtgggagttgggtactattgtatttgggtgctgcaggatttgggtactgtgggagttgagtactatagtagtttggtactgtgggaattgggtactgtgggagttggggactgtaggagttgggtactgtggcagttgggtactgcgggagttgggtactgcaggagttgggtactgtaggggttgggtactattgtagttgggtcctgtgggagttgggttctgtgggagttgggtactgtgggagttggggactgtgggagttgggtactgtgggagttgggtactgcaggggttgggtactgtggaggttgggtattgtgggagttgggtcctgcgggagttgggtactgcgggagttgggtacggcaagggttgggtactgtgggggttggatactgtgggagttgggtactgtgggagttgggtactgcaggggttaggtactgtggggattggatactatgggagttgggtactgtggcagttgggtactgcaggggttgggtactgtgggggttggatactgtgggagttgtgttctgtggcagttgagtagttgggagttgggtattgtggcatttgtgtactgtgggagttgtgcactgtgagagttgggtactgtgggagtggggtactatggcagttgggtactgcaggggttgggtactgtgggggttggatactgtgggagttgtgttctgtggcagttgagtagttgggagttgggtattgtggcatttgtgtactgtgggagttgtgcactgtgagagttgggtactgtgggagtggggtactatgggagttgggtactgcaggggttgggtactgcgggggttgggtactgagggggttgggtactgcggggattgggtactgagggggttgggtactgtgggagttgggtaccgtgggggttggatactgtgggagttgggttctgtgggagttgtgtactgcaggagttcggtactgtgagagttgggtactacgctttgttttacatatacgaatgctgggcctgagggcactaagaactatggggccagtggcccagcaaatgtggtccaagttggttttggttgctaccccgcaacctggttgcctctgcagaagtttctagaggcactggggagaggaggaagcctcaaggccactggccccaggcaccctttaagttgggccccaaggcccctgggaaactcaggtgtgtccagtggggcttgcaaggggcagggaccctccacacacatctgggctcatgcctccaatcgtctttggtgtggactctcccacaaagctcattcagaagacctgcccttaaccatcccacgctcattctcccttgctggtccttggggtccaggagacacgtcctccccatctgaagactgtcctgtcccctccgccattcctgagtccccactccaggcctgggccagccactgactctctctctctgtctgtctctgtctctttgtgtcactctgtctctgtttcttccccctctctgtctctgtctctttttctctctctgtgtctcactgtctatcttgctctgtctgtgtctttctctctctctccctgtctttctctgactttctttctctgactttctttctctgtctctccctctctctctctatctctgtctctctctgtctgtctctgtctttctctctctgtctctccctatctctttctttgtctctatctctccctgtctctctttctctatatctgtctttctctctctctttttgtctgtctctgtctctttctctgtccgtttctgtctctctgactctatctctgtctctctctgtctctgtctatccctgtctctctttctctgtctttctctctctgtctctccctatctctgtctctccttgtctctctctgtttctgtctttctctctctctgtctctgtatctctctgtctcccccatctctctctctctgtctctgtctttctctgtctctatctctctgtctttgtctatccctatctctctctgtctctgtctctctctgtctttctctctcttcctgtctctctgtctttctctctcttcctgtctctctgtctctgtctctctgtctctgtctccccatctctctctttttctgtctctgtctctccatctctgtctctccctgtctctctttctctgtctgtctctgtctttctctatctctctgtctctctctgtctttctctctgtgtctctccttggctctctttctctgtctttctctctctctctgtctctccctctctctgtctctgtctctccctctctccttctctgcctctatctctctgtttctctttctctgtactttctctctctctgtctctccctttctctctatctctgtctctccttgtctctcttcctctgtctgtctctgtctttctctctctctggctctccctgtctctttctttgtctctttctctgtctctatctctctgtttctctctgtctctgtctatgtctgtctctctctttatctctgtctctccctgtctctgtgtctctgtctctccctctctctttctctgtctttctctttctctctgtctctgtctccccatctctctttttccctgtttctgtctctgtgtctttctctctctgtctccatctctctctgtctctctgtctctgtctttgtctctctctctgtctctgtctctccctctctctgtccctgtctttctctgtctgtctttctctctgtctctctcttttttctctgtctctctctctctccctgtctctctttgtctgtctctccctgtctctgtctctgcctttctctctctgtctttccctctctctgtctctgttcctgtttctctttctctgtctctgtctctcctcgtctctgtctctacctctctctgtctttgtccctgtctctgtttctgtctttgtgcctgtctctctttctctgtctctccttgtttctgtctctccctgtctctctttctctgtctctgtctttctctctctgtcttcccaagtccccacccttccctccaatctgcgctgtgctcggaagccaggagtccttaaatgcaaacgtgatctcttccttctggcctccctttctgagttcctgtgtcctaggggcaaaggtcaggcgcctaaactcgctcatctctgagtgacgcccccagcgccttcatctccattactcagcgaatgtcgatgagccctgtgcagggtggaggtgggggcgggggcggctctgggtccttatcgcccagcggtgcagactgagataaaggaaccaggaggctagggagaaagtcccatgcctgccgggaaggccccggctatggaaggagccatgtgggcagtgggggcagggggccagcgagggcccccagggaggtgagcccagaggctgaaggaggcaacgggaggaaggcctggggaggcgcagggtgtggcaccgtccctggcctcaggaaggctggtccgggattccagagcttgaggtctcctagatgggagagacgtgaggggaggcccaagtgggggcccaaacgggcagcgcccgacagaggatggcctccaactccctgtgcggaaaaccaggagagaatcccactctggctttggagacacaacccccaggatcctctcctgaactccccgcaacgttcctcctgcccctcctggaccccgtggtcagccctgtggcttccctgcacggcctctttgctggggagcaggaacaccatctccttcgctgtcccatgcccggcacaggactgccccccacaaagtgctccacagaaggacagaaaccgtgcagtcaccgggaaggtggggatctggggtggctgcaggttccatgacacaggaccctccatcccccgtgaccccagagggcccttggggacgaggctgccctagagggtggctctgggtcctgaacctatggccgggagctgaactcctcctgctcgatgttctccagctcagccagggatgggatccgggcatccaggctggggttgggcagcgtgagctgttcattatgaagttcattacgaaccccagaatgaaactgtggcccagggggcacagccacgggaaccccactctcaggttgattcaggccacatcccaaggagccgtggttccgtggggactggtgggaagccgggcccccgagcagccgtctagagcccagagccaggctggaggggtccagggcctcgctgtgcttggtgtgagcagaccaagagctgccccagggcccctgctcccgctgagttccctctccctggactggggtgggggccggggatgcctgtgctccagggagctgtggagaggcccacccggcgtcctgcaggtgggggtgtgcggcagccaggggctcccagaccggggcagagccagcatcctgtttgccttggttctttctccccggggtgcaccggcgtttgtacgcatttgtgtgtgcgtttgtgcagggggaggggtggccagcgcccacggagcagcctccggttgcccgaaggcagtgggtggctctgctggccccggggccgggcgtctctgcagataaggcattaacagtccctccgcagacgcaccctgcagatctgctgacgactggctccgttctgcccaggtgcctggggcgaggtgccaaaggttctctataaagtgcccggctcccggcccacggccactcgccctccagcttctgccctgcctgctgtgtgcggagccgtccagcgaccaccatggtgaggctcgtgctgcccaaccccggcctagacgcccggatcccgtccctggctgagctggagaccatcgagcaggaggaggccagctcccggccgaagtgggacaacaaggcgcagtacatgctcacctgcctgggcttctgcgtgggcctcggcaacgtgtggcgcttcccctacctgtgtcagagccacggaggaggtaggctggccgggcggggctgcgggcgaggccgtggccagggaagcacagacacacgcagaggccctgggcagacatcctccccggaccctcggctccccaagcacggaggggagaggagaagccgcagggtgtggggggagctggggcccccacgggcccccgtgcccggttcctaggctgctggtgaggagatgggcctggccggcacgaccccaagacttcgtgtggggctccagggagggccctgtgttccagactggcagtcctggaacgttctggcctgagggtggggccgggggaagggtgtttctcccggtacagcccctcctcggaggacgcggggctgggccctcctgggcatcacctctcgtcccagccccacaggcggacacctgccagtgcagggagcagaggaggtagctgggttgggggcaggtgaccctagaggagcagagtgggtagccggagcctgtggactcgggcctggctcttgagccaggtgccctcaggcctggaggccgggagccgctgtgcccacccaacacacaagcctgactgctcctcgttcctctggctcctgcggcccaggtaggcatggccgctgctggcacagaggtgacatttgtgttcctgcccagtggtcctgagcatctgagaagtggctcccaggcctggcagggggctgtacctaggacccccacacttgaactcagccttgggcttggcgaaccccaaagctgctgccctcataaacctgctgctttctcagcggaaggtccaggagggccgggcacc

SEQ ID NO: 10447 - DNA, 6000 bp, Homo sapiens
ctttccttctagaaaatgtaatttcaaaaaacgttttcctaaattatatttcactatgtaccagaggattgggaagaatattacatgatctattcctgcatcttgagcaatacagaaaattaccagaagtcctggaaagcttctgctttacttgcttgctgagagatttagtaccctaaaactgacagatgaatttgaataaataaatgtttagagaatacagctgccaagaaactggcattggccaggaatggtggctcatgtctgtaatcccagcactttgggaaaccaaggcaggaagattgcttgagccctggaatgcaagaccagcctgggcaacaaggtgaaactccatctctacaaaaaaataaaaaaaattagccaggcgtggtggcatgcacctgtagtccgagctactcaggaggctgaggtgggaggatcacttgagcctaggaggtcaaggctgcagtgaaccgtcatgacatcactgcactccagcctgggtgacagagtgagaccctgtctcaaaataaaatatagagaaaccatcattgataatggaaaaagccaaatattagaaacccagatctacaatgttttgttcatacccttcagctgtgtgttcagaaaattaaagcaaacaaaaacatagctggctgttggcagagagcaattcaccttcattcttcaactacagacaacctgcagattctaagagtttggtaattaccttgtcatatacccagacacattgttaaacaaggtggaaaagcagctatgaaatgttaaaagggctgatcaaatccaagtgtaactgtagtttgcagagaataataaaaaactagcaagccttattgacatcgtatggtttctcctagtttgttggagcctgcagaagaaaatgcccacatggaggtgccttaagagcacacctcttccctatagacacatgctgaaacgttcctcctggacaggaacttcttcatcttaaaagcatttcttatcccgtctctgcgcttctaaacacaaggttttagaaacaaatgtttccaggtgattgtgtgaagcagcacatacatgcatcactgctaaaaatacaaacatgcccgaggagaatcgtaatcctgtcttcttaaaatattttagatggtttggctctgtgttcccaccccaatttcaccttgaattgtaatattccccacgtgtcaagggcaggacgaggtggagataattaaatccccgggccgtttccctcatgttgttctcacaacagtgagttcgttctcagggggagatctgatggtttattaggggcttcttcctttgctcagcactcattctctctcctgccaccctgtgcagagagatcttccgccatgattttaagcttcctgaggcctccccggcgatgtggaaatgtgagtcaattaagcctatttcctttatctatacattactcaggtatgtccttataacagtgtgaaaatggactactacagtatcagacctctacttcaagtacaacacaatcagtgtcgtcaatcaaatcttcaaaccaaacgacttgagcaaagtctacaacctagttaccaggaggaagaaaagcttgatctcgtgaaggttacctcatctcagcaatgccataactagaggctgaaaaacatctaccttttccactgatctcactacagtggacaattagtgaccactaacagcaacgtagcacccgtatcattttcctatactgtacccttcaagcttttaaaaatctaagatgtggcatatctattcttttttccctttttgagacatggtctcgctctgtggcccaggctggagtgcagtggcatgatcttggcttactgcaacctccacctcctgggttcaagcgattctcatgcctcagcctccctagtgtctgggattacaggcgtgtgccaccatgcctgtctaatttttgtatttttagtagagatagggtttcacgatgttggtcatatttattcctatatcccagcaacacattccatgatggtgatattcggtcttgatactggttgaatactgacttaatgtttggccagtcagcattcattgtgaatgtatatgcttatctgtgatagggacaatgaaaatccaaatagccaatgaaagaaaaacaagcaaatctgtaccccatgattaatgaaaatctgaccttgatttgcgaacactaaaggttatccaaaaaggaaagataacactacgtactggaatagtcaaaacctcaaaagttgatgcaaaacgcttaatttggcagggcgcagtggctcacgcctgtaatcccagcactttgggaggccgaggtgggcggatcatgaggtcaggagatgagaccatcctggctagcaaggtaaaaacccgtctccactaaaaatacaaaaaaattggccgggcgtggtggcgggcacctgtagtcccagctactcgggaggctgagacaagagaatggcgtgaaccagggaggtggagcttgcagtgagccaagatggtgccactgctctccagcctgggcgacagagtgagactccgtctccaaacaaacaaacagacaaacaaaaaacggcttaattcaccttttcgtgcattacttttctgagaactcaatacctcaaagttaataataacgactttcccacttatgtaagttaactgaaggactggcgcctccggagttctccaagcatctttacaagatgctatcagcacaagggatcaccttcatacaactgagactagaaccgagccatgaggaataggtaacccagaaggcacctccaggacaggtcaagaaagaggtagctcccagagtagtagcacgcttgggtgctgagactcggaaatgctacattggctggtgcagtctgtactgcgaagtaccaggagacaacctgacagcagacagtggtaacctgtctgtaatggaaaacactaagagactacctaccaggagactgttgtcaagctaagtctgtcctttttctgaaggcaaagcagccactctgcaacagttttgatgtgagaaaacaagggctgtaaaagggagctggcggaagtggtgacataaaggaagaggctggatgtactaggaagagctggctgaaatcagtgactcataaagctgcaaatcgcaaatcgcatgaaaacttgcgtagcaatataatgttgataaaagcaccaggtactagaacattaggatgtttgcaaagtatacccaagctctttaacagcaaatgcagtaccaagaaatataattcaagtgatagagattaatatcccaaataaatattcggcatgaagcactgtggtacctaccaactcagtggctgtggaacttcaactttctgaccgtccacctccaggtcctccaattccttaaaatatttgttctttaagcaatggagaatctcttttgcgtggctattgaaaaataaggaagtttcaaactgatctaaaaaactaagttaatacattgtatcttcttaaatttaagactgcaagtgttttaaaactaaaaccaacttttgcatggagagtaaacattctttagtcactacttttacactgtatgccttcaaaatttaagcaatccacactgtttgagccctaagagcaacactgcattccttctctcctaagcatatcctaccgttaagttttacttgcgactcatttagaaagatgtaactacaaagatggagggggggcgcggaggaggggagaaccaaggggttttatgcattctctataaattctcttacgttccaaaaggtaagaccctcagcttccctcctggaagattccccaggagccgaatcttcctcagatctcattttcatttcgtcttctaaccttgcgcctgcaatacctccgtgaccatttcattggaccctgtgctccccacctcaatgcttcctgaatccaaaccgctgaaacgccacggttctctggcactgtaacacttgtcgaagaaaacaccgtcgcctttaacctccagcatcctggccccaactcccaaaaaatcaggcactgcctccctaccttttgtaaccagtaattcttaaagtggccgggagcggctccctgagagcgtccatgaactggccccactcgccctcgggcacgatcttgagctcctggtagtagtgctcgaacagcttgttctccttgacgatctcggggtagcctccttcccagccctgaggaaggaaagagacgtctaccccgaggcccaaggagccgccccctcgccgccgcctcgcaggcctcggggtccgggaagcccaggaggagcccctggcccgcccgccgggtcccggctcctaccgcctcgccgcgctttccaccaccctcggcgccatcctccgcgtcctccggccgctgctgttgctggagccgccgaccccgcgaccgccgccccatagcccacgcggccgcgcacgcagcacgcagaaaccggcccgccacggccagaactctagccctacacctcccgggacttccggccggaaaccaaggccccacgtgtccgggcctggtcctttcggggacctttggggaccgtccaggaataagcccaaagcgcacaacccgtctttcagaaaagcggcgtgacagggaaaacagcgaacagctctaaggggaaaaaaatgctccaggaagcagccacaaaggcgtctccgcgcgaagcgcccaggtttcccacgcgggctcaaggagctccgcggacagcctgaagccgcgcgtgcgcagagcggcgcggggttactgcggccccggcgtgggtggggcgcttgcaggtccctccccgcgcaagtgctcgccccgcccccggggccgcacccacagccccggctaccccggagaagcctgacttgagaaccctttctgcagagtcccggcagtgcgggactccggtagccgcccctccggtagccgcccctcctgcccccgcgccgccgccctatatgttgcccgccgcggcctctggggcatggagcacgctgcccagccctggcgatggcaacggcgacgggggtggcggaggagcgcctgctggccgcgctcgcctacctgcagtgcgccgtgggctgcgcggtcttcgcgcgcaatcgtcagacgaactcagtgtacggccgccacgcgctgcccagccacaggctccgagtgccggcgcgggccgcctgggtggtgcaggagctgccctcgctggccctgccgctctaccagtacgccagcgagtccgccccgcgtctccgcagcgcgcccaactgcatcctcctggccatgttcctcgtccactacgggcatcggtaacgtccccggcccccggccccctaccctactcccggcccggcgtcctctccgaccctcccctcactgcccggtgccctctccccgaagcctcccccacccagatgccctctccctgccagatcccccggggcgtcccccatctgcacgggtgcccttccccgagtcccccggccccgggagtttggaaaccagaagggattcgtctggaaagggcgggaaacaaaggactggaagggagtgatggaaaaaaacatgatgaaactgatctggaaagagccactcagtggtcctaggtttggtttccttagccgggcgcggtggcgcctgtctgtgatcccagttactcgggagtctgagatggaagaatcgcttgaacccgagaggcggaggttacagtgagccgagatctcgccactgccctccagcctgggtgacagagcgagactctgtctcaaaattaaatatataaaaataaagagttaaaaagtaaaaatgtaaaataaaaatgaagactagattttgttcccttagatcacgactgtgggggcgggggggagggggttggcctagagtctaatgctgatggtcggtcttgagggccactggtttctactcctttctgccggttccccttttggtatcttt

SEQ ID NO: 10448 - DNA, 6000 bp, Homo sapiens
gctgtagacgtgctggaactgattagtcattaacctattgtcactcctcccagcgctcatggaaggagttgcagcatgtcaatggattttaaaagagtaccaggattaaacttctccatggcagtgggcatttgtgaaaggtctgttctgaaataccagtaccatcttctcacatgttaagggccaaaaatctcagtaagtcactccaaatcaggttttacagatgattttttgaaatattgattctggtattgtccctgaaaatttaatttatcaaataagccaattaagaagcgtcttttaaaggcacgtagggaccattcagcactggatggacaagaaaatgaacatattaatcttacagtcagcaacgttttgttgatgctttggaaactgaactgcaaaggagtacttaaatgaactgaaagagttaatttgacttctaagagccataaactggcttgggttgggtggattctgtattcccagactctggttcaataaaaatgtaaatgttatctgggtacacaaagcatatttcatggcgataatgaatctgttgacatactgttcatactttattatataaattttagtaatgtatttgccagagagaaaaatgaatacacagggaaagactctgtgctcagctctacaatctgccccaggttggctggcacacgttcgcttctgaccttggcgcagtttgctgggctgccttgatttaatcaatcagagccctgtggatgttgagaggaacacgacggcgtcattgactgagctaatctaactggatttgaaataggagctagaagatgggttatttttaaaccaaaacccactgatgcataaacctatcctgcagcgtgattgcttagatttataatcgattaggtgtgtcttagtgtgtatgtaatccctgagaggtgaccacattaggaggggatgggcttgagttcgcaggcagaggaggccttctcctttggctggcctgccgtaggctctgcctgcaggcccagaatggagtgctgtttagtgtgacctgttaccagcatgggctttctaatttgcaaggccgcgggcaaaacggacatgcagaaccttttgatcaaaaattttgaagaatttcagggtggtgacagcagaaccttaaaccagctgcacaagtcacagatccaaaaagtcagccttgcttgctgggttatgaggatagagggctgccctctagcgttacaggaaagaggaattctgcttcctgatgtttgctttttattttttctcccacaggcccagttagagattccccagcaggtttctttttgcaacaaataaattgctacagagtaaatatatgggagaacctcttgctctccaggccttacccttggagtggcagccctgctacccagagacacagaaatgaaccagaggtctcctttggggtccctttagtttcaagagtccatatttcacgctcctggctttgtactaaaggacgtttttcattttacttcatatggcttgtaagttattattttgtttctttttttctttttttcctttttgaaatacaaacttgtggagaactttttaaaaggcatacttagtgcaatcgattctaaaacatgaatacagaaactgtaatgattgtactgtttcactttttttggtattaaacataaagcaatgacagaagcccgcataaaaataagcatcaaaacaaaacaaagatcaaacaaagcctcagagaagcactgacatattcttcatttttatattattttccttctaagtcctgtgtctatgatgatgaaatttaaattgtagtgttcaggaggaaaggaggagtaggaatgttgatttttgttcctgtttcacttcttgtagccttacttttcaaagtaaattggaaactattacaagggtcccaggatccctgtctttcccacgccttcaccctgcccccttcatccagcacatggtaggcacataatgttagtttaataaactaatggaaggatgagtgaattaaaaaaaattcaaaaagatcaagggcaaaataatctccatgtcattacattgtaacaaaatttcttaaaagtcttaagactgcctttaccatacagagaacatatatatggtatacatactggatatttaaaagattccacttccccactaggaagaaggagacagtaattaagcatttccttttcctcataagtttttcagctcttttcgcataaacctaaatgacggattatttattttttctcccttcttgagtgggtgaagacaaacatgtatcaatacaaggggtaaagaagcagcaaagattgaagagaagatgaataattagtctgttgctagcacaggaaaggactggaaatgtgcaactctgcccgccccagaaagaccaagcacacagccggaggaagacagaaccaacacaatagaaaccgtgtccagcttcccactcaaccgtgtttccttggaagggattgggttctggatatttataccgcggattcatcagtgttgtctgtcatggaagcttgctctcagaaccttcaaaaacctaaaatctgggagtatagtaatcacatcctgaggttcatagcaaagcaccgagcccaaagcatccagcccagtgaggtttggtgggagggtctgaggttgaaattacctgggttacagtcacaggagggtgttggagtggagggcaggcaggacagggtgggggcagcagtccataaacactgcagggaagagaatttctttctgctgctagggcaggatgacccacggtgggaggtgagccttgggacctacaggaggcttcagggggacacccccccacccattgcctcctcctccactccttgtttccaggtcctcagaaggagggaagtccagggaccagggagcctggtggggccggacctgaggtactgcacgcagccctgggcccagtctcctcggccacctccctgcctctggtgtctatgagatctgcgggtgagctgtgcagctcctgagccctcatccttaggccctgtgggcactgacggatgctaaaatgaaaacctctggaaggatccgtgcccggcctggccctgtgctcagggtaacgcagctacctagcttacatgccctctgccagcgaggaggacaggacagccagggaggcggggcatggggccattcgagaaggttctgaggtcttaggtggtgacaaggctgagtcctgagagctggtcatctcctggaagagatgaaaagtgcatggaacagccctctggggctgccctctgggatgctcgctggtggcaggagaagggagggctcttgtgccttggattccttggggtaaggctttgggggaggaggtgggatttgggggctctttgggccggaccacactcgaataggaggaaacttccagaagggtgggttcctttggtgataagcaatgaagccccttcggcccccagggcgaaggccagcggcctccgctcccacgcgtgtcgggaggggacactgtccctggtgacatccgcccccacaacgctcctgccgggtctctagcgcctcctgcgtccaggcccccaaggtgacagggagggagctactcccagggccgacccgcccgctcccgcgcccagccgctctccccggcgcccctttgccgccatccccgctcagcagaggggctcggcgaggaccacgaccagccacggggcagctctgtaaacctgtgatatgacaggcttatacggcacctccaaagtgtgactgaagctgagcgtgcagggcgcaacggacgctgcccccgcgaggccgtggcgggggctcccagtgcagtcactgccgcttcacttccacatggtgccggtctccagttaggtcccctggcgtttccgcgccctgccgccctcgcagggagccccggccctctcaagagggtggagaggatgggggagccctcaaccctgctacgctgaggggaagaagggctggacggcaaaccggtgcccaccgcggggaggcgggaagggtgggaaatcctctccagctccccaaaagagtgaaaaggagggagaccccgctgtcctctgacccgcgtactaaaggagggaccccccgggtcctctgaccccggctgcgctctgtgactgtgggggagggtgggagcaggccccgcagcccactaaggggtggaggaaacaggagggtggcagcgtccctgcccgctgaccttgaggtagtggagaggagctgaggagccccgcagtgctccgagccaggtggggcggggggagtggtgggggtaggactccctccctccaccccttaggctgtgttctcacttcgtagcggggagggccgtccctcccaccccacccacgctgcactcgggatagggcagaggaggtggacgacctggtggctgagtgtgggaggccggcgggcgaggacgaccccgggccggggcgcagcgggagcccctcagttcgccactccccccaccgtacagcccccgccgtccccagcctgcagccgggccgtcgggtgggggccgacaccgcccctgcacggaggccggctgcgcgcggggcggggagcggcgggcggagggccccgtggaacccgccccctcccgcgcggtggcggtggcggcggcggcgccgggagctgcccccgaggccgccgcccggcccccgcccgcgcgtcagcgcgcccagcccggggcgccgagctccgcccgcgccggaggcccctgcgcgcagctccgggtgccggcagccgggccggccgaggcggcgcgggggtgggacgcgggcggccgcggcgagcggcgctgcccgggccgggcgcgcacggcgggcgccctgtgagcggccccgatgtggcaggaggcgatgcggcgccgccgctacctgcgggaccgctccgaggaggcggcgggcggcggagacgggctgccgcggtcccgggactggctctacgagtcctactactgcatgagccagcagcacccgctcatcgtcttcctgctgctcatcgtcatgggctcctgcctcgccctgctcgccgtcttcttcgcgctcgggctggtgagtggcctccccgcgggtccagcgccgcgccttccccggccctgagaggagcccggccagccgagccgcgtcccgctccgggctgcccctcggcccgcggcagcccctcggcccgcggcagcccctcggcccgcggctccctgcttctcctgctggcccgcggcccggtggactctggcaagggctgcgggcgggagaaaagtttcctgggaaggctcttcccaaaataaagttcccgaggtgttcaccaggtggacgggcagggcgtgtgctttttgcatctttgcgcacccgctggcaaactctgcgctttccgccgggcaccgctgcccgcagcgctggaataggtcttccccgactcagccctgggcttcctgggcgagtcgctgtctcctgcccggttccactggcatggccccacagttggcattttagttgggattgggcgttattcaactctgcagaaagcctgccttgggaaagtggttaatgacaaggaaaatgaagaagaaaaattaagtatacatctttgcctttaaatctgtatgcatttagctctttagcccgatagacggaaagtgatgtggtgttgacttgtgaatcaatctttcatctcagagactacagttaagaagcgtttgggacggacgattgctttcccgtttctaaagaagtaacgtgtttagggttttggacaggttattaaagtggatttcatcacgaggagtataatgcagctcaacagctgatgtcagttttgccagtttatatttttcaagcagaaatccttggctcgctcccttgaaaagtgaggggaagtctgtagatggcgataacttcctgttactgatctctgagtgtgtggttcaaacttttgcac

SEQ ID NO: 10449 - DNA, 6000 bp, Homo sapiens
atcaataattcaatggatatgcactctagaacatgtaaacaatgacatcaagccaaagtactataggtattctatgaaatgcagtagagacatagcaaaaaaaaaaaaagaaagaaaaaaaaagtatatttaagtgtggtactcaaagaggaacagaaggctgtaggtgaggtctgtctattctgaagagactactaaagcctagacagagggttgtctttctatcttctcatcttaatctttgtcttctttttgacagccatgatatactgtaaaattctgatgttctcacaatctataaaatcccaaaatattttttagcacatgctattatattgtctttcccactccaacctgtcactcttcccatcaagtgcttctataattggaagggggttggtgggagagaattatttttccctctggaggaaagtagaagatgttctgtttattctggtctatacacttatttagaagaatgtactgaggcaacacatttcctcttaaggaactgtttcttctaaacaaggacatgccccttcattcccataatacaatcttgattctcagtctaccaagcttgagttgtacatatctgatcaggcaaatttatattttactacaaaccagtgaataaaatgtaaaaataattcagcaaaattgaagtccacactacttactatgaaatacccagagtactaaaataccctgtgtaggtcaataacattttgctgctgtgcatttatcacatttggaaatcttctggcatattgcaatctacctatagtgatgagtcaactataatgatgaagatgtcttaatgcatcctgggatccaacccactttaaatacagtattggaagctgtcccaggattagaaaacctggataatcacatgaattttgtgtgaatttattttactttgtattgagatgtctatggctcttacaaaaagggaattccatcgaggtttcttgtctcctttgtttcaattcaataatatccagagtggttaaagcttttttcccccttaaacacagtatgtgtatggcgtgtgtgtgtgtgtgtgtgtgcgtgcgtgcagcagaggtaggggatggtcattcattcctcactgaaatctgtgctcgtgcacaccatgatgattaagccataagcattgtactatgtgtgcttttcctagcagcaacacatgtagggctaagttttagatcaatgatttggattggttgatcagagctgccgatgccaatattcttaattaagttcatgttttaaaaagtgaattttttctcctaatcaagaataattgttaatgatcatgaaaacattttttatcaggtaatcattgcatacagatttgtattatctaaaagaaagtcagaaaacataattatttatttatatgcatccccattataaagataagatagcctcttaatcatctgaagagagatttagtggaagttggaaaatccttcatcaaaattaatatccctaataatggtttataaaggagatttttttaaaaaaaagaaattgaaactttgcaagctgtaaaaggagagaagcaccagtaattttgactgaggcatctaaagtaatgaagtagcctaaaaactgatgagatgtttcagctgtaccaaactactgaacaaaacaagagaattggggaacaggacactttctggattgtcttcccaggatataaggacactccttaaatgctcccccctctatttggtcctgggggtgctagccccagctgatgggtccaagacagtaccggaccaatcagggtcattttcttttctctctctcttttttttttttttttttttttttttttgagacagcgtctcactctgtggcccaggctggagtgcagtggtgcaatcttggcccactgcaacctctgcctcctgggttcaagcaattctcccacctcagcctcccaagtagctgggattacaggggcgcaccaccacacccggctacatttttttgtatttttagtagagacagggtttcaccatgttggccaggctggtctcaaactcctgacctcaaatgatcctcctgccttggcctcccaaagggctgagattacaggcttgagccaccgtgccgggcgtcagggccattttctaagaaattagaaagggggctgaaagagaagccctcttttcgacaggtaagctctggaactgttggggtgctgttctgccctgtggactggaggatgaaggaggcaggtgtgaatggagacaaaaggaaagcagaagtgtcctgaggaggagatagagctaggggaagaatgctggcggcttctccgggcctgcccctgggcctttccagagactctgcagaatttccacccttaactttcaggagaaaccctatacaataatgacacatacctcttcatttgcttaactatctctgatgggctactgttacttgccaacatgttttggtgtgatgatagagaacaaaccagaaacagaacttacacaactccaagtaatcatttagcctcagtaactctcagttcctagtctctgaaatgagggtaaaataattctagatatttacatcaatcctgtatttgaagatgaataattattgtgacaaatattactagaaagcctcaaaaatcacataaaatcctttagtacaagagctgtcttttatataatttcatgctgccacctgaactgttcagaagcaaacggattgtccactcatacagttgttgttctaaacacctttgacatgtagcttaatggggtttgaagaatagtatattgcaaacaattagaggtttcctttgtgagatattaactggttcaacagacagaaaatcaacttcactatcaaccctcttctaccataaaaatcagccaatttgcacattttttctgctaaaggtggtcttaaaatatgacttattttattgacatatttacgtattatgtattcatgtattatcctactaccacatatgctaataaattatacctgtacatataatctgtgggtctctatgtctgcatacacacctgcacacccttttaccaataatatttctgcttcttgtgtgttccagtttcactgccttggacatgttatgtaacttctgttgtctcttcatcagtctgttttctctgtcttaattgggaaaatatgacaccacttattgaaggatgaattaaataaaatagtctacaaaagtactttgtaaacagtaaaggactacacagacacacagagctaatatttccaattaaatgtataagaaattcataatctgacgaatggactatgaatctaaagcagctttcttctcccccattcttacttcatacgtgtttaaagagctctataaaaagaaaatgttcagcctcttctcacaaattggtagcaattcttcatttggggaaggtcttttccagaaagaaactcaaatctttccatcttccatgtgcagaacatctgtgctaaaaccattccatgcacacttctttgaagcactggctgcctaaaggaatacttttgatttgggctttatttaaatgcctgaacttctattggagaaacaaaaggttttctagtaagagctcagttgggaacaggaccaacctccagccagtttaactactcagaggccaagcagcctggcatttcttagagctctgtgcaatggaaatctccctgagaacttgcagcacaggcgaacagctggtttgggaggctagtgaccctgggtgcaatcactgtggtaattagatttaattttcctaatccaacagtggctgactccatcatgcctatgtctcctatgtagaaaatcattactctcatttaatggtactttgacatgtttcacatttttgtggcttagtaccttaacattagatattacctctttgtaactatcaatctagccattcaaacagctatgtgtactaaagagtttaatttgaaggttatccaacttcggcaactttccagaaggatcttcgaacgttaagcagaccttgaatatcattgtacacccctcttctgcaagtcttttgtatgcttgtatcaattcatttagaacgatggcatcagtcataagtcattggcaagcctgaagggtttgggttttcagtgtttctgcaagcccagggaagcatggcttcatgctacgacatcctggggtcactccaaaagagtaacagagatcatggggctacgtgaaagcgtgtcttcctgggaggagagaaggaaagacatgtatgaatctatccatgtctgcttgcatctggagaacgcctgtttatgttgtaaagaaaagccatcggtattgtcatctcaggagaccggcttgttttatgtgtgtgcatgttatacgtgctatcacacgaagctggccaactgatagagtgacgaggtactgtgtccctgggaattgtaattgcttggtcggtgaaaaaaaaagaacatcagaccattgctgataatagcacaaggtgcattttgatagtacaaaagaggaaacagacggagtcatacaagttctgagtatatcttaaaccccctccaacaaaaaaaagaaagaaagaaagaaagaaagaaagcaagggaaagcctggggctgaaggagtgttccagggagcgaattgctcaggacttcaaacactgggagtcattctgtcaaggggagggggcgggcgggggcaggcactgggcctctttaacaaagtcctcctctctttgctccctcccacttcattcacttgcaaatcagtgtgtgcccacaagagccagctctcccgagcccgtaaccttcgcatcccaagagctgcagtttcagccgcgacagcaagaacggcagagccggcgaccgcggcggcggcggcggcggaggcaggagcagcctgggcgggtcgcagggtctccgcgggcgcaggaaggcgagcagaggtgggttcgggctccgttggctatgcatacatctccctttttttttttttaattctgtagcgttgatagaagccaatcagagagagagccctctccgcccggtgggtgccgcgccggagttgggagggatgctctcagcctgcgagcccgggtcggggcgggcgcgcgggtccggctgcgcgggcggcgctgctgccgctgctcaggaccgacgccgcttcccggggagcctgggcaccgctcctccgcctcctggtaagaccgatccgccgtggggctgggtgggggcaccgggaagcgggccgccgcagaagaacccgctgcctttctctacgccggcagaggctgccaggggagctctggcatttgcaaagttggctggtcaattaccaaagggcgctggtgcgtgcaggtcccgccgagccgtttggggcttgatttatctccacctgcccgcatcataagggtctgcgtggtgactgcttgggctgagttacatttcttagcttttggggtaaagcagaaaatcaggtagtctgaaaactctggaatgctcccagtaaggaaaacttaaactaaagagacgatttggctggtagaaggagctaaagaaaactgttagcttgcacgttccgggcaacgcctgccggctcatctaggacagaaatgcttaggttgcaaggaaagtccaacactggactccgaaaatggagcacactgtccagggaaaagtcatatggaaggcgcagttcgctcgtgctcctccacggctggccaggctcaaatctgggggataaagccttccccggactgattggagagtggttggagtgcgcttggttttcggtgccagatgctggaaaattggagcccccaatgcgttaatcccagaatttaataaaaagggacgctgcaatgttgtggactgcagcagttgcagagctgagattacttcttccgtagttagatattctgtcatgagttaccgtagatctcgagatgggagatgctggagaggtcagcgtggtg

SEQ ID NO: 10450 - DNA, 6000 bp, Homo sapiens
ttttagggataaactacatggttgggatcaccactcagaagagtgtcttgaacttgatgaatcttttgttaagaaataaagttcatattttaaatttttatcttttaattccattttacatgaactttttgaagtccccattcacactcgtttttgtgaatataataatctacataaattaacttgtctataaatcaatgatatgagaattcttcatatagcttgcaaatcttatgccagtattcaggttaaatcactgactagctatacgtttttcagaagtctttctaatgtcactttgcctcagaacatcttcaaagaagtgaaaaaaagatggtagttgatggaaatctaagaggattataataaagaaacaactctgtgttttcaaaagaaccccttaaggtcacatttagctgcagcttctgatgagattgaattataaatttaattagaaaaatataaaattactattatttatagtgctggcaaattaaaataatagatttatataatagaagaaaaagagtaagttaataaagtccctgctaaggaaagtaagaacctagaggcaaaattttaatttaattttttggcatccattgattttttttccccacttcttgaatagttcactctaaaacagcaactatatgtaaagaatgaaatctcaacactgattacattacagaaatgttcttgaattatttgtaatgttctttcatcttttctgcctctaggggggagtgtgttttcaacaattctggcctcagaaggtattttattgtgggccacaggcttcacaggggtattctcgaatacaactttagggctggctcaacaagggagaaaaggacctctgaaaatctaggtgggttcttagtttagaggttgcagccaggatgccaagggagaagagttgcagagactgttacagttggtggtggagaaaacttacttctgatagaatttctaatacacttcaaagaatcacatgttagttttcctatattaatgctgtctttcctggtagtgagaaataacatatagacagtaatttcatttcatagagctggaaaataaaccgttgaatactttatagaaaacttgccaccttattgtagtagcttgccaccttattgtagtagctttaaaaaaaaaaaaaaaaaaaacaacccaaacaacaaaacatggtttgtggatattaagtaaaacatttctaaacctcataaaaagtctattagtttctgaaatatcctgtttagagctaacattgtctttctttcaaatggctaattttctttcattttgcagcattttcccataactttcctttggtttcattcaacaactgaagccagaaaggaagcacctagtaaaaaggttaccactcttttgaatgttaaaaaaatacttatttttccccatttcagtgttttacagaattgaaagaaataatatttaaaaattgagtcaaataaataagttatttctattttttccttttgattcatttttgtgattaaagtgctgcaaaaattctattacaaaatgttatttttgggtttattgtgctgtattagcctccaaacttagctatatatatatataaaaatttgatataaagaatgttattacttagagtagaaattaactttgttcctaacactttcacatgatgtaactggtggtccttggtttactttgaatacaatcccatttaaaaatattctcaggggatgaagaggtatttaagtatatcacttatactgtttgggccttaattcatctagagagtaaggggtgtcaggctgggtgacttaagtcttctggcctgaagatttagaactacttatttacacaaactttcagttggttgcaaaaattctaacttgatggaaagtaaacaaacccgtaactttgaaatccatacacttacattacttggtgggtcttcccataatcttgtgactcttttcatttgaaaaggttttttaaaaaccctaattgttgctcactggaattcttaaggggtgttttgagcttcagcaaaagcataacactggctttttttttttttttaattcgttccgctgcttggtttggggtctcttcccttccgcagcttggtcttgttgctgctcttgagtgtgacaaactgcaagtcgagagctcttgtccaaaagctgcggagaggctacgggcactcacccttacttaagcgcactgccctgctgttgaactgcaggcgaggctaggtagcatctgggatgggacaggcgttcacaccggtgccactgaaaccccagactctccgcataaacccacaccacacgcggcagaatcatatcgccattggctggtgttccgcagacacagggcataccgcagagtaataggaaacactggttcctaccactgtggccagtggtaggactgggtctccgaggcaggacctttcttggagtctcggaaccccagcacagtgcctggcaaccagtttcgaaatccattaagacccttggaattcatgatttagttcttgttttgttgttgttctttttctttttttttttttttaatctgtgctgccataaacgcctgcccttctgcaaattcaggaaagatttaattgctgtggagcactaaatctcaatttccagtgtgtgtggattaccctgtttgtggaattaaattttatacagatgtctcttttgctcctggttagtggctctaattaaataaatggaaattctcgcaggaattagaagctcctacttaacagtgaagatttcgggatcacagtgcataatctgaatataaatgacccagaagctgaaacattacccataatcacattgacggttccagaaagagcgataaggagagtgctgttaagggaggcgagcgctgacgccagaagttgccatatccccagaaaccccagtttgccttttcaccgtcgcaagtgagaaccagagcgcgttaaaggcctcggagtaaaaaacgcagcgtctgggactgcggcacccgggttgagtcgggtgcaagtttctgccgaaagagggcgtcggtctgagactaaaagaaatttgtggacacggacgcctagtcaaatgaaagaccattttaacacattttcaatgtatttaaatgtgcgggacttaattgtcagaattctcccgcccagtgtagcccgttcacattgcaaatgacttggctgcagtaggcacagaaggtccagttccattttgacccgccccgccgcgcggcggactcccgcgatgctcctctggtcacggacttctccagagccgcttccctccggtctccaccgctgctgtggctatggccagtgggaggactgggtctccgaggcaggacctttcttggagtcgcggaaccccagcacagtgcctcgagcgctccagagaaggagcggttggatctttgagcactcaggttggaggggagcgtgtgtcgtacccgggggacctaccgggaacgttttgggaaagacagtccctttatttaggtacctggtttagcaaacaaagccccgaggacgctttggggatgctttccaagctttgtgacacctccagaagttgaaccattccctcgcctttgggagcaacaagtttcactttcctgctctcagtgcgctgacagagggtccgtgagctgggacactgtgacctcggcaccgctgcgattccagcgcaaacctgcgtggcccagggggagggggctggcgcggggctgaggaaggcggggtgtaggtgacgcccgggccagccgggcacaccaggtccgcgatggagccatctgcactgggaccttggtccttgttccctgaccttgcgccgagggaccaggaaggtcaggtgctcgccccgcgtcggtgcttcaggagggaatgtggccagaacgagaaaggtgagagcaagcggcacctaaggatttttgcaccgaaaccacaatttctagaaccatccctttcccccagtcctggtttttttttttttttgcacggtgtgtgtgtgtatatgtgtgtgtgtgtgtgtgtgtgtatgtgtgcgtgcgcgcgcgcatttctctactttaaagcacgtttccttttttgaagccaggagctggagagcgtggaaagggagaggcggtgatcgcacaggcacgcggcgtggtgggggctcttgccggtgcagacgtgggcgatttcagctttaaggaaaaggcagagggcctgcggggagtggtggttagggacaggggcgcgatgggtagtgaaggggtgcagggaggagccctgatgtaagaatgttaatgagagactcccccagcccagcccccacatctccccacccccacccaccccacccgctggaaacacaagcccggcctcggcgcgccatgtgtggtaacacgctcagccgctgccacgctatttaaacgcgggctatggatccaggaaccggcgcgaatcaatgagatcaaatgcgagggagatgcaccgtcaattacaaacacttggacaagtctaactttttttttcttctacaaaaacgctttcaaaagcaaccttagcaacgcccaaataagaagccacctctaagcaaaatagtatatgtataaacggagggcgaatatatacaagtatatatatatgtatattacagacgcacaggtttacacccggtgaactttttctttttctttttcttttttttttaagaaaaactagtgacattgcagagaaggacgcttcctctctatcttttggcgcattagtgaagggggtattctattttgttaaagcgcccaagggggcgcagggaccttggagagaagagtggggaggaaagaggaagggtgggtggggggcagagggcgagtcggcggcggcgagggcaagctctttcttgcggcacgatgccgtctctgctggtgctcactttctccccgtgcgtactactcggctgggcgttgctggccggcggcaccggtggcggtggcgttggcggcggcggcggtggcgcgggcataggcggcggacgccaggagagagaggcgctgccgccacagaagatcgaggtgctggtgttactgccccaggatgactcgtacttgttttcactcacccgggtgcggccggccatcgagtatgctctgcgcagcgtggagggcaacgggactgggaggcggcttctgccgccgggcactcgcttccaggtggcttacgaggattcagactgtgggaaccgtgcgctcttcagcttggtggaccgcgtggcggcggcgcggggcgccaagccagaccttatcctggggccagtgtgcgagtatgcagcagcgccagtggcccggcttgcatcgcactgggacctgcccatgctgtcggctggggcgctggccgctggcttccagcacaaggactctgagtactcgcacctcacgcgcgtggcgcccgcctacgccaagatgggcgagatgatgctcgccctgttccgccaccaccactggagccgcgctgcactggtctacagcgacgacaagctggagcggaactgctacttcaccctcgagggggtccacgaggtcttccaggaggagggtttgcacacgtccatctacagtttcgacgagaccaaagacttggatctggaagacatcgtgcgcaatatccaggccagtgagagaggtgagcaggggcgcgtcccgggccccgggccctaacccaaccgctctccgcggctctccctgcacactcgtccactctgcagaccccactccccactgcggcgctgaggtcgggtgcgcgcgggcactcgttcaggtatgcgccgtgtggctgcgacaacctttgacgaccgcccatcgcggtgtacgtagagggtcccagggaggtgaaggggttggaggagagggcgtctgtagctcctgcgtgcccaggtccaacaggtgctgtcaaacacttcgatgttttttcttcccagtttc

SEQ ID NO: 10451 - DNA, 6000 bp, Homo sapiens
gagtagaattgaggactcttgccagttctcccagtggtccagatttggaaacgacctgcagggtgtggccaccaactgtggtccctcaggaaccactctgcaggaatggagcttaccctgaggcaagtactgtgtgcaggggcacgggccagaacccagaatggggttgcttgatccagacttttctcagaaacacactggggcactgtgtccgacagtggagtgggcagccggagctgctgtgaactgtttgtccgctgggaaggccagagagggagacactgagctgcagggacaccacactggctcccgctgcccaaaggggcactgtgactcagcctttgccagaaggcataccactctcaccactcttcccagggtcagccctcttgttcactgttttatcaaaatgtgggcatgtactgaaattgaaataccactcactttctggcagaaatgtcgtcagcaaagagtgaaatgttggtactcaaagtttccatttttattgcatccagagacagaggctaaaatctcataaaggtgaaaatagtatgacatttcaaactctgcccagaaagaagacaaatggcagcaagacatgaggctgaagacgtgggggaaggaggaaagggaaatgaaagaagagccacaacaaggaaaatgtcatgctcctggaaatgaaacttcaagatgctgggactccccctcagaatcgtagggactgactcagcacatgtttatcaaatgctagagactattcatttaggaccagagtggcattagctttcctacagccatcctcacctgcttgacacccttggatgttgggtttttttgtttgtttgtttgtttgtttgttgttttttttttccacagctcttgtggtccccagcctctctcttgagcagggctggctttttttttttaataagatagctggtgcccaagattgttttccaccttaaggataaaacctgttaagaaaggtaagttgacagtaggtgggggcaggtcatacagattttatgacacatagaatgtgttttcagtatttttcaaacatcagattttacccaggatattactgttgcaacatttactgcctgttattattgctgtttcacttattgtccttcaatatatagtcccaaggtgagtgacttttaaatcatcctcatttaggacaaattgctaaaggcttaaggactattttataagcttcatctaaaaactgagtcagaggaatgcttttgtccttgaaacagtttgtttcccagggttctcatgatacactggtatctgtccaactaaattcataatttctgtagagaatagagtcaaaatttctgttcctaatagatggatccagatagtaaacactagtaataagacaagatgctcagcctgaattttcccaggaaaacctttgtctttactaatcagaaaaaaaaaaaaaaaaggaagatctgggctagatttttatccagttaacaaacaacaaacaaccaaataatggatacacccctctaacattttaggatctcaatctcgttaaaagataagttctcttaacttgctaggactctaccggttatataggaacaccacagaacttattgcaatctgaagataaaagaaagtcttttttgtgttttgcctgttgggcaaatagcctgaacaattacaaaaaaggaagaaaaggagacttggccaactggtgtcaggagtcttaacaaggtcagtgtgttctgcttgtgtatgagaaagaatcaaatggctttttttttttttttttttttttttgaggcagactgtcactctgtcacccaggctacagtggagtggtgcaatctcagttcactgcgcaatctcggttcactgcagccctgagtagccaagactacaggcgggccccaccacacctgactaagttttctattttctgcagagacagagtctcactatgtttactagggctggtcttgaactcctgagctcaagtgatctgcccacctcagcttcccaaggtgttgggattacaggcatgagccactgcacccagctggctttcctttttaatgattcactacatcatacaaactcatcaaactgaaggaagacaaagtacaaaagagagacgagaaaatgtagccatgaaaggaagtgatgggtgaagaggaggagaagaaatatggccaagtcagttgccacgccaaactgcttgcttctaccacagtccaatgcttccctcctgatttcacatttggagacttgagtgtccccaaatagtgttcctcatcctcttttcttctttctgtgcttgtctcacaaaagtaatgacaaagtaatatagtaaatgtttgttacctgggggatagggtgaactaggtggttcttcctcagcttttctaagtctccaaaggactaacaagacctgagtgaggaaagagagaaggcactgttgttcccccacaatctctagaaggactggtgacgcatgtcatttttctttgagctccccacactttaggcttctctctgaggtcttttcagcatctcctgccccacccaagagtaagcacccctgtggaaatccccagaacaaaccagcacatgctgtaccaaaatattgtgtcttggctttgttcttttacatcttcacaactaaaggaaagagatacaatcaaaatgatagtccacttaaatgataaacaagagaatttaaagagacataacccagttactcacccatgaagtgacaatctgttagcagtttaggagatttgcattggtagatagatataatttgggatttctccttgaacattagcttaattcatgggaatctgtaattatagctttcttgaaagggtatttagctcagtgtacaaaacataccaatttttgtgaatcaggcttacaattttctaaccaagctttcaaaacaagattagaaatgagggcataaattattatcgatgcacaaaattgtcactctttatttggcttggaagggttttgaaatgcccagagaaggccctgacaaatggagaagatggaatatgtccccttcagttggattcttgctccgaagtattccttgagcctatactccaaagtgtggcattataactggtgcagacggagtctgtcttaaaactgaaaaggaggatccagagactggtacaaatgtcccacctcctttttttgttacttcgttattgtcaaataattgtaatgatgggacaagctaaatcatgagtcttttaaagtctcttcgatttgctttacacctggggggttgttgcttgtctctgctaattttagccatttcacaggcccatgggagcaattctacctaatgacagtgaatccaacagaagttcataactcactgatcacttagtttctctgcactcctcaccttataactgcagtcttgtggcatttttccaaaagagagccactgtgaatcaagcatagagttttatggcctgaatccaggttagattatttttttcaagaaaaagaaaaaaaaatctaacagttaccaagaagcagtcaggctttacaaatatcaccactttaaccatgaggccatattaggaaggcttttgactggcattcaggtttgggggagtctgaattttctatgccatggtctcagatttctgccccatatacctaggcactaatttagttcatatgtactatgtgtacctgaaaagttgtgtggcaatcaaattttcacaaatagaatcctgttttaaatacactaagaaagtacctactttatcctttaaacaagaggtcagcagactttttctacaaagggtcagatagtaaagattttacaccttttgtacaatacaatctctatctcatctacttagctctgccattgttgcataaaagcagctgtagatgatacacaaatgggtgaggctgtattccaatgaaacgttatttgcaaaaacaggtggtagattaaatttggtcccaaggcttacttgggaaaaaaaaagatcttttgaaaaagaaaaaataaatgaataattttttaaaaaattgttccctaggtcatagtttgccagcccctgccctaaacaaataattcttgaatgcctactgtggtgtgtaagatatgagtaaataccagggatacacagagaacaaaagagaaaaactgctattcttgtgaaacttggaagttggaggtaagctatttaaaataaacccacaataaagtacttcacatagtgcagactgtttctttaaatcaaaactcactccaaacaaccaattgattcactttgtaagtttgaatttttgtcttcagattcttttaaagtgggcccttagtcaggagcggtggctcatgcctgtagtcctagcactttgggaggctgaggcaggcagatcacttgaggtcaggagttcgagacaagcctggccaacatggcgaaaccccgtctccactgaaaacacaaaaattaggctggcatagtggcatttgcctgtagtcctagctactcaggaggctgaggcaggagaattgcttgaacctgggaggtggaaattgcagtgagccgagatcatgctattgtactccagcctgggcaacaaagcaagactctgtctcaaaaaaataaaaattaaaaaaataaagtagcctctagcctaagatagcttgagcctaggtgtgaatctactgccttactctgatgtaagcacagtaagtgtgggggctgcagggaatatccaggaggaacaataatttcagaggctctgtctcttcatgtccttgacctctgcttacagcagcaatacttttactcagacttcctgtttctggaacttgccttcttttttgctgtgtttatacttcccttgtctgtggttagataagtataaagccctagatctaagcttctctgtcttcctccctccctcccttcctcttactctcattcatttcatacacactggctcacacatctactctctctctctatctctctcagaatgacaattctaggtacaacttttggcatggttttttctttacttcaagtcgtttctggagaaagtggctatgctcaaaatggtgagtcatttctaagttttcttatggattttggattatctgtagcatggtttcaggttattcagttccctaacagacctgagtcaggcactgggtttgaatgcagtttgagaatttcccacatattcagtcattttttttaatgtttaaccaccatgacagggggcaggggatcaatactatgggtggtttataagacctcagtattctcaagaaggaatgcatttcactcccaagtgtagatcttaaatgttgaatgattactctgctcttacaaaaagaatgctcatgtagatgctatgactgtacttgtaggaaaatgtccaaagtaattttaccttgtcaggagatcaaactggattcattttgtttgactttttaagaaatcctgaaagcataactttcaggataaggtaatgtacagaagcaatagctttgtcttcagtgaccagtgctatatcctcagcacctaaatcagtggctagaatatagtagacatccaataacttttgaaagtgttttcaaaatactttagttttgagagatttatgtgagattttaagtaaataactgactagagaaagatctaaatgagtttactcattgaaatacactgaattgcctccacaccaacaaattggccatatgtaataattctttttgggatctaaaaaacttagtaccgagaagccaaccctgcccatacataaacacattgtaattataacaaaactaggcagaagcttctaacagcagcaggaggcatgtgggaatttagaccatcaacttgctcctgcaaattaagccctttctctttaagagttaaaaactatttggctatagacaatatcaaacacatcagcctaatgactcagcttatgcattttgagtca

SEQ ID NO: 10452 - DNA, 6000 bp, Homo sapiens
agagcagccacacttggatttattttacattgtaatgattgaagaaggaactcattggcttttttttttccttttaagtttgatgtttactgacttcctttctccaagtcttagaattggaaatggactgatgaaccctcttgtgtttgtgactgtgttgcatctgtttattggtgcagcaactcttttctgagcaccttccgttctggttcctaagtatgcagtagttatccatacaggccctgccctcaaagaccctgcagtctagacagggagaattgcagcacaaagtggtaatgactctggagatttaaacccagggggccttgggagcacataggaaaggcaaccaagcccgttggatttggggagtgggaggagattagagttgactccccagaagaaataacagattgtaggccttccttttaatgttctttcctttcttttctatctgtctttaaaaaaactcctgggggcttcttttgggaaaagatgagaaatcaacatgaagaactcttgtcttagcgctgactatgatccccagcatattactcaatccctactgatctccaacatctgggtctacaggaccagtaataatagagtagaatagacctcaaagtattatcacgaagattaaattagataatgtgtgtagaagtacttaaaaaactataaagccctgtaaacatgtctgctgaaggcttcaattccaatcaacctacataatcttttccagctaaacggatattcttggttctacaaagtcttgactcatgttgagcaactggggaaaatgtcacttttcaatataaataataattgataacaataacatgtgtgaagccttcattaaaaagcagaccctctttagctttagaatggagaaaacatgttgttttttaaggcatcattatgtccacctgttggatcacttgtgagaaaaataacagttggtgtaatttcttgccacgtgggaatctatttgggggggttcctcttgctggtcttcacctttgtgttggtgttccctaggcttctgcccttgctcagtcctcttctgaaaccccatcagaggtcaaaacagaagaacttgctagagccacatgctgataactaacttgagtgaagtgagcaggacaagtgggctggagagtgcacactccacctacaggaggcagccttggctcagtgtcagccgaccccttcaagggccttgatattctcaaatggtcagtatttttcagtgtgaatgtgaactcacctagtttgtaaatgctcctcctgccccttgacttcctaacccaagtcttagtcacttcaaggctttgcattttacctaaaacgaaaattacttccctgcttaaatcctgtggctggctccccattgactaggagtggagttcaagttgtaaattcggcccctactggcctgttctccagcaggaaccactactggctccctgccatgccacacgatggctgctatgggcaggcacctgctagaaacagtgtacacaatgtggatccaggcacagccccttctcttaagttgctaccagtctttttgacatactaactggtaaataggcctcagcacacagcgatctcataaccttctgttgggccctgtcctggcccactgcttaataattacgatgcgtttatggactccttgaggaaagaaactggtatttggaacacagtggttgctcaatgtttgttgaaagaataaatgaatgtgataaagttaattttagttcacctctctgtagttggatgtttttaggtttcatatgactataactttaaaataaaacctagttatttaaaaattcaactaaccagacttcaccacaggtttttttgttgttctgctttttacattcatatttaagaagaaaaaaaaatcaaaacaaaatggaagacaactaccacaagttcttctacacctactgcctctaacacatccactgttacactctggggttaagtcaggtcctgttcattgtcttagcattctacaatttccaaattctaggaggagaattgacattcatgatgatcctaaaatgcaagctatttaaacaaggaatgattttaaaaccatcattaaattaaaaatcaacttggaaaatattgaaaaaagattaaaaggttttctaatccattttgttgctcaaaaaaaaatccaattaaccaaaatttcctaattttgaatggtgaagtttgactggcctgtaccatgctaagatcagcacgtgcttattaccgtaatctcttgttcttcaaaccaataaatgctccctttaaggacaggttggatttggttatttcttgttatactgacattttttcccaaagaaagaatttactgataacatacttcatcacacaatgttcacagaaagatcttgacagattttttcagcaggaacagcatttgctgctggtgtttgtgtttttttcatttgataatactaacattaatatgatcccccagcttctgtgtctcccaccctgagtagctttaaatgaaatacagcatacagagacttgttcataatttcttgatctttcatttatttagtgtttctagaaggaaaaaaaaagatgttttaaagctcaagggacttaactataaagtagaggggaaaaggtagaaatacgcgttgaggaaacccaggaggcccccaggcatgacttttgctatagctttccagaaagagaaagtggtgcttaaagaagtaattcccaatgtttccctccagactaaaattggatgaactctgaactgagactctttgcatctcattttctcattaggttttattacagccaacaaaactttcagtggtgaattacttcccttctcaacagaataccagactcccataatgtctacacaaactgaaataatgaaatggtttttaaccaagctttagggattagagaggaaaaaaaaagtgaaaaagaaagggcaccagggtcttcccatctctatgctaaccaaagtgtggttttccagccctttttcttgcctattaacaaaaataaaaacaaaaaatggaaatgccactgggcttgaaaccccatttaaaatcagatttctctttcgagttcccttgcaatacaagtcaaagtcatttccaccaaaaaaaaaaagcggtggggggggggggtgtgcaaattaatcctaaactcatggctcagataggacctggtatagtaaataaatgcttttaaaagtagtcatggcattgagaaatggctccatgcacctaaaccagaggcaccaatgtaaaaactagtaattgtgttttaacacaaaagattgaaaagcgttttgtttcacatcctaatattattccacccacttaaaaagagttacttaatattgactctgtattaggtataagacaagttcttgccctcaaagaacttataatttagttgagaaaccaaaacttaacatgagcttaaaaagaaggatgcagtacaaaacatggtataattaagtgctaaacaatgtagtatagatgctcagtgacctaggagatcagaggaagggaagggtcactgagggctgggaatgtcaaaagcatgtactttcagtaagttcttaaaatgatagcatgttagaaagctgttataattgctgctgatttgtaattttaaagcattgacatgattcaccattgctttccaaccagtagctgtttaaaaggacatacagttgagggtgaaaggagatatttctttatgatctccagagatttgtattgaggggaaaaaagacatactttcttgttgaataatagaccaagaattgagcatattttgcatggggaatattaaattcagtgaacaagaatccaaacctcaggctgtgattctggtataaatttttgtttctaatgaaccattttcttccttctaaagaagatttaagttttgggaataagtcacctcaaaaaaatttttttttattttctaatatctattttcacaatttatttttcttttaagaaaagtggactagaagctcaagttaccttctcaaggcaatgagaattttttagctctaaaaaagttgtgtgtggtagggagaacatttagcatcctttaaaatggagacatctgaacagcaacctatcttttgaatcaccaaatctcaagtgtactttgcactcttggtcttaaaatgcttttcattttctagtttggcaaaaattccagtctctttacatttgctaccttttccgtctttgcaacacaggcagtgtgagctaaattaggtttgttaaaatgaagttttgaagtttcaactgctgaaatagaggcatgtccctaactttagacaaatttagagaatcgtagtaagcattattttttttctacatacttgtctgcattcagtgtcttcccaagaaacgtcagttaattccccgattcgaaaaaggaactttctcgtaacagttgtacaaccaggctaaagagcacaccctcgtcttccctgaaagggaggaaacatgcaataatgtgaggtaattaaatttagccttagaaaagtctttgaaacgttctaatcaagactttcagctttccgattgtgtgcgctttatttttcaattcttcctagtcccggttttgcatttctaatgacagtgaactgacaaagcgtgaaagtggtctaaggagcaaaacaaagccagcaagcctgcttctggtgtgccaagattaatcaatattccagaaacctcggggtttccccctcctccctgtgcggtttccattccccactcctcctttcccgggcacagactcctccccttttcttaagttgccctgatagtaacttgcagtttcagagcacatgcacactgtcagggctagcctgcctgcttacgcgcgctgcggattgttgctccgttgtacctgctggggaattcacctcgttactgcttgatatcttccaccccttacaaaatcagaaaaggtaagtgtcacattctgtgttcctgctgggtttaatttctcctttcacttctctgccgatgtattttgccttccaagcagaggagtagcctgaatcaaggctagccattttggtagataaagtccttgttagtcatctcacgtcgtgagagtgtggtgtctgtttatgccgggtccgctgttaattcggagttgagtcattcggggtggattgggggcagattgtggcgcgagatctagaaaaggatcaaggttgagcggatctgcttaaaagtgactggtaagaggaatcagagctattagtttaaaaaaaaaaaaaatctggtctctcctatttcccggtcttcacttctccctaagcatttaatccagtgtgaagtcttaaacaaattagaagtcttagtatcactgaccccaacttgcaattttatttaaaaggcaaactgttaagacaagtctttttttttcctgcactgggattgcgagaagtcatttgcgaggagtcctttggtttccagttacctcccccacaggcgcacacgctggctgcttgcgttggcagcgacacacatccatggtacggctggttttcactcggattgattatgggaagggctatggattagagctcctgtaaagcaccaggaggaatcccttgatttttcagaacagctgatttccaccaggaaagagatttactgaaatgtagttaaatagcgtgagtgctttaaagaaaccagaaaccacaagctgtaatgtttggaatgaaaattggtttcatctcatctgttctagaaatcctaaattttaaaacgctaaaaagtcagcgatagtttcctcggaagattccagcatgtgtgtcacaaagaaaaacactacttcatacttctacttgtgataaacgaagctgaattgtgatttcagatgatttatagatgtgcccagagcactttgcttatttcatggaaaaaaaatgaaaaaattaccctgtaaaatagt

SEQ ID NO: 10453 - DNA, 6000 bp, Homo sapiens
cacaatgtggtattattaacatgcaacaaaatggctaaaatgaaaaggacaaacaacatcaagtgttggtatgatttttgaatgactagaactctcatatactttgatgggagtgtatatgaatatagccactttggaaaactgtttgacaataccttccaaacctaaacatatgcctatcatataacctcataattctgctcacaggtatacacagcagatacacatacatatgtctgccacagacacatacaagaatgatcacagcaacatcttcggttgtagttccaaactagaaacaacccaaatgtctatcaggagtaaaatggataaacaaattatgatacatttctataatggaatactacacagcaatgaacatgaataaccacacaacttggatgaattttttcaaacataatgttgagtaaaagaggaataagtgattacattactgcatgattccatctatataaagttcaaaaccaggccaaaataatctaggtgctagaaatcaggaaaatggttacctatttggttgtagggtaggttacagttagtgggaagaatgaaaggcttttggggtgctggtattgttttatttcttgatctgggggtttattacacgtttgctttgtcagtgcagtccattgattacatacttaattataatcaagtataagcaaggaggacataatgcatagcagatggctatgcattatacagtatcttattatatatgttatcatttgtaatacagggtctttgtcactcaacccaatagcacattatttgcactcttatttagggcttcctttgttctgctttatggaacaattgacagtgcaactgtcttcgtctcccaacaaatttgtagtcttcttgagtgcaaaaaatattgttgcattttctctaatatattatttctgttcttagcacagagacttacacataatgggattcagtctcaatgtttgttttacattggtgtagggagagtgtttacttatttttactgatctacttttatttgtgtgttttaattaaaggtaaatgggaggttagaattctcatccctcatccttcttcaaaaatacacacttctagagaggaagcatgaagagggctttgtgggggtgctggtcatatcctattccttgatctgggcagtagttaataaagttatacaagtgtgctcactttgctataattcatcaattggtacacttactatttgatacttttgtatgttgcatcttgattaaaatgtaacatataaatatatgtatatttatatttctagtttgataagacactacgttggtgagagttcacggaattagttaggcacatatactgcttattggggagtaaaatagtacaacctccttgggaggaaatgtagccaaattatcaaaattgaaaaggcatttactgtttgaccgagcatggttagtctagaaatgaaccctacagtctactataacatgtgcaacttattacatattcagtgtcattcatgcctgctgtttataataattggaaacaacagaagaaagaacaaataaattacatatcacatgtagaatattattcagcagttagtaagaaggaggcagatctgtatctgctgatttggaaggatcatcaggttaagaagtacgtagaagatgctcttggttgcgttaaatatatgtgtatataattagcttgtccattcatagaccatctctagaaggatatccaagaaactggtgatggtagaaggaagaaaaggaaacttatttttcactatacactctgcctgatctgcatttcaaattttacatgtagatataaccaatttagaaaaataaatcaaaagatgattcttggctgctgcctctttgtcactctcatttagagtcttaataaacattctataattgataagtttgcctttactttcttctaccagcctccaaatctattccatgcagcaaaggtcagattcctcttccatgataatgagcaaagtaggcaggtcactcttctgctggtgaccttattaattgagtttagacctccagtgaatttgaacagatttttttttttttaatgaaacattcaaagcctcttggcccctctttagttcccctcctctcagaaagcaggaagagagtgaaaggcaagtgttctatttgtctttagtcagatttacaaatgccatagttggttttcaaactggaaggagagggaatcttccagttcccttggaggatgcgatttgaactgcaaaggaagggaataagtttaatgtaacatgtgctctagatttgaagcagattttgtgaaataaggtcttatctcaatggcctgatgatccagagtgtttgcaggccctcagaggtaaaaatacaacagtataatctaatgttgtttttccccaaggaaaaaacaagaggggtctctgaagaaaccaagcctatttcccaaatcgcctatggtcatctgcaaaaaaatggaagggaggcccagggccagggatgccgaggtggtgtgggcacatgaggaggacattggcaagaaggctgcccaggcttgcgaaatttgcagtggacaatttgcacagggtctgttaaaaggcacatgcagagtaaaggtagcttagattagatgatgctgttttatcagctattaaagagaaagcaaaacctggaatttactgattgtttcgtccagcccattcatttttaccaaggcacactatacgcagagcctaggattaaacacccacatctcccgatcctctcagtccactgctgtgtttactttccacattgttctctcaaaagcctgaaagctggaatcagaccccttggattcaagcgctgcatgggagctgcatgaccttgggcaagtttcttaaccttcccatgcttcaggttcctcacctgtaaaaggcgagaatagtaatgacagtatcttcctggtatggttgttattgggattaaaatgcacttcaaagaaggtctggtacataggagaccttaaataaatggtagccataatatcaacgattattattacttccagtttcagcatcacagagaatcatttttaagtaggaaagcctgcatgggaggcatctgcattgcaacactcgcttggttctgggtgccacattaagtccgagataagaaatcactttcgcataaagaaaggcctctaacaacttctcagctggcgctggaggagctctctcacacaggtggagttcaaagggaggtggcacgacccgacaccaatgctgaaagcagactcctgcgtggagtggaggcatggcctagatgacctttaaaatgctaaaaagtctatgattttgagacctttgagactagcagccttgggggcagtcactttgcttagcttagtggccggctttatggtcaccttggacgtgaagagcatagttctgtctgaactttgctccagttctatgtaagaggacaagctctggtgtcacagctaaaacttccaaatactcaagttggaggggactttgaatttatttgtgaacagacaattgcacacttgaaaatgccaacacataagggaacacactcagctttgctaactaacaagattgagctcattacaaactctccagccaggggatatttcattcttaaaagaggagtagaaatcctgtgtgtgtgtgtttggggggctggggaggggagaagaatatatcagtcaacattgtttcctcccgcgctcccaaacataggctaactgtgaagagccaggacgcccaccgagtcctggcagcgttgcaaggtggggagggggcgggcgcggtcctgtcgctagtgactgcagatttcctctgcggggcacttcctacggcctttgatctttccccaggaactgccgagggccgcgtttgcctctaagtttattccctcttggtttatttattgtatctgctttctcttctcgctggtttggaggtcagaacgccagtatgcaacgggacttgtgtcccaggcagggtctcccctctccaggcactaccgcgaaatctggcaaaaggtacattttactgagtcctagggcagcaaattcagcggcggagaaagagtctttctccattcaggagacaacccaggaagcccgatcccgggatcagaggccaggaccccgccccggccccctgccccaggcccagctgggcgccgcccaggggcttttctcggtccgcctgggggctcgagctcgcgtccctccctaagacgccaggcttaacttggagtttcatctcctccccaggagggtctcaagttgccttcctctgccgggaagggcccccactcccccgctccaggccctaatctccacccggcgtcccagtctgagcggcctggcctcagctctccatctgcgagccttaaatcccatttatcttcttagcgcctcagacccggacggtcccgcctctcttcctctcacccccaccccacttgcaaatcacagacccccgtctacccctcgcatcccccaagtgcgctggaccaactacagcaacctttgaggtgttagaaaaagtcgcctagaggggcgcggcaggaggagggcccaggtggggtggagggggggcgccccaagatttcagggtgaggaccgcggagggtcctggacccgcagtcgcctaactcctgccctgcgtctccagtgcttgaagtcggtccctcccaggtccccaatctaggtcaccagcggggaagggctgcgctgggggtcgctagagagggtgaggggcgggctgtctgcttccgaggtgggcgaggagtgaaggtttcagggcctgtccctctcacttccactcgattgtaatttcatccccgggccggtcgagcctccctccctcccgcggccagcccttccctcccagtcggcctccttcgtcgcccccgcccccgcgaaaagccctgcagcttgcagccggcttcactcgcgcacgccgacctcccggctgcagtcctacctcttggaactacccgtgtttccgggcccagccctcgcagccccccacctcctcgccccggcccggggatccgttggggccgcgtcccccacgcgcccccggagacgccctttccgtgtgcgcccgggacttggtgaaactttgcaggcgccggctgcgaaatggatttaatccgaggcgtcttgctccggctcctgctcctggcttccagcctcggacccggcgcggtgtcgctccgagcggccatccgaaaaccaggtaatgcgctcctccgcccagagccaccacgccccgagcgcccctgctgggctccggggcgaggacacagagcgggcagcgcaccgcctccctctccccgaccaacgtctgcttaactcgcttcagctctgccaggagctgagaaaagacgcaaacctcgccctcccccgagcccgggcggcgctagggatatttatttattaaaagaatgatcaattttccagacatagtagatagaggtggtggtccccgtgtttgaccgcagagagctgacagttgggacagcgatcgtgctgtctcaattacagaggatggcaaccatgcagaggagtcaaaccagcccctcctgcgtctccaaacattttactcaattcatattgtccagagcccagccatttcctgttaagtgtctgaagggttgcctggagccccctctgcccatctcgggtcctgcccacgcgttgtgcagggatgtggactctgctcttagcatcctcttccactctggggccatttgttcagaaggaagcacccagtgggttaattttaccgtgttttgaactcctgtctttgctttggcatttaaacaaagaaatgtacgttgtaacctgttataagggactgggaattgggggagaacttgaaaccataataacgtgtgtttcctctagctgcatataggtaaaaagtcttcgtttattttggtctactttgat

SEQ ID NO: 10454 - DNA, 6000 bp, Homo sapiens; identical to SEQ ID NO: 3426

SEQ ID NO: 10455 - DNA, 6000 bp, Homo sapiens
ttaatgcacagatcacagcatttaatgcagtgcttccagcagagatgggcagcatcttattatgtgtaatgataaagcatttaataatcatcattttactgaaatcttcctttgaataaggcattgcttggcagccatttttcattctcaaactgttcacagtgtgacactttaaatggaaaaagcaacaccacctggagtacttattagcttaacaagcacttgcctgggagcctaggaagattcactgtgtttcactccctcctgagtggtttaactccagagcttaatggtattctttgactctagggcctggagcagtctgccactaggggatgctcttgcttcttcactccaactcctggccggttcaattctgaccttatcagcctcaatacaagagaggaggaaaaaggaggcttttactcttccccagtgagtttgttcctctgaaacccccagagtcagctaaatctgttggaacaattcagagcaaaatgaaatgactagtaaatgaaatagcttcgttaaaatgttttcaaatatctccctgtggtgaaccagaattgcttcctgatatcatcggtggagtaatagtttcattagggtttggggatgttaacagtgtttgaagagctgccaagggaggtgagggcaaatggggaagagctggtgtcacaggagatgaggagagggctgtgcccttattgacccttccccagtctggcagaaatctgctttatccttctactgatttagctttggctcagacaccatttatttgccaaagcatgcccatataccagttttggggtttgttagaaataaaagtccagggggtcacatgaacttgagaaattctgggttgaaaaagttaaaaaagttttacttgttacagaactttcagaacatttaatttacaatgcactgtgctttgcaaatccaagctgggcatttgctgggagtaattgttgactgggttcttcatcttgaaattctcctgaattggcttgatgttgcactgttttggtttttcttctttttctgtaacctctcctttttgggactttttttcttcttactcctgaacaggggcatttcttgtggttttatggttcattatgttcagtctctagaagattcactgaagtccatgattttagttagatacctccatgctagcagctccacccatgtccccctccaagagacataggtgaagcctgtctcttcccaaagagacctccattatatgttggatgctttccccaaagtaaaaatgtcccctctccaaaaccatctcttcctttttgacttctaattttcttcctcctttaaatttttcttaaattctttcaattctctgagtcaatcagacttgaaaccatatttaatcactaaaccctgtgaattcttctgccttttttgtctttccttttttttttttttttttcctgggacaacgtcttgctctgttgctcaggctggaatgcagtggtgccatcttggctcactgcgacctctgcctcccaggttcaagtgattctcctacctcagcctcccaagtagctggaattacagttgtccaccatgttgtccaggggttgtcaccatgttggccaggctggtcttgaaatcctgacctctccagtgattcacctgcctcggcctcccaaagtgctgggattacaggtgtgagccatcgtgcccagccccttctttttttgttgtttctgtttttgtttttgtttttgaaacaaggcattgctctgtcacccaggctggagtgcagtgacctgctcataactcactgcagcctcaaccttctgggccacctcagctttctgagtagttgagactacaggcatgtgccatcatgcccagctaatttttgtgttttttgtagagacagctgtgtcaatccctttttaaatgaggccttgatccccttgtctaaactactgaaataaattccaagtcacgcttcctgcttcctttccttacctattctatgtaggctgcacacagctactgtttcaatcaatctaaaacactgctttgattctttcttaaaaacttccagtgggtgaattctcagtgactcattgtgtgaataaagtccatacaacttatgctagcagtaaaacttcccacagtgttgctcccacctgcatttaaagcctttgtgctaatggttcctccattaaaattgcagacagaagaaatgctcttgtgatgttacagatatgaaggtaggagtgtgcaaggcaattggggaaaggaagtttctgtaaccctttcagaattgaatgatctatgggatacctgagctgaacaattcaagttctaaattactataaatatatccaaatcatcctctagattaaggatattctgtaaatgggctaatacggtcctttatagcatgtaaagaacaaaaataaggaaggatatagcttaaggcttctacctgtcaaagctgatagcctatcatattacacattttagaaaatattgatcaaattcaggatgaaaaaattaatacatgcatgtatatataaataaaaagctactgtagcagatgctgttggtaccctacccatattccttcatcgctcgcctctaaatgacaaaggtaaacacctgcaaatattgcaaatgctacaattccctgcttgaaaacctttacttatggctgcaggcgtgtgcttagcttgcccccagggcaagctggtagtgccagagagccaatgggttcagaagctaccttcatcatcagcgatgggtttccttaccccttaattggactaactctttttttttttttttttttgggggacaggctctcgctctgtcacccaggctgctcttcagcagtgcagtctcttcagtggtgcaatctcacttcactgctgcctctgcctcctgggttccggtgattctcgtgcctcagcctcctgagtagttgggattacaggcatgaaccaccataactggcttttttttttttttgtatttttagtagagatggggcttcaccatcatggctaggctggtcttgaactcctgacctcaagtgatccacccacctcagcctcccaaagtgctgggatcacaggtgtgaaccaccacacctggctggactaactcttaattgcagagttcgtgtgcaatgtctttcagagttcctcattagaactgaactcaaattgcccactggagtctcttgcttgataaaacaccctttattgactttcttttctccccaatctcactttcccacttccagtggtgctttctaagattatctcttaaaacaaaaacaaaaacaaactacttgcaattgaattcttgtttctgaatctacttctgggggaacccaaactaagagagccgctgaaatggaattgtatattgagaatttaagatgagtctatggcatctggaatttatgcagttggagctgaataaaaaatatttctttcaggagtcaggatctttgtctctgtgacaaaatttcttccacacaaatcactaaagctttgaacaaaagatgcggaagctttgtctctggaaaccaccattaatttatgaggggaggataggggttgtctttattattccagtgctttggatataggaagaaaaagtcattaaagctagaaaatcttcactaatggaatgtttacttataaaattattcttaactcaaattttctttcccgcttaacatttattctacctcactcataatgcactagcagctagtgttagaatatttggtccaacaatacaaataaaactgtagctcaattttttttttttttttttttttgagatggaatctcactctgtctcccaggctggagtgcagtggtgcgatctcagctcactgcaacctccgcctcctgggttcaagtgattcttctctctcagcctcctgagtagctgggactacaagtgcatgctaccatgcctggctaatttttttgtgtttttagtagagacggggtttcactgtattgtccaggctggtctcgaactcctgacctcttggtccgctcgccttggcctcccaaagtgctgggattacaggcatgagccaccgcgcctggccaactgtagctcagtttcaataggaaatctaaaatcttgcaaaataagcagcattttattaaatgtatgaaggtgatgttggggacttgctagaatcaatgcaaagctatgggaaaataaagacctggtagaataagacaagataaaaagcaaaggagagaaaatggatgtggataatgaccctgagaagaactttccaacacagtgatctgattatcaaaggattaagtgaagttcttgagaaaattagtgatgtcctcaaatatgtttacaaaaattgatattctttctgattattctgtgaaagttaagcatgaagggatgactattgggttgtattaggctgtactttggggaaaaattctactccagaacattctatttagattttgagtgacagaactgcatttaaatattttctttcataaaatatttaatctcaaagtctggcatataacaccttttaagagaatcatgaaaacatccacttagtttagtagattgaaacaagaaggaggctcatcccttgccttacagagtctcctttggttgaaaatcacttaaacattgaactgagaacatttgctgtgtttcctgatttatagatatgtttctaagaaacatatctataacttccaaacagtcccagctggctgtagctaaggctgtgtaattgataagatgcatctggtttcaaggcacagattaagtacaaggtcaggctcttgctgtcgttggagaatccggttggggtaggagctaaatctcaggaccacttgctctatatatgagtgccaagataatctagagcagggagaggcagagaggcaggcagcctgctgggctcttcctgctgttgaaaacttacccggcccttacagaggaaatcttcctcctctcttctgccctgaatgttttcccaaacatgaaggtaagacaataaattcattacttttgtaaatgaagctatcttttcaaatgaacgggggtaatataaatgtaatttaaacgaagaggtgtaatacctaactgaaagacatcaaataaatagaaggccagaggaaaatacagaagaaaaagacctgggggtgatgtttagaaatccttatttaaacatatttaacagttcagccaaagtgaattcctttttcttatcttgtggtgaaattataggtccagaggtctgggaatcaggaattggagacaatgtttatgaaagtcccgataaagtcataaagaaatacaatagtactattgttatttcttgggaaaaactttcctctggtgtattttttttttttttttttgcttgtttggattaggagccatgcagtagggtcctgcgatttatctaagagctaatagaaaagcaaatttgcaggcttggaacttgagaatttgaaatcctggatgaaagagtcagcattgtgagaatagaagatatgagtagatggaataaaactaaaggtctaccaagtatacatgttggcccaatgcaaaaaggccaaatattaaaaaacaaaacaaaacacaaccaaaaagctattcaacaaaagataagaccaaagatagaaatcgctatcatagactaaatctctggaatgcaaaaataagttgagattgctattcaaattttattattgtaaattttggtatttaaactttaaaaatgttgcattgtaagactgtaggaataatttcacagatctgtcagtggctagattgcttccatagtcactgtattgtccattggggcaccgaatccaagctcgctcattattggggttagaggaggagcaagatatggatcttgattaagccatgccttctgtgaaattaaataattaaaattaaacacaaataacaaagttaatttgtttaaag

SEQ ID NO: 10456 - DNA, 6000 bp, Homo sapiens
atggttttctttaatcagcacttcagtgatttacttattatgtttattgttcattgtctctcctaactagaatgcaagccccatgagggcagcatctttgtagatatgtggtataaattttgttccctgatgcatgctaagtttttagaacgaagtctgtcatagtgtaggctcaccaacatttgtatgaatgaaagaacatggtgaatgggaattcagtgttagtttaaaaaaaattcattaaagggataatattttattagaatcttattaattttaccagtaaatattgtattaatcagggagatatatatatatatatatgtcatattcatgagatatatatatatatatatatgtcatattcatgagatatatatacagagacttattttgagaaatttgctcacataattgtgaaaactgaaaagtcaaaaatctacagggtaaattggttacagatttagggaatagttgatatgcagtttgaatccaaaggctgcctgctgacagaattttctcttctttgggataggtcagtttttttctcttaatgccttcaactgatcgattgaggcccacctacattatgtagagcaatatgatttactcaaagtctattgatttaaatgttaatcttaccataaaaatgcctttgccaaaaaaatctaaaataatatttgaccaaatatctgggtaccatggtctagcaaaattgacacataaaattaaccatctcaatgtgtcaactttgctagggcatggtacccggacatttggtcaaatattattcaaataaatttagaatttatcacaaatgtttgatatcataatttgatttacaaatatcaatctaatactttattttacagctgaatgatctcagagagcaaccccttccttctataggccaagaaatggagtcattgtgagattagtaactaatttacccaaaatcacagaggacccacacaggatcccaaggctcctgactaacaatcctatgttcttcaactacaaatgctataaaacaaaacagctataaaatgctactttaagtgttttggcctcttttgttttgttttgagaagaagctttggcattttatagtacaacagagtgactaaagccatgctctaacctcagataactgtagatttaggaagtttatactgtggtgttttatggtttggggagatggcgatctgacctagatatctgcacttgaatatatataatcagaattattttctaattgtttctattgtcttcaaggcagtttatattttttgctaagccctactggggatgtataaaagactggggaagggtgggccataataaggtaaggccataataaggtaaaataggttggacaagataagttagccaatatctgagtaaagacttcaaggaactgtaggaggaagcaaatgaatatttgtggaagtgtgtttaaatcagagagaaaagccagcaaaaagccttcaagttaggagtctgcctggcctgcttaagaaacagcagggaggccggtgtgctgggagcagaatggatgacccagtgatggggaaattcatgggagatgaggtgtggggcaaaggtacatagctcacgtagggtctcatgggccattttgaattttattctgatttgaatggggaaccattggagggttttgagctgaggaatgacatgatattaattttaaaaggaatgactatggcaactgaatttatactttgggttgttgttggtgttggttggggattaggggtggggtttgtcaaagcaagcagaccagttgagttgagagactactgcagtaatctgagaaattctggtggttcagaccaggtgtctctggacctctccaagaaaatagacagagttttgaatgtggaatgtgattggcagagaagaagtaaggatgatttcaaaggtttgtggcctgggtaactggcaggaagtagttgccatctactgagatggaaatgtcacccactgtgattggagtatgtttaaggagaaagaaccagagttcagatgtggacatgtcaagtttcagaggtctgttagacatccaaatggagatacccagttgttagcctggagctctgtggagagatctgggttagagatataaatccaagagatacaacttttcattcaatttgattatttattggacgctttataaactctgtaaatactgggcactaacctagacattgcaggtacagatattaagaatatatagtttctccctcagaaatctcttaattaatgagaaaagcagacatgtcaacaaaactgcaatatttaataaaagaagatataaaggcctataaaggtgctgatacagggagaattaattaattccaccctggggaatagtcaggaagaccttcagagagaaagtaaacaattgattggaactttaagattaagaaggatttctctgggtggacaaagtaggatcttccaagcagagtggaaaccatgagcaaatgcagtttcattcttcagaaggtaaatgtgctctggcatgccttaacttataacaaattaatcaactcaatacctgctacattttccctcacaatttggaatatataaagaggcacatactactatggaccaatacctggtcatatatgagattgaaggacctttacttacgaggcttaaaaataaagactgcccttcatgtcagttgcaggtttatatctagttctatagtattaactgaggtgtcttttcctatgttttctgtgcatgatgactttttaaaaatcaaagacagagcagcagccagagtagtctagtttcatggcacacagaatggaggatattgctgaacccagatttaaaaaaaaaaagaagtcaattcttatttttttaagtatggccctgagctcatctcagagcataaacaatagaatttagaatatcttttatgactccgtctggcacctcctaaactagatcaagattctctagctcagggaagaagggcaaaggatgagaaggcacagagaggatataaacagagaggttggtagtgccaggctctgaagaaggtccaacttggaaggtcatttcagacaggcgtggagtcagcatttgaggcctgtctggtctctactcctgccaggactaccctgtcagccagcttggcaggtatggaccacccagcaggagtttttcttgactgtgccctaatcttttactttcccaagtttctctatatgggtacctccccttttaaaagctccagacacagccaagcaccactattgctccagcaaagtatgaagccccagaaatcaatggtttggggaagagtcttaggggaactaaatgcctccttatttttagatgccatagaacaagagcagttcaggatcaataaccatcccaccccatgataaaacacgccccttccagaatctttcctttttcgttcattctaggtgtctgtctggaacagctggggtatttgagccacagctgagcttctgaaagcattctaaggaacagtttttcacttatctgattcctttgaaaataggggtatcttatgtgatatctgctatcccagagtctttggtcctctgttccttctcaagtcttggctcccgtgtactacttcaaagccctatagatattttattctaaagaaaagaaacttggttcctttaagttgtttaaacatttctttctgggtataaacttgggtttgtgtctgggagctctgttaaaaaaaaaaagtctttagtaagccaaagctgttagaagcttataagtaagtgacattacaattgaccgtcagtaaatagtggaaagattgcatgactagctactccttcagatctgagacaacctggagctagatttttgtactctctactcagaaaagcatatagtgacttggggtttgatgctgtacaaaaatgacatgcttatgcacaactttaactttctgcaacacttttacaacttcttgtgaatgaagtaggcagggctcgcatttgacagatgagctatgtccagcgtgaggcagagttaaaacccttttcctggctcaggaacttcaggctggggcctgtgtctgctctccctgcatccctgtcctctagcagatacctctctgctaacatgctgagtgtccttggtaaattactcattctctctgtctccgtcttctaacctccacaataaagtccttcgtagttttaactatcttttcactgtgccccagtgagcaggagtttggaacttgattgttgatggaaaggcaatatttggatggctaaacacgctttccaaggtatctcgctgatcttcctctcattcctggagatagctaacctttttgtaagtgtttctttgagtctgtggactgcacttaacgctcttgtaggtcctgctttcatttggaacgggcaggcggagaggaaggaagtgtattgcaactaccaatattttcctctaggaggagccgcgcagctcagttgagagtgacacgcaccaactccagctcctcgccgggaagacttcatcccagcaactcggaatgcttggcccgggcggcactcggcctctccgcagcagttctcgaactggcctccttgaacgtccgcttcgccttcgcttctgcaacctggatctgggggactgcgggccaggcgcggcgtgacccctggtgaacggtggccgccttttcccacccctgccctcccatcctcccttcccgtttcaccccgccccctctctcctccccaagcctgacagcccgcgagctgccaagcagggcgcagccatgggaagaggaggagggctagggagcggcggcggcggcggcagcggcagcagcagctgctacagtggcggtggcggcggcggctgctgctgagcccgggcggcggcggggaccccgggctggggccacgcgggccggaggccccggcaccattggccccagcgcagacgcgaacccgcgctctctgatcagaggcgaagctcggaggtactggagtggggctccgggagtctggctttattttcctcctgttgtgccagggggcctgagggtgaaccctgggactctagttgtttatgaaaacgggaggatctgtcttatatatttacacggataattttttattccggatgacttggctgtgctcccctcctccttgcgaagaagttgttttctgctggtgggttgttgtaacccaatctagtgtgtgtgtgtgtgtgtgtgtgtgtgtgtgtgtgtgtgtgtgtgtgtctggaagttggtgagggcggcagggagttgcgggcgacagacgaaccatcacactctggcgtctgctctggcccgcgagtagtgtacgtggaggggtttactccggagacagttttgttaaagtcataaaagttttgctagtgtgtttctgtttgccatcatctgcctggctgcggcaggaactgccgaggctgctgctgttgcgcggggaagaatccccggcagcgcgactggagagactggggaggtcgagctgtgcgcgtggacacagcgcgcagagcgcgcggtcttttgcgcgtttgtgcgggccgcagccgcacgttggcaccgatggaactggggtcagtagagtgacagccaccagtccgcatgaactggggtaagtggaaattgtggcgagccgacctcccccagcttttgacacactagtggttgtaaaatcaaccaggcttaaagttttgacagaactgccagaggctgcgggtcaatggggtggccgcgtgtctagggagagggcgctggcggcgcagagggtgcggggcagggcacttgcgagtgcgtggggaagtctatttggggcgagtgctttatatatagcccgaggggatgcctgctgagaccgagctgcgggggctctcggtctggcgcggactgtgtgtcctgaatgagtgtacgtgtgcgctgtgtgtgcgcgcgcgagtgtg

SEQ ID NO: 10457 - DNA, 6000 bp, Homo sapiens
aggagaatcacttgaacccatgaggcagaggttgcagtgagctgaagtcaccccactgcactgcagcctgggctacagagtgagactgtttcaaaaaaaaaaaaagaaaagaaaaagaaaaagaaagaattgataataaatggtaggaggagaggagataggagagtataacgaaccagtggaggtgagatattctggtttttatttttctattatgggtaacatgtagcataaaaaaagatcttcaaagagatgatgctttgcaaaacttatattaaattagaacttttaatcaaatgcaaaatttaaaaagtgaagtattataaaaatgttaagcgtgttaaagcaaactaaatatggcctgagaaagactccgtacttctatatttgagtctttgtggatgaactgtaatctaacttaataagcaaaattgaaaacctgacttaataactatgcacctgtaacaggagctgagtggtggccaatcccagcagccatacttcaaccactcatagactactgaatgttcaaactgcattcaaataaggcaaatgctgagctgtaaccaatctcactgtttctgtacctcatttccaattcctgtacctcactttaccttttttgtctataaatttgttctgaccacaagacacccctggagtctctgtgaatctgctgtgattctgggggctgcccgattcatgaatggttcattgctcaattaaactcctttaaatttaatttggctgaagttcttttatcaagtactattatggggttttataatcaagtagtttgataatggtgataaatatatgatatatagaaattgcaggaaaagttcaattaggttgagtgcttattaaaccagtaaaccgggtatataactaaggaaatttttccccaattattaatacaaaatgactttcacctgaatttccctcaaataatttggattttcactttaaactcaataactggcaaatccatccctcttcaaaaaacaaagaaacttccccccaaagacccccaaaaccctctttacagtgtgttacccttaaacacacagaatgcccatgtagtgggctgaatagtgttccccctcaaagtatctgtgtccgcctttatttggaaatacaggcttcgtagatgtaattagtcaaggatctcaagacagaaaccatcctggacttagggtggtccttaagaccactgactggtatctttataagagagaggagagggaggtttggacacaggcacatagagaagaaggcaatgtgaagatggaggcagagattggctgcatttataagccaaggaacaccaaggactgccaacaaccaacagaagctctggcagaggcatgggatggtttctccctcaatgcttccagaaagaatccaccctgccaaccccttcattttgggcttctgacctccagaactgtgatagaaatgatttctgttgttttcagccacccagtttgtggtaatttcttacagcagccgtaggaaactaacatagcttctattcctcaccagcttcccagaccccctaaactatgattacacagataattttttttttttttgagatggagtttcactctagtcactcaggctggagtgcaatgtgatcttggctcactgcaacctccacctcctgaattcaagtgattgtcctgcctcagcctcccaagtagctggggtttcaggtttcaggcacctgccaccatgcccagctaatttttgtatttttagtagagatggggtttcaccctattggccaggctggtctcgaactcctgacctcaggcaatccgcctgccttggccacaaagtgctgggattacaggcatgagccaccgcgcccggccaattttttatattgatttaaaaacccataggtttttgtaattggtacttacatgaatatgcaaaggacaatattcacagtagtatgccatgagctagttttttaaatgctcacagaaatttcaaatgcaaactggttttacttatgtagcttaaacaaatgccaattgttgaactttgtgctggctctttaatatcagttctcttttttcttccagttaatgttgattagcatcagctcatttagtcagttaacatttatttcctaaaatcaaacactcttgattggtcagcctgggagaagagggctaagattaaggttagtgatggttcccttaaaacctgtcgagtgtctgcattgttagacacactgaaatctaagaatcccatctctctggggctgttcactttactaataattatttataaaagggaagctgagacaataaattgccaataaccatgtaacataataaccacaatgaaaagacattaaagctaccttttctgtagcctgattttacctagatggtgggttttggtaacaagccatcactagaggtcagtttttgattacatgtcttctcaggttcagcctatgttttgatttttggctactgggcacctctctggtttttaggctttaaagcagatccaaatgttatattatagtcttgtaaatgtttcatcctttttgcttctgatagattagaactctaattattaaaaactatttttaagcatttgtgactacaaaaactcctaaacttcaaatggtttaaattttgatgtttattttaattttaaaatattttaaaaattattcaataatagaacaatctgtaatgaaaacttacacatatgtgagaggtactattttaagatgagagtttgcaggtcaaattagtcagggaggaaagagtagaagtcagagtgggaaaggcccttaaaacttaatagggaatatcaaatctctacaaaaattttattcaagacagtgtctaagacttagaagcaactaacttaaaagcaaacttttggaacttaatcctattttcattggggactccgtttatgaataatatgctgtaattatacgtagaagcttaaggactgaaacagagcattccaaatgacaaatgttttctcctgaagaaatggcacccaaattatgttgtacaagtaagcggaataaaataatcatatgcttgttattaaaattatcatatgcctaacattcatgattttcaaaagtgaaaaacagtatgttatctttgagtttgttttcatgtgatataaatttataagcaagtcaaaattaaataatgtactgagcattaatttaagccaggatttttcagcctcagcactattgacatttggggctggataatgcttcgtcgtgaggggctgtgtagtgtgaggtgttcagtaatatccctggccccaacccattagataggtcccctctccaattgtgacaaccaaaatgtctctagacattgccaaatatccctcggaactaaattgtccccagttgggaaccacgaattattaatccctaaaagacaaagcagcaactcctgacccctacaaaaagttttaaatcaataacttagtttaaaatccttactaagtgggatcattactaatctcacttcattgtaccttcagtatctggaaaccgtccctatggtcacacttaccacggctcattattattttaaaacatggggctgtgtcatttcctgtctgtgagtttggactgcagtgggaatccattagttgaatgaccttctgtgtaggttaatcacaagacaagttctcaaactaagggtttccctgcggctcatttctttttaaagttatggaatacctgttctgcttataccttttagattcataattatttttcttgtatcaaaatttcaattaatagaaataaatgacgttactgacacttcatgatgattaagttttgggcaagtgaaccattttacactctattttttattcctcccacttttagtcagaatacacctgcagaataagtaacagaactgtgtgaaaagaacgactaggtcattacggttaatagttttagaaaaacagccgaggcctggtctggaaagctcacaacctccacccagatgctttccagcctcggggatattcgtactagcagtgacactagccagcttcctctaggctggctctgatgttggaagacaagcacgcagatgtgtgttacttttcaagcctggacatcgtttctgaggaatttaactccacctctcctgccagaatggaaaatcaacgccccccattcccgcccttcaccaacccctctccgcctgcccctttcccttgggtcctctctgttacagaagttctgatttttcctagcgagctggaggaaaggcaggtacccggagtggagttatattacctgtttctttgttctgatgggaccccagagaggacatcacgctttgtaactggttcttcaaggggagaagcaaatgtgtccctgaaaacttcagctgccgcgtttggcaccaggtttgattgacaaggactggcggagggaaagcgcggaggctgggctgggggccgcaggccgaggcagagacaaagaggtttcgcctgtccccgagagtggaagggcccctgggggtaactagcctttgagctcaaaggggcatttcgtgaggtcgccttttggttcggagagcgcgcggcgatcgggtggagggggcctggcgggaagaaagctggggcggggaaggggcgcgggccgaggtgggagcggagctgcagtcacgtggccgcccgccgccgcggagttggggctgttcttccgggttggaggcgcagcgccgcggggcccaagcccgggtctgccagcgcgacgtcctctcgcggccctcagggcacagcccaaggctgtcagcctcccggcccaggtgagcgcgacggcactggcgggtgcgggcagccggggcgcgcgcctagggcgcagctgggaaaggggctcgggcctttcctgaagaccacggccctcgccgggagagagacctgtcaaagagcaaagcggggcggggtcggcggtgtcccgggcgcagggtgcattggggtgtccgcaggccgcaggcttaggtggggaagaagcaccgtgcctcttggtgtccctttctcgtctcctgctggggcgatgtcgaagggagtgggctggtggatttgggaactgggtccccgaagagggcagggaatgaggcggcagctgtgcaggtgcagatatttgcagctttgggggacagcgagagtcgtacggggtcatttcggccctcaagatcgggggtggtggagagggaggtcatagaggactttcgatgggcggttcatccagagaggtggcagctggatgcccttgaggtatgcttgacccttgagggagttcggagagggtgtccggctggggacataggagattgcgagcacaaattgtgagtgtgagttggggcggtctggcggtggtgggtacaagtttctggggcctaggctggtgaggaggaagagacagcggagagggcgacctgggcagagctagttcaaactcaacagccggaatgactatttgcagccgtggccaatcggcttcctagggaggttataaatagcggtctcgtgcagatgccagcgggtggcagttagttgccgagcaagggacggcaccggtggcagtagccgtgacaccagtggctttgggtgaggtcacggcgcctgccagccgaagctggctcagtagggtattgtgtccttgctggtatgtctcgcttttaaaagcgtgacttgtttatggttgccggtgtcctttattcaccctgtggcgccggccagtccttaggtggtctgtttgtcaggagtcttgtaggacagacttattcggagaagcgcgtggggcttaggtgcctacctactcttcttatttaaagtgtgccccttttcttcattgcaccccttttatttgtaaaccttgactttttattaacagacagtttaggattgccttctttccagcaggtgcgcttaggctgcttaccttggtgatagaatcagttt

SEQ ID NO: 10458 - DNA, 6000 bp, Homo sapiens
aaataattaaatcaacctgttcaaatgatcctagaattgcataacagcttaaatataattaagtcatatttcaaattaagggacccagcaatgcagctaaaatgttactgctcatcagtggttgttattctgagtcatagaatgccacgaattgaacattcctgccagggcaccaccctggtccaccctcccctgctgcagccctggtgtgtcactcatgttgaagtctgccagtaagtccaaggaagtttcctatagtgttgagaactgttcctcaccaggattctgaagtcaagtattttgtttttttgttttttcttaagtaccagttgcccaaatgtctttggacaaggtttctggcacaggcttgttcaggaaatagggagggagaaacacctattttatattttaagtgaaaaaacacacaggaatattacgtaataacaaaaaacaaatggttggctcatggtgaagtttaagttccatatcactgtgactttattttggtcagagaggaagcaatcataggttctcaaggtatatcaacaacaactattaggataatttcactagactgtttaatttaataggcttaaaatgaaatatgccaatgttacaattgagcacaaaactacttattttctcttcctagttacaagtgaaagaaattaatgaacagcaggtttgcagtggaataacaactgttgtatccatttttgcctctgcagaacatagccctggagcccaatatatgccagaaaattaaaaattattgaactagactaagttttccatatgagttagctttgtgagttagccccactgttttggggtatattcccctaagtgcttacatactaaaacttaaaaatccaaatcttcataaaatctttgtaaaaacggaagcagttctgtacacttccacctacccctaacacctgagagtggaggggatggggttggggtaaaaccacactttgatgctaccttaaaatgtatttaaaatctcatatttgacttttaaaaagaaaacatgatttaaaaatatttcttataaaaatctgttattttagcaaacaacaatttttaaattatttatttttgagtaaaatcagcaccacccccactacccaggtgggagtaccttatttatcctgtagctttgagaacctataatcttactgctaaagaaccctggcatacattagacacggagttctagaacctcttctattcccccaacctcttagcggaatgttcttctcttgtaaaaaaattaaaaaaaaaaaaaaaaaaaaaaaacctctgacggccagccaatttgaaaagcaaattcatgtgaacgttataatgggttctgatgtcttcatgcatacccattttatagaactatcttcaagataattccctaatccaaggtaaatatttttaaagcgaggattccagaaataataataggagttgatggagatatttttaggcggacattaaagttcctcttctgatggccatcaaatttcaccacttcctacagggtctaccacacgcagagcctgccctgtttacatggtctgtttaataccaattcttctatttacagagaagaatgattcatactaaccgagcacttactttaatccaggcattgtgctaaatgctcagaggctcggttcatttaatccccacagcaattctcagaccagaagtagtacagtattttcattcccactttacatttgagaaaactgaggcttagataaacttgatgacgtttcccaaatcacacagctactatattgtggttccaggacttgagtccaagcagcgtaactccagaaccttacttactctagttactttactcagtatattagattaactccaagaagaatactttggttttaagtatatgtttttctttttgagattattggttaataatctcaattactcttgcctcatttcatagacatccactttccaaattcttaatcagttcagtctctaatctttcagtgcagccatccccaaccgttttggcagagagaccggtttcatagaaggcattttttccacagaccaggggtaggggaaacggtttcaagatgattcaaacacattacattcattgtgcactttattcccattataattatgttataatatataatgaagtaattataaaactcaccataatgtagaatcagtgggagccctcagcctgttttcctgcaactagacgttttcatctggggatgatgggagacagtgacagatcatcaggcattagattctcataagaagcgtgtgcagttcacaataaggttcatgctcctactcatgcttccaaacccttaaagagatctgatcaaatcaagtctcatttaaaatagaaaagtatgtagtataaagtctagagctgaaacatttgtcatcaagtgtctcatatcaataactagtttgtgactctgggcaagtttctgtcttctctaaatctttactcaatgacatgtctttctgtcagtcagaataaaattggttaagaaaataaccggcttgacatttatttgtatttgggtttattgaagttcagaaaataagcactgattctaaaattaattctctaaccatagttatctctcagtctctacatttgtattgactagacatataaaagattcataaatatgtaaacatgtaaacataaaatttgtaacttgtgaaaattaattgtaacaatatcactgttagtgatggttatcaccaataatttgtaagtcctagaggaaataaaaatattaaaattgaaattatatattagcccccagaagaaaggtaaatttcccagtaattgtaaacttgaacatattatatgttaaccctactttatttcaatattttacaatttctttttgttttttctaatgaaatatattgcaatttgctaaaatgccatatatgtatttgcatatgtatgtatatgctgtacatatatatgtacacatacatacatacacatgattgtgtatatatagacacactattatatgtttttgaaaactaagcaatttggagaaatatcattgggaaagtacttactatgatttttaaatgtctacgaattaatcaatatctattggttactgttcaaagcacagagagtcatactgagaggcataagacataactgatactaccaacagggaaacgagatatacacaggaaatgaattccttggcagggtatgagagcattgaacacaaacaaaggaacttaagtaaagtccaatgggattgaactgtgacccaacataatacaatttttctagagactcatttgtgtaaatttgaagacagaactgagaaatgacattataaaaactaaaaacgggagaacgagatttttaatgtatttactaaatagtgaatcagttcagatacataatagaaaaggaatttcttgattaatgggtcaacatactgagatctgatggccttcaacctccttgggtctgcccaccccatttttgacgctccttaaacttcttcaacttttgtcttctccagcttttagttgctgtgatcctctatctggcaatgtatccagtgaaccctgtgggcttcttccttcctgtccctcgtgttacctgttctgtgctacctgtgttgcgttctgctcaacgaaccctcctttgggtggcactcttgtcctgcctagccctagttctgctagagatgctcaattagttgttgagttgaagaattgaattgaactgtttccctcagattcctctaaacacaaatccacttattctttctgtctttgaaattctcaaaaccgctaagacacagctattttgaaaatagccagcattggttgaagctagggtgaatatggcttttgactcagagaggttgttcaactcaccaggaaagggaagcattgcaagttcctaagcacttctggactcttaatgcattttcactcgtgaaagtttcaagcaagaaaaaaataaagtagtgccccgagttctttattagattcaattaccagcgtacaaacatcctaattcacttaaacaaaatagcccacacacattccatttccaaggaggctgcttttcttcctctcttcccttctcgctctccctcttactgtttttcctccgtcttgcttctccttttctccccttatcctagttatctcaaagaaaagcttatctgcaaccaccctttaaccacgaattaccataaacgaagcaacccccccacccccccataagcgaaagcaaagccctcagtggagcctgtcggggtggtggggacgccccctttcgtgcaaaacgacttcacggtgaatttcaagtgtccgcaggggatggaaggggggattccagatcctcgcattttcacagacggcctaatccctctgcgcaatggacccgggaaagctgcctcccgttaagggcgcccaggcactgtcaaagcgccctccctgcccgggccgggagaagtaaggggtgtgaaggcggagccactgggctggcaacaccctcccgaaggtccagcccttacccgccttcctaccaccttaggggatttggcccggagaacgagatcaccctctcaatgaaaggcagatgtccctttaaggtttgcttctacagcccgtggactttagcctaaacacggacccgcgaagctggctttatttgtccatgtctcggacagagcctgggaagctgccagtgagatttcagagaccaagagcgcgaaggggcgggcgatgtggcaatccgtctgggatgtgaaaagcgtggagcgcatttagaggaattcgacgaaaacacaggaaatcactcctctcccgctcctgggcgccgctgccactggggcagaggactgggaaccgcggcagcgggataagtggcccagccagagagcgcagctcccgcgcccggtcctgccctgcgaaccagcgcggccccctggcgctgaggctgctccggccatggcccctcggccccgcgcccgcccaggggtcgctgtcgcctgctgctggctcctcactggtgagcgactcgcttttctctgagcatctcctgctcgcgggcttggggcttggagcggggagggaggtcctcagagccatgggccagataggaagagagagcgcccatccactttcgggcattccaggtactcaggccaggctacggggcaggcaggagtttcgcgttctggttttgatatgaattagttttcgtgtctctccaaagtccttcaccctaggagtaggagtgaggcagcactgaaaaccttagaaggtagaattcacttttaaaattaaagttgtttttacaatacacattgtatattaggactttgctgaatatttcctcccctccacccttttttatggcatgggatgggagggtgatgcttatagggcgcctgatacatatgcaaaattcctaccctcgggttgttccagagtggacattattgaattttcttgctgtctactatttaggcttttttcccatgcagaacaagaaaaggcagggatgcaagacgaaactgccacttgttccaaaatgatgtttctatgtcagcacccaagaggagggatattttgaaacgtagaaaggaatggtgaacattttctctgtaaatatcacagggcagtctacttttaagatgcaaaatatagtattgttatttgtacataaatgtgtatttttaaggaggggacttaaaaacatagtggaaatgcaaagttgtatccaatttagaaaaagcttgaaatatagcattttgtaagattttcccaataatgaactcatggtcagatcttttttaccagttactgattggggtgggggaaagttgaaatggtgaaaaatggaagaaggtggggggaaagtgtatcgatagaatctctgtgtgaaagaaaatcaccttattaatgggttaattaacagctggctttaacatatca

SEQ ID NO: 10459 - DNA, 6000 bp, Homo sapiens
tggggaacaaacattcattgagcatcaactctgtgtcaggctctattttaggaactgtgagtgaaagaagttaatgagacatgttaacttggaagtccttaagatttcccagaagagagacagatatgtcttaaacgtagtctagtacaaggactagaaacctgctcaaattagcttcagagaaaaagagaaactattattaggttggtccaaaaataattgtgggttttgccactgaaagtaatagaatgatacacagatatttcatggatgtaaacccaggaagaacagtcagatctcacacaatggcaaacaaaattaaaagacctagaacaatctctctccgtgtctctctctttctctgtctgtctgtctcatgcatgcacacctcagtttcttggtctctcatatctgtctctgtttttgataaatggtgcagattggctttttctacactcattgaagaaaatgaatgggctgggcataattccaacactttgggaaggtggggcaggaggattgcttgaggccaagagttccagaccagccttggcaacacagtgagaccccatctctataaaaagaaaaattaaaaaattagacaggtgtggtggtgcatgcctgcccagctactcgggaggctgaggtagcaggatcacttgagcccaggagtttgaggctgaaacgaactatgaataccactgcactctagcctaggcagcacaaagccccatctcaaaaaaaaaaaaaaaaaaaaaaaggcgggggggaaaaaagaaagaaaatggttgtacaaagtgaacacaaatttccatttcatgtgatcagcaaagattctagaatctgtataccatgaatgtaaatccctaggagattgatcgagcttggtcaggtgtttggcttagcgacaaggaggcaggattatgtgactcagtgacttctagaaggggatcatggaagactctgagaaagccctattggcagagctggcaaatagctttgcatgtctgccacaagcatgaaaacaagtaaggccagtcaaccgtagttgtgctagaatcgaaatatgaatatgattcatcagtgtattgatgggtccaggaagctaggaaatctagaattattttatttgttttgtttgtgtttaagttaggagtgtctcttttattttggccattatgcaccccagccagtgcttagagacttgtgtgtgagtcaagctcaatggattctaagctttactcactcatcccatggattcactgagtaacatttgagaagccactggttacttcacttcaaaattactaggacttacctagaagttcatatttaccacccttttcaggtctagggagaagaatgtggaattgttaggaaactcatttcaatgtattataataactattaatatttattagaaatttatttactaggtataggactagactcttataacaaaaatgtataagatttcagagacccagcatttaaatgagaaggtagaatatacacatataactcaataatatattactctgtaatacatacaaaagaaagtttatttgggggaaaaaacaaaaacaaaaaaaaaaagctagaggaaaccagagccaagaaagaagaatgattagttctcagtgaagaaaatgggaaaggctgggctaataatatagaatttgactggagccttgaagtagaatttgaaacaatggaagaaaaaaagaaagctattctaagtagaaaaataaggaattgacaatgaagaatgggaaaggcaggccagtgaactcgtgaatttggcctaaacatagtgtgcaagagggaaagatagccacggagcccacagaggtgagttggagccaaatcgtgaccttaaaccctagggtactttgaatgtcctgaagacatctaatgattttcagcagatcagtcctgcatttttggataactgtgacaacaggtataaaagatgaactggaacaggagagaaggaagcacagagagattatatgggagtttgtcaccatggtgaaagatcaaaagggtttgaaccaaagagagattagcagtggaacagaaaataggagatggcacagaaaaccctagtagggtgtaaagacagaattggaatgggatgttagcagggggctggtggtgcacctggggaagaaagcagaggtttctggtttgggtgattgtctatatgaaaacgggataaacaaaggagggcagggcatgacgatacaacagatcagaaggaaacactggggaaacttatctgagccgtgttccccaacaaaactctgtcttgagctaaggaaaagaaaaagaggggaaggcctcacttcacccctgagtgctttttggagtagggtctctgggtctctcaagatcctttcaagtggccagtgaagtcaaaactattttcataacaatactgagacgttactgcgtttttcactgtgttgacatttgccctcatggtgcaagaacaaggatggggactggtggtcattgtattcttcatcactgggcactcacaggaagagaaagggagagggacacggagaggccagcagatcaatgaattttaatgccacggaataggaaaaaccattgatatggtttcagattccacattgcaactttaagaaactaccacttgttgagttttggtgtagtatcaggggattatccagaattatctcctgtttttctaagtccatatctgtgtaacaccagattaatcaatataatttcaccaaaactacatgccgtaacagattggatgcagaagcagatctgagaatccaaatgtctgtttttaagccagatatttaaaatattagcaaaaatgtaaagcaatgccactcttctcccggattctttcatttggagaaatatagttatttttcataaaatgtacattatttatgttcacacataataggatttttgttaaaggacttactgagtaaagggctcttgagaccaaagagtttgagaagccccagcttaaccttccatatttcctgctctgaatgtggtgtccctcacaactgcaactaggcaggagagcaccctggaaggggttctcaaactactttgtctcaggaacactttatcctcttaaaattaatgtgaggcaggagtttgttctttgtttctaaaagttttgcctggctctggaaaatcgtagctcctgacttattctgcacttcatgacagtgtaatgttaatttgtccagttctgagaacaaaaaccaagaaggatgcatgttatttccccccacccccagagataaaacacaaattcctgtctcacattaaaggaagtgtcctgcctcccaaacacaggtctgttccaaacacttactcacatttcagtgagtcagaaggaaacagacagatattcatctccctgaaacctggctgacttccttcaaaaagtctgtaaggagcgtcaaaatcgtgtcaccggttagtgagcagccacctaagagctctcaggtgatagccggagttttagtaagcaggtgagtaccccagacaattcagaaaaaaatgccttcaggtgtttgtcaaggtgagtaagtgcagccagtaagtgactgataagaaaacaggaaagagcctgggactatataatttgggttcaaagggtattagtcataagccatcagcagcaacatctgatgcataccaatttaatactttaacaatgtgacacatcagccctatctatagtaaagagaagagcttgatttttatgaattattaagtccttcccaccttgagccactttgcttcctagaggcagtatctcaggcatcccattcagctcatagtagcattccatgaagatctggaatgatgacaataatgatgattattagactcataactccttaagcttgatttatgaaaacagttcgttccttcacaaaagtagtcactggaagaattctggtttcagcaatgtgctggaaatttgtggccaaacttttggataaaacataagattcagacaagaaaaattaatatcctatttcttaggtttttaactaaaaatctcggatatagaatgttctctttccagatgtgagactgaaataatggaagaaaatggtcacagtctatgtcatggtgtaatgtagacagggagagtcacaagtgcatgtatgggctctcagccttttctctggccttgaagttaatctcctaaactcagtcattaaatcagctcttaattatctcggaggagaggaagtaatgatgatttctctctctctgtctctctgtcacacacacacacacacacacagctcttgcagcaggtattgcttaaatatcaccttggataatcataacttgtgagcagatcttctttcctgatgagttagtttctaacctggtcattctgcgcttatttttgtccctttctccacccacttaggaaaaacagagaaagggacgcaccgcgcagcccctaggcactgtggtttagggctagtgccctcggcacccgctgccaggagccgggcgctgccaagggctgcggaggggccacgttctcccggggactggggcatctcctgcgtgctggcgacaggctgcgggggcggagtggtgccagggcgggcgctcgcccgtcggatatgcccacccgtcccgtccagggcaggaaagcctgccagggcgccatccccatccccaccgcctccaggctgccggggctgggccgctgtacgggagccaaggtgcggtgccccgcgtgtggacgagccgaggtgcagcccgcggggccgcagggccggggtggggcggggcgcggccggagcagatccggtgtttgcggaatcaggaggggcgggctggggcgggccctcggcgctgcaggagctgcccagaaacttttccctgctctcaccgggcgggggagagaagccctctggacagcttctagagtgtgcaggttctcgtatccctcggccaagggtatcctctgcaaacctctgcaaacccagcgcaactacggtcccccggtcagacccaggatggggccagaacggacaggggccgcgccgctgccgctgctgctggtgttagcgctcagtcaaggtaagcggggatttcgctctgcatcggctgcaggagggacccgcgcggcttcctggggctcgctggagggattgggcggaactagggagcgagctccgtgtgttccctcggattccacgtggactcgggctcccagccaccaggacctgcttggaaagagatacttcttcgttcccttcctgctatcccaggccttgcgtccccattaggcgcgtctcgccctgtctgttaagcaccctccaaagtcatctcagtgagtgctttgttttaggtacacacacgcacacacacacacacacacacagacagacacgcacgcactcaagcatggacagtgtggggatccgcgggtgtcctggagaccgcgagtcctgcagcccaacttcccctggctcagacaggtgccgcgcctgccagagaccagggaaatccggaatccattgctgatggcggcctgcagctccccagcgcggtgcttgctggctttgcagaagcctgcgagccccaaaatgcttatttttcaacccaaggatgtgaataatgcctctatttcttacttgaggacgaagcgctgtgtttcttcccggggggacttggaataaaccaagcgccacttaaatacttggcagaggggaattcttccttcccttctgccttcctcttattgttgtaacattgtctattcgacgaatgtaaacttaggctaggaaaagttcttttcacttctggatcctagatgccgcaatgagagaataagccggagcagccgctctaactgtagtgctgtggcagtggggcccgcccacctcctgagttcttttacactaagaggaggaaataaggctggggtggagagcttttgtgggaccatcgcct

SEQ ID NO: 10460 - DNA, 6000 bp, Homo sapiens; identical to SEQ ID NO: 3028

SEQ ID NO: 10461 - DNA, 6000 bp, Homo sapiens
aacttgagtaaatgatcaatactttctgagctttagttttcctatgtgtaaaatggggaaaataatagtacatcataaagttcttgtaaagaccaaaaaaataaaaataaaaacccagccggggccgggcgtggtggctcacgcctgtaatcccagcactttgggagtctgaggcaggcagatcacctgaggtcaggagtttgagaccagcctgaccaacatggagaaagcccgtctctactgaaaatacaaaattagctgggcatggtggctcatgcttgtaatcccacttactcgggaagctgaggcaggagaatcgctcgaacctgggaggtgggggttgcagtgagccaagatcgcgccattgcactccagcctgggcaacaagagtgaaactccatctcaaaaacaaacaaacaaacaaacaacccagccgggcacggtggctcaagcctgtaatcccagcattttggaggctgaggcgggtgaattgcttgaggtcaggagtttgagaccagcctgaccaacacagtgaaaccccgtgtctactaaaaatgcaaaaattaactgggcgtggtggcgggcacctgtaatcctagctactcaggaggctgaggcaggagaatcgcttgaacctgggaggcagaggttgcagtgagctgagattgcgccattgcactccagcttgggcaacggagcgagactccgtctcaaaaaaaaaaaaaaaaaaaaaaaaaaacccaaaaaccagaaaaaaataaaaaaaaacataaaactgccgggcatggtggctcacctctgtaatcctagcgctttgagaggccaaggcgttagtatcacctgaggtcaggagttcgagaccagcctgaccaacaaggtgaaatcccatctctactgaaaatacaaaaattagccaggcgtggtggcaggtgcctgtagtcccaactattcaggaggctgacataggagaatcatttgaacccaggaggcggaggttgcagagagctgatcacaccattgcactccagcctgggctacggaggagactctgtttcaaaacaaacaaacagaaaaccaaaaaaacacttagcatagtacttagaacatgtttttccctgagtaaatggtgctattattattcttccacctgttgaagttcctgttcaggtgctgagtctctttgtttaaatatggattcctcccaggaggatcttgcttaacacataggaatagagaagataaaggtttactcatctagtgtaatcatccttttagaaattgtcttcctagtggcttccccataaattcttccatacacctgtccaaggaaactgtcctgtgtggaccagaagcctccccctcctcatgactgggcagagaaactagaggcctttcaggccaggccctcagcaactccaaactgagttgccttggacacataccagtctttgaattcatttactaagcaggcaaggcagagtggaaacagtggaactatgttaatctcccgtcttttctcctctaaaccctagtactagagatgtaagccttgaaatgctactaaggaacgtgcgggtttcacaatagcaggaggccatctgagaggaggacaagactccacaggcatgttggatttgggaagcagggctatagtcattcattcattcatccaacacatagttatgtaattcctatgtgacaggaactatttcaggcatataggatacagcaatggcttgctcaatttattgagacttgtttcgtggctcagcatatagtctgtcttggtgaatgctccacattcccaccaacagacttataaagacagtattgtttattatcatctcaaatttacggtggaaaaaaatgaaccttacatagtttaatttcctttagtcctacccagctaccaagtagcaacactggaatttgaactgagatttctgacaccataatctgagctcttaagtttctcttttacacatagaaaaggagaaacaaattgtcttttcatcttatccatttgactgcaggtaaagtcaacaagtttctaatcatggggttctgaaaataatatttacattgctctgagtcacggggattttcatcaaataatattcaatagtggatactactcaatactactgtgagttgccaagaaggaatatttggtaaaaaatatagtaattaaattttgctataatttatgattatgtaacatgattaaattgagcatggcatcatttaacatccaacaaattttgttttggtattgaagaatgatgtgtttaagttttaaggctggattttctttctagacactttcaactatgaaatatacacaatattggacaatagttaaccgttcttttgatgttgttgtttagaaaattaatctcaagcgaataaaatagaattcatacaattaatgaatcctattattccatatggatgaactcagaactaactagaaagtaagtttcacagagatttttgagttttgttcactcgtgtgtgtacagattaggcactcagaaaatagttgaaggaatgaattgggaaagcaaatagaatatgaaagccttctacccaacacaacatgtctttgagtttaggtttagggtgggaataagaaaaataacatgatatgcataagttatcttaaaatgataaaaagtttaatttaaaaacctaatttaccaagagaaccgaaaacatatgtccacacaaaaacttgtacacaaatgttcatagtaacattattcataacatccccaaaggagaaacaacccaaatgttcatcaacagatgaatgattaaacgaaatgtgatacatcgatacaatggaatattattcagttataaaaaggaatgaagtaccaatacatactacatcatggatgaacctttaaaatattatgctaagtgaaagaagacagacacaaagggcacatattgtattatccattcatataaaatgtccagaataggcaaattaatagagacagaaagtacattagtggttgccgagggatgaggggagaggggaaatggggagtgactattaatgggcatggggtttcttttgggggcgattaaaatggaattagatggtggtgatggttgtacaatctggtgagtatactaaaacccactgaattgtacgtgccctttaaaagggtgaattttatggtatgtgaactctcttttataaagtggaaaaaaactcctaagatctcttcagaacatgtcaaaatacattataaaataatagacatgtgtttacaaatctgagagtattaggaaatgttcccttgtttaattataaaccaaatggaatgtttggagatttcagtaatctgacagggaacattaaggggattaacctgacttccccagtgttaacaataccaatttaaactgcatcattcaaaaactacatagtcatattaaagcatttgtagcaatgacttccacgaaaaaaataccaattaaattaattacccattaaagctgccatcatctgaaatacctcatatttatatagtgcttttacttcctcaagtatgaattgtgccttaagatctaatgtatgggagagtcacatctctaaccatttaattaaaggtagagaagtgggtgggattggatagaaatttattagcaatgctgacattccagattggaacacaaagacaagcaggatgtaagaaacctaaaagttcgctttcaatgcagatagttaaatgccaagaactataattgccacatcctggagtacaattaaaaaatatgttgaaaaacaaccaacatacataaaaatatacacagtgttaagtgcagactatgaaatttcccttggaaacagaatccagatcaagaaatagaatacagcacccggaactaaggtgctttttcgttttcttaaaaaaaaaaaaaaagtaaaccaagtttattttgctttttaagtagtgttgttcttaaagcactacaggttggtaaacaacgtataaggtgctttttctcaggccaaagagccataatagtttaaatttcccggtcctcaagagcggaccgggtgggcaggagaggaccctggggtggtgatgtgtaaactgtattatgcactttagcctgctggatggcaactaacacctacagtagttcaccctcattttaacccctctaagtaattgtctcttattctgaatctagagattcagaaacagcgccaatgtttacacacgacttttgaaattttcccaggagtctttcgttggagcaatacatctagatgcctttttccagcaacagtttaatcaaattctggaagcagaaaagtgtcctgtgaggacgtgcctttcctatcaaagtgctgagtgcctggaccctctttccggaggaaacagtcccctctggacctcgttcggcctctctccatcagacaccccaaggttccatccgaagcaggcggagcaccgaacgcaccccggggtggtcagggacccccatccgtgctgccccctaggagcccgcgcctctcctctgcgccccgcctctcgggccgcaacgtcgcgcggttcctttaacagcgcgctggcagggtgtgggaagcaggaccgcgtcctcccgccccctcccatccgagtttcaggtgaattggtcaccgagggaggaggccgacacaccacacctacactcccgcgtccacctctccctccctgcttcctctggcggaggcggcaggaaccgagagccaggtccagagcgccgaggagccggtctaggacgcagcaggtgggactcgcggcgctggcccgcaggcttcccgcacccccttccacgttggtgcgcatgcccgggggcagggccggttgtagggaggagggaaaggagagggagaagggggaggagacgtccccagcccagtccccggctgagcgctggcggtcggtgcggcgtcaggtgcgcccgccaggtgagcgcgctccctggcaccgttggcccccggagggtcgggcccagttgcggcgagcgggtgagtgttgggcgcggcgtcaggggcgcacgggagcccgagggtccccgtggggggaccgcggcgactatgttaggggaggtgccggggggaggacgctccgcgctggtttcggtggcagtttcgtccccgagctgggactcgtgggaaccagagaggcgcgggtctgcggagagagcagcaccggccaacttgggaggctgcctcctggggcgaggggtggcttggagccgccgatcaagctttattccgcggaaacgctgaaagctagcagtgcctcagcggcgcgggcaacttttcacttttatggggcacgacattcctgaacagcgacgatcctgcatccgctctggggctgcagtttgggggggcggccttcatggagagggatcctgcgcccagctccttgggggtcctaagcctgaggctgcagcgaggcggctgttcggcggcccgggcggcttagatcccggggggaatttcattccttccgctcccaccccacccctttggatatcccggggagacgggggctggattcaatctgtgaaatattccaggagtcacggtgtgggccacactggctacttcgaatccacttgttgcgagttgtgtgaacccgcgtcgatttaagctggggggcggggagttaatttcgagtgaggctggacttcgagggaagctgctcacgcttcggattctcatccgtgaccaaaagggctgcccccaggggggcggaactgcctccgggcggtgcctgcccggcgaacgtgggcgcgcgctgcctgggagcgcctcggtgcgcacggaagccgggacccgcgcccagccgggccacggagtttggggacctccgggactgggccggccccgcgcgccagccatgttgcctgcgtcggaggaagcgtgcggggagcaggggtcgagggccaagatggcctctgcgcctaggggttgggagc

SEQ ID NO: 10462 - DNA, 6000 bp, Homo sapiens
caaagagaaagaaaactgcccaaggctggaaaatacaaatttgaacacagctgggagctgtaaagggaaacaagtacaactcttcactgatattatgaaaagtcttttgtaatgaagcatcagaaaattaaacaatcatacgatatgtactaatacaaaatagtgcacattatgctaatacaaaagataagacagtggagtggtttagggcatatgcttgggagccacatttcaaagtttatattctggctctgctacttccaagctatgtggaattaggcaaattacctaacatctctgtttctgtagcttcatcctttgtaaaatgcagattctactattgttctcctcagtggacttttaataaaaggagttaatatatcaaaagcacttagacaagtggctgacatatagaagcagcaatataaatattttagtattattgtttttgttataattccccatctttaagcatgactcatgacaacaaaaaccagaaatgttaaggttggaagcctaacacatttatatatgtaaatagtaaagaggatggattaagatggcaatgtgggtcattcattacttttaaagggggtcttaacattatacttttaggcgggtgcggtagttcacgcttgtaatcccagcactttgggaagctgaggcgggcgggttgcttgaggtcaggagctcgagaccagcctggccaatatggcgaaaccccgtctctattaaaaatacaaaaattgggccaggcgcggtggctcacgcctgtaatcccagcactttggggggccgaggcgggcggatcacgaggtcaggagattgagaccatcctggctaacacggtgaaaccccgtctctactaaaaatacaaaaaaattagccgggcgtggtggctgacacctgcagtcccagctacttgggaagctagctgagtcaggagaatggcgtgaacccaggaggcggagcttgcagtgagccaagatcgccccactgcactccagtatgggcgaccgaacgagactccgtctcaaaaagaaaaacaaagtgtatgtatacatatacacacacacacacacacacacacacacacacacacacacacacaaattagccgggcatggtggtgcacccctgtaatcccagctacccaggagactgaggcaagagaatcgctgaacccagaaggcagaggtttcagtgagctaagatcgtgttactgagaggtgacagcgtgctggcagtcctcagagccctcgcttgctcttggcacctcctctgcctgggctcccactttggcagcatttgaggagcccttcagcccccccctccactgcactgtgggagcccttttctgggctggccaaggctggagcccactccctcagcttgcagggaggtgtggagggagaggcgtgagcgggaaccggggctgcgtgcggcgcttgcgggccagctggagttccgggtgggcgtgggcttggcgggccccacactcggagcagccagccagccctgctggccccgggcaatgagggacttagcacccaggccagtggctgcggaggatgtactgggtcccctagcagtgccagcccaccggcgctgcgctcgatttctcacggagccttagctgccttcccgcagggcagggttcgggacctgccgcccgccatgcctgagcctcccacccactccgtgggttcctgtgcagccccagcctctccgacgagcaccaccccctgctccacggcgcccagtcccatcgaccacccaagggctgaggagtgtgagcgcacggcgcgggactggcaggcagctccacctgcagccctggtgcaggatccactgggtgaagccatctgggctcctgagtctggtggggacgtggagagtctttatatctagctcagggattgtaaatacaccattcagcaccctgtgtttagctcaaggtttgtgagtgcaccaatcgacactctgtatctagctgctctggtggggccttggagaacctttatgtctagctcagggattgtaaacacaccaatcagcaccctgtgtttagctcaaggtttgtgagtgcaccaatcgacactctgtatctagatgctctggtggggccttggagaacctgtgtgtggaaactgtatctaactaatctgatggggacgtggagaacctttgtatctagctcagggattgtaaacgcaccaatcagtgccctgacaaaacaggccactcggctctaccaatcagcaggatgtgggtggggccagataagagaataaaagcaggctgcctgagccagcattggcaaccagctcgggttcccttccacactgtggaagcttggtttttttgctctttgcaataaatcttgctactgctcactctttgggtccacgctgcttttatgagctgtaacactcaccacgaaggtctgcagcttcactcctgagcccagcaagactaagagcccactgggaggaacgaaaaactccggacgcgctgccttaagagctataacactcaccgcgaaggtctgcagcttcactcctgagccagcgagaccacgaacccaccagaagaaagaaactccgaacacatctgaacatcacaagggacagactccagacgcgccaccttaagagctgttaacactcaccgcgagagtccacggcttcattcttgaagtcagtgagaccaagaaccctccaattccggacccattactgcacgcccgcctgggctctgtctctaaaaataaaaaaattatacttttataaactctttccttgaagggttaaatgcatatgaggaagcggcacatggacttccttggcgcttcccccaccctccctttctaccttgtgtccataccaaattttgtgatttatcactaagtacaaattattagttaagtgctataaagattcttttgaaataccttttgggaaggatatagaatttattttaagagcataaaactagacaactggtgtttctttattgcttgctttggaactcatattcctattggagttcccaattaggcagtttgcgaatgaaaatttctaaatcttgggctaaagcctgttttggtaacaactttagtccttatttgaattacattagtaggcatgtgtacaacctgtaacttctgagatatttggtccttgagacttctagcggcattaaaaatatgacaggttctaggctctcggtacttacacacttttctctcttttttttttttttttttgacaaggctgctaagagaacactgcaatctttgggtagttcacccgttttctttactgtgcaaggttcataaaggcaggcactatgtctgtcatgtttgtcactatatctcccatgccaaccacagtgtgtacttcacataatgagcatttcaaaggcaacatttggtaaagagatatgaatgaaggtcttacactgaagcagtggggaacagtagaaccagcctaagcattagatctgggttcaaattccagttttgctcattatctatgtgatctacagcaagttgcttgacaaactttaatttttacttttttgtaaaatgggaataatacctattatataaggattataagaatctataatcatttattaaaactaaggagtgtttagtgttttcttcgtaatgtgtttcaaaatatgggctttaaaaattgagtgaaatacaattcctgtccttaataaatttccacatacgatagtaagacaaataaaaaaatactacggaaattttatgggttttcaaggtcgggagtgatgatgtgtttgagggaattaggaaaggaggtggcatatgaaaaagtccttaagggatatttaggatctcagcagttaaaatgggtaggcatatccaaggtaaacaaagagaacataagcagggaggtaaaaaggtactgagtgtgactgaagaagggccagttactcctggctgaactgtaaggttcgcacaggaaagtagagatacgtcagaaatgtgtggtggggccatattagtggtgacaggttctttctttaatccagtagacaatgagaaacgctgatttgggtctatggcataataggaagtagtatgccacatactgcatgtgggagttctgcaggacagattgggaagtgcatgcgtgtaagactgggaagaccagttaggagaggctattgcactgttttaagtaagacataataaagccctgcaccaggcggagagcagaaggaacgcacagaagacgcaggagaggcacatttcagagagaatccagtatgcaatggatgtcgcacacaagagagagagacgcaggtgaccggagccatttacactaatgggtaaatctcgggaaagcgctggtttcggctaccggccagttacaggtttgaggtgcccgtcgccgccaccttccctttttttatattcctctttttctcatggccgcctccgcttccctccatctctcccgcgctagtaactgagctttcagtcatcgacctgaccctgcgttttccctcacgctccgattctgcttcctatcactgcctcctactgtactatcacagccaggacgagcacgggtcaggcactgaggctgtgggacactccacccgcctggtcccctatcgcctccgcctaggcagctgccatgcgtgcgcccccacagctctaggaccaataggcaggccctagtgctgggactcgaacggctattggttggccgagccgtggtgagagatggtgcggtgcctgttcttggccctgcagagagctgtgggcggttgttaaggcgaccgttcgtgacgtagcgccgtcaggccgagcagcccccaggcgattggctagacaatcgaacgatcctctcttattggtcgaaggctcgtccagctccgagcgtgcgtaaggtgagggctccttccgctccgcgactgcgttaactggagccaggctgagcgtcggcgccggggttcggtggcctctagtgagatctggaggtgaggcgggcggtgaccgagaagaggggcaggggcggcggggagcggggcggagatgggtgggagcggggtttgggctgtgttggtggcaattctggagcttccctcggccctgggaagtggctaccggcagctcctgcggacctggagggggctgcggttgcgctttgtcggtgtggcagctcggacccgcggggactgcaaggaatgtccttgaggcccggcaggccgagcggcggccggcatcagtgccggagtaacccggggtcccggggtgggcttgagaggcgggcggcggtctggcctcttcgtgactgcggtcatcatcggtggacccgcggggcgtagctgcgttcatcgtccctgttcagtcagagtaggcagtgctggctgcacggtcacgaaaatcggggcggaaagggtgtcaggcagggtgacctcggaggcccctggattcgagaaatgctaggggtctatggggctgtcgggccggcagctcgcagggcagacgggagaagcgcctgcatcccgggatccgggcattcacgcccaggaactgctgttcgttagcacctttcttttaggtgacgggaaagatctctgtaaatactgctgactaacttagaaccatgaaagaaccgtggattggtgtagatgtgtctggttatttacaggagaacggcttgagaggatgcggagcccaacgtggggattcgcacaatgactcaaaagattcttctccctctttttttttttttttttttggtaaggggtgtagtctccttggtgctgatattcttttaggaaaaatgtaccttggagatacaaatatagaacagttaatttctgcagtaggaggaggtcgatgtactccattcttaagtagtcgtttgaaatatttcaggatttgaggatattccttcttagacatggtcctgcagagtcgtaggaagcatttgtttctgggctatacta
